United States Patent Application Publication US 2017/0114356 A1 - sequence listing, part 104

SEQ ID NO: 199774 - DNA, 4485 bp, Zea Mays
aaaacgctaaaccaaaaagtcccatcatcccccgaccctttcgccgcgcccgtgcacaaacccgcgccgtcgaagctggccccttgcctcggagtcttgaacgcaaactcggaggatcgcctcgctactctgcgccgtcaccgcccacctcctcgttcttcaatctgctccctgtttgccgtgcagtggagaccagttatccgatttcccttgtcgttggtcgcagatttctccaagaaatctggggacgctgataggaggccgtacagaacgcagcggcagcaatggtgatgtcggagtcggacgacgacgacgacgagccccagctcaacgcggtggagagctactacttcgttgactccacgaacgacaacgagcctgtctgcttctccactctgcctttcctgttcggggacactgatgatcttcctgactgcaagaaaaggctggtgctgcgcgggactggtggtgacccgggcgtcaaggtgtacagtgaggtggtggcctggagtctggggctcgaggggaagcaaccccagtttgcggtgctcacagcagaaggcagacgttgggttcgtctcgttaggcccttgaacagctacgaggagatgatcaggactgtgctgatcacagcgcatatgctgcattttctcatgaggaagcctcatgagccagagagaacgctgtggaaccacctttgcaaagttttcaacaagtttgacgttagaccctcagaggacgatttcaggaaccacatctcactgatgaagcagtttgtggcaaaagatcctatcttagcaaaatcagagattttgcgagtatttgttgaaggaaaatctggaaaaattttcactgaggctggtgcagaccatattgatgttaagcagccattcataactgatgatgaggacatagatgagatgattgtggaagatgccgataatgaatctgatgaagaggaggatggagatttgtttgattcaatatgtgctatttgtgacgacggaggagacatattatgctgtgatggtccatgtatgcgctctttccatgcaaaagaaggaagtggtgaagactcctattgtgatacccttggctacactgaggcagaagttgaggcaatgaaattatttctgtgcaagaactgtgagtataagcaacaccagtgtttcatctgcggagtgttggagccttcaaatggagcagcagctaaggtttttttatgtaacaatgctacatgtggacacttctaccacccgaaatgtgttgcccagcaacttcatcctaataacattgatgaagcctcagaattggagaagaagataacagatgggttttcatttacatgcccaattcactggtgctttcattgcaaaggtttggaggatagaacacaagggcctttgcaatttgctgtttgcagacgctgtccgaagtcatatcacagaaagtgtttaccaagagaaatttcctttgatgaaattgaagagaagggtgtcatcatacgggcttgggaattatcaaaaatgattttgatatactgcctgaaccatgagatcgatagtgaacttgagacacctgtcagagatcatataaagtttccaaggattgaaaaaccacttcaatttgtaaagaagggagctaacttgttgcctaagaagaaaaagaggacttacagtgagtcaattcttgagcaacctcccaaagatactgtgaaaatgaaaagcaaggttcgcatgcaagaaagcgagcaaaacaaacacgacaccagagaagtttctgtgaagagtttcactcaaaacgttgttgacacacctgtaaagaaaaaaggcaagttgaaagagaataaacagttgccttatgtggccaaggatcattttgtaagcagtccaaaatctgtgaaagagcaagaacaagagttggtacctttgcccttatctggaatcaggaagagttcatttcctaaagtggacagtgaaattgaaaagagggtgattagcatactgggaaatgaaatctcttcgttgacaataaaagatgtaacaaggaactgcagtttgccatcaactcatgtatactctggcagaccaactgacaagatgccactaggaaaaattgagcgttctgttcaggctgtagaagctgctttaaaaaagctgaaaaatggaggtagtgtcaatgatgctaaagcagtatgtgaacctgatgttttaagacagcttgcaaggtggcataccaaactcagagtatatatatcaccttttattcatggcacaaggtatagttcttttggtcgacattttacgaaggtggagaaacttgttgagattgttgatagacttcactggtatgtggaatctggtgacatgcatcacttctgctttgaaaagagggattggatgactgtgcaaccaaatgaactgcctcgtggatcccaactaattatggggcttaatcctccttttggagtaaaagcaagtcttgcgaacaaatttattgacaaagcattgacattcaagcctaagctcattgtactaattgtccctaaagaaacaaaaaggttagataagaagaagataccttatgatttgatttgggaagacagtgagtgtcttgctgggaagtccttctatttgcctggttctgtggatcttaatgataatacagttgaagggtggaatgcatccgcgccacccctctatttgtggagtcatcctcattggacaaagaagcacatgcaagtggctgaagagcatggtcacacttgcatggggaagatagcttcccatgttgaaaagagaaatctgtcagatgatctgcccgtgaggaaacaatctgaggctgcaaacaaatggaactccagatcagggaaagagactacatgcaatgacagaaaggacaatctacttgatgatgttactgctaagaagcaagcaggacctgaagaagaaaaggaaactctagggaagatggaccaccatgtgaaaaaggctactataccagatagccttacagtgaagaaacaaactgaagcttccagcaaagctctctctcattgtggaaatgatagaaagattggcaggtacagcagcaggaaatatgatgactggagaagtaagcggacacctgatcacgaagagagcttcccacctgaaaagcaagtggaagttgcatatgaggagacaaaagttattattccaagcaaaaagattactcataacgaacaaagcggtgcttgccgtgaaaatagaaagaattcttgtgtggaggaaaccaagaacgtggagtacaactatgagcagcagactgcagcagggatgaggttcagagagggagaggattctgacatgagtatctcacccccctcgagaccagttgaaccctttgatatgatagctcaccccattggctctctgacaaaagaaccttttgaccctgtgctcaatagaggggctactcatcaggacagttatgcagtaaccaaagaggaatacctgggtcaatttaagaggaaaaacgaccgtacctttactgacattgatgatagctcaaggatgaggggctccagcatcgaagaagtgaccaggccctatattgctgctccaaccagtgatccctacagcttgcggtatagaggagatggcagcttctacaggcatccgagctcagaggatttaaacactacaggcatcagtgcaggatatggacaaattggtggtgacagttacccacaagcaacaggctcgcaaacacataatactagaatgcatggtggaacaagtgatgataattacctgtcggcgagatactcccttggatattcaggttctcgctttagccaaccagcttcaactgttcccgcttttgggctctcaggtgcaagttcacaacgaggctcagtaatagacaagtattcctatgggctctcgggtcccactggaccacaggattctggtattaacagatatgctccaccggacgacggaacgagcacaagatccaagagctccttggctgaacaacagtacccgttcggacaatctggctcttccggtggcgagtggcctcatatctgatcgctggaacttgttgtcgaagtttttttttcaaggcaaaaactgtgggaagttctccacggtacttcattttcatttttagaggggattacatgttatcaaaatcatgcagcttttgacctgacctgggtgtaaattggagtaaaaccacaagcatctatccatgcggggctggtgttaaaaagcaaagttgtttcttataaaactgtctacagcagtctatccatgatttacccaaaattactgttttgtactgtagactgcattgtttgcataatgaagtttgaatatagatgaggatgggtaagagatagactaaggtagtttcatcatacatataagagttgtaatgacatataagtttgaatatagatgaggatggctatccgaggacatgccctttgcacag

SEQ ID NO: 199775 - DNA, 4596 bp, Zea Mays
aaaacgctaaaccaaaaagtcccatcatcccccgaccctttcgccgcgcccgtgcacaaacccgcgccgtcgaagctggccccttgcctcggagtcttgaacgcaaactcggaggatcgcctcgctactctgcgccgtcaccgcccacctcctcgttcttcaatctgctccctgtttgccgtgcagtggagaccagttatccgatttcccttgtcgttggtcgcagatttctccaagaaatctggggacgctgataggaggccgtacagaacgcagcggcagcaatggtgatgtcggagtcggacgacgacgacgacgagccccagctcaacgcggtggagagctactacttcgttgactccacgaacgacaacgagcctgtctgcttctccactctgcctttcctgttcggggacactgatgatcttcctgactgcaagaaaaggctggtgctgcgcgggactggtggtgacccgggcgtcaaggtgtacagtgaggtggtggcctggagtctggggctcgaggggaagcaaccccagtttgcggtgctcacagcagaaggcagacgttgggttcgtctcgttaggcccttgaacagctacgaggagatgatcaggactgtgctgatcacagcgcatatgctgcattttctcatgaggaagcctcatgagccagagagaacgctgtggaaccacctttgcaaagttttcaacaagtttgacgttagaccctcagaggacgatttcaggaaccacatctcactgatgaagcagtttgtggcaaaagatcctatcttagcaaaatcagagattttgcgagtatttgttgaaggaaaatctggaaaaattttcactgaggctggtgcagaccatattgatgttaagcagccattcataactgatgatgaggacatagatgagatgattgtggaagatgccgataatgaatctgatgaagaggaggatggagatttgtttgattcaatatgtgctatttgtgacgacggaggagacatattatgctgtgatggtccatgtatgcgctctttccatgcaaaagaaggaagtggtgaagactcctattgtgatacccttggctacactgaggcagaagttgaggcaatgaaattatttctgtgcaagaactgtgagtataagcaacaccagtgtttcatctgcggagtgttggagccttcaaatggagcagcagctaaggtttttttatgtaacaatgctacatgtggacacttctaccacccgaaatgtgttgcccagcaacttcatcctaataacattgatgaagcctcagaattggagaagaagataacagatgggttttcatttacatgcccaattcactggtgctttcattgcaaaggtttggaggatagaacacaagggcctttgcaatttgctgtttgcagacgctgtccgaagtcatatcacagaaagtgtttaccaagagaaatttcctttgatgaaattgaagagaagggtgtcatcatacgggcttgggaattatcaaaaatgattttgatatactgcctgaaccatgagatcgatagtgaacttgagacacctgtcagagatcatataaagtttccaaggattgaaaaaccacttcaatttgtaaagaagggagctaacttgttgcctaagaagaaaaagaggacttacagtgagtcaattcttgagcaacctcccaaagatactgtgaaaatgaaaagcaaggttcgcatgcaagaaagcgagcaaaacaaacacgacaccagagaagtttctgtgaagagtttcactcaaaacgttgttgacacacctgtaaagaaaaaaggcaagttgaaagagaataaacagttgccttatgtggccaaggatcattttgtaagcagtccaaaatctgtgaaagagcaagaacaagagttggtacctttgcccttatctggaatcaggaagagttcatttcctaaagtggacagtgaaattgaaaagagggtgattagcatactgggaaatgaaatctcttcgttgacaataaaagatgtaacaaggaactgcagtttgccatcaactcatgtatactctggcagaccaactgacaagatgccactaggaaaaattgagcgttctgttcaggctgtagaagctgctttaaaaaagctgaaaaatggaggtagtgtcaatgatgctaaagcagtatgtgaacctgatgttttaagacagcttgcaaggtggcataccaaactcagagtatatatatcaccttttattcatggcacaaggtatagttcttttggtcgacattttacgaaggtggagaaacttgttgagattgttgatagacttcactggtatgtggaatctggtgacatgattgtagatttctgctgtgggtcaaatgattttagccggcttatgaaagaaaaactcgacaaagttcagaaaaagtgccatttcaagaattatgatcttatccaaccacagcatcacttctgctttgaaaagagggattggatgactgtgcaaccaaatgaactgcctcgtggatcccaactaattatggggcttaatcctccttttggagtaaaagcaagtcttgcgaacaaatttattgacaaagcattgacattcaagcctaagctcattgtactaattgtccctaaagaaacaaaaaggttagataagaagaagataccttatgatttgatttgggaagacagtgagtgtcttgctgggaagtccttctatttgcctggttctgtggatcttaatgataatacagttgaagggtggaatgcatccgcgccacccctctatttgtggagtcatcctcattggacaaagaagcacatgcaagtggctgaagagcatggtcacacttgcatggggaagatagcttcccatgttgaaaagagaaatctgtcagatgatctgcccgtgaggaaacaatctgaggctgcaaacaaatggaactccagatcagggaaagagactacatgcaatgacagaaaggacaatctacttgatgatgttactgctaagaagcaagcaggacctgaagaagaaaaggaaactctagggaagatggaccaccatgtgaaaaaggctactataccagatagccttacagtgaagaaacaaactgaagcttccagcaaagctctctctcattgtggaaatgatagaaagattggcaggtacagcagcaggaaatatgatgactggagaagtaagcggacacctgatcacgaagagagcttcccacctgaaaagcaagtggaagttgcatatgaggagacaaaagttattattccaagcaaaaagattactcataacgaacaaagcggtgcttgccgtgaaaatagaaagaattcttgtgtggaggaaaccaagaacgtggagtacaactatgagcagcagactgcagcagggatgaggttcagagagggagaggattctgacatgagtatctcacccccctcgagaccagttgaaccctttgatatgatagctcaccccattggctctctgacaaaagaaccttttgaccctgtgctcaatagaggggctactcatcaggacagttatgcagtaaccaaagaggaatacctgggtcaatttaagaggaaaaacgaccgtacctttactgacattgatgatagctcaaggatgaggggctccagcatcgaagaagtgaccaggccctatattgctgctccaaccagtgatccctacagcttgcggtatagaggagatggcagcttctacaggcatccgagctcagaggatttaaacactacaggcatcagtgcaggatatggacaaattggtggtgacagttacccacaagcaacaggctcgcaaacacataatactagaatgcatggtggaacaagtgatgataattacctgtcggcgagatactcccttggatattcaggttctcgctttagccaaccagcttcaactgttcccgcttttgggctctcaggtgcaagttcacaacgaggctcagtaatagacaagtattcctatgggctctcgggtcccactggaccacaggattctggtattaacagatatgctccaccggacgacggaacgagcacaagatccaagagctccttggctgaacaacagtacccgttcggacaatctggctcttccggtggcgagtggcctcatatctgatcgctggaacttgttgtcgaagtttttttttcaaggcaaaaactgtgggaagttctccacggtacttcattttcatttttagaggggattacatgttatcaaaatcatgcagcttttgacctgacctgggtgtaaattggagtaaaaccacaagcatctatccatgcggggctggtgttaaaaagcaaagttgtttcttataaaactgtctacagcagtctatccatgatttacccaaaattactgttttgtactgtagactgcattgtttgcataatgaagtttgaatatagatgaggatgggtaagagatagactaaggtagtttcatcatacatataagagttgtaatgacatataagtttgaatatagatgaggatggctatccgaggacatgccctttgcacag

SEQ ID NO: 199776 - DNA, 2629 bp, Zea Mays
aaaacgctaaaccaaaaagtcccatcatcccccgaccctttcgccgcgcccgtgcacaaacccgcgccgtcgaagctggccccttgcctcggagtcttgaacgcaaactcggaggatcgcctcgctactctgcgccgtcaccgcccacctcctcgttcttcaatctgctccctgtttgccgtgcagtggagaccagttatccgatttcccttgtcgttggtcgcagatttctccaagaaatctggggacgctgataggaggccgtacagaacgcagcggcagcaatggtgatgtcggagtcggacgacgacgacgacgagccccagctcaacgcggtggagagctactacttcgttgactccacgaacgacaacgagcctgtctgcttctccactctgcctttcctgttcggggacactgatgatcttcctgactgcaagaaaaggctggtgctgcgcgggactggtggtgacccgggcgtcaaggtgtacagtgaggtggtggcctggagtctggggctcgaggggaagcaaccccagtttgcggtgctcacagcagaaggcagacgttgggttcgtctcgttaggcccttgaacagctacgaggagatgatcaggactgtgctgatcacagcgcatatgctgcattttctcatgaggaagcctcatgagccagagagaacgctgtggaaccacctttgcaaagttttcaacaagtttgacgttagaccctcagaggacgatttcaggaaccacatctcactgatgaagcagtttgtggcaaaagatcctatcttagcaaaatcagaggggagtctcccccatgagtggggtctgacgaagggaaaaactaaagctcagttcttgcttagctacgttatgcctagagctgtgttatgtaaagttgtaaacattgtccttaagacgattttgcgagtatttgttgaaggaaaatctggaaaaattttcactgaggctggtgcagaccatattgatgttaagcagccattcataactgatgatgaggacatagatgagatgattgtggaagatgccgataatgaatctgatgaagaggaggatggagatttgtttgattcaatatgtgctatttgtgacgacggaggagacatattatgctgtgatggtccatgtatgcgctctttccatgcaaaagaaggaagtggtgaagactcctattgtgatacccttggctacactgaggcagaagttgaggcaatgaaattatttctgtgcaagaactgtgagtataagcaacaccagtgtttcatctgcggagtgttggagccttcaaatggagcagcagctaaggtttttttatgtaacaatgctacatgtggacacttctaccacccgaaatgtgttgcccagcaacttcatcctaataacattgatgaagcctcagaattggagaagaagataacagatgggttttcatttacatgcccaattcactggtgctttcattgcaaaggtttggaggatagaacacaagggcctttgcaatttgctgtttgcagacgctgtccgaagtcatatcacagaaagtgtttaccaagagaaatttcctttgatgaaattgaagagaagggtgtcatcatacgggcttgggaattatcaaaaatgattttgatatactgcctgaaccatgagatcgatagtgaacttgagacacctgtcagagatcatataaagtttccaaggattgaaaaaccacttcaatttgtaaagaagggagctaacttgttgcctaagaagaaaaagaggacttacagtgagtcaattcttgagcaacctcccaaagatactgtgaaaatgaaaagcaaggttcgcatgcaagaaagcgagcaaaacaaacacgacaccagagaagtttctgtgaagagtttcactcaaaacgttgttgacacacctgtaaagaaaaaaggcaagttgaaagagaataaacagttgccttatgtggccaaggatcattttgtaagcagtccaaaatctgtgaaagagcaagaacaagagttggtacctttgcccttatctggaatcaggaagagttcatttcctaaagtggacagtgaaattgaaaagagggtgattagcatactgggaaatgaaatctcttcgttgacaataaaagatgtaacaaggaactgcagtttgccatcaactcatgtatactctggcagaccaactgacaagatgccactaggaaaaattgagcgttctgttcaggctgtagaagctgctttaaaaaagctgaaaaatggaggtagtgtcaatgatgctaaagcagtatgtgaacctgatgttttaagacagcttgcaaggtggcataccaaactcagagtatatatatcaccttttattcatggcacaaggtatagttcttttggtcgacattttacgaaggtggagaaacttgttgagattgttgatagacttcactggtatgtggaatctggtgacatgatggcactagggttggtattctgctaacctggagaagcaatgtttgtaaactcttgacctcaagttttgatgctttctcgatctcggctcaatttgatcttgaagaaagctccccctggtggttcacaggggtgtacggccgc

SEQ ID NO: 199777 - DNA, 1920 bp, Zea Mays
gccattcctacctgttgccacatctagtggttcggcctttccatctgccgttcgcccagcgtgttctccctctagtgcggcaactgggcgaccgccgccgccgctctactccgggtgcccaggcgttcgtccgtaccttctcaggccttcatcgcgtccttcgccggcgacgatcaccgacaaggtacagatggaaagaacaattaattccttgatgtacaaaggatctattcctgatgcaattaatcaatcaagaagggagaagaagctctttgtagtctacatatcaggtgaagatgaggcttccagtagtttggaacagtcatcactgattgatgaaaacgtggttgaagtgatcggtagatgttgcatcttattgcatctcaagcaaggcaatgttgatgcatcacagttttcagctatctatccccagaagtctgtaccaagtatatcagtgattggactgaatggagttctgctgtggaatcatgatggatatatcaactctgaaaatctgaaagaaagcattgagaaagcgtgggctgctcttcatctacaggagacagcagcgaccttgttgacagcatcacttgctacaagaaattctgaacctgtgaattctgctactactgttttgccagctcaagggggctcttctactttagaaaatccttctgatttatccagtcaatcaccagatgtttctggtgccagtgaagttgctcattcaactgatctggtatcacaaattcctaatagcactgccctttatgaacctcttgagataaatgaaaaagaagggtcaaaatcaaactcggatgataaaactgttgagaagctaggttcaacaagtactgaatttgattgtgatttgcttgatagttcaaggaagtcaaatacggtcagttctgcagattcgaagggagaagacattacaccatcagcaaaaagaaagaacaaagatgatggaagtcacacttctattcccttggaggatactcctagtacactcactaataaaggagtttcttcccagtcacgcgtggaacaagacaaggcaacttcttttgtttctgtgaagtcagatgatattcagcttagtattcgtatgcccagtggaaatagactggagatcaaactaacaaaacaagatgttttaaggaaagtgaagaatttcgtggatgaaaaccaaggcaatgggcttggctcatatgacctttctctggtttatcctaaaagagttttctttgaacaaggtgcggatgatgttggtggcaattcaggtgcggggggatactttggttacctgagaaccgtcctgtcttatgtgaatccactctcctacctgaggggaaataccaactcatcaaatacagagctacagtcaaatgaaggcctgcggcagcttagacatggatctggtccatggagtgagccacggcctcttggcaataggggccatgaagtgactgatgcagactctgcaaacacgctgcgaaggcggcctagaccatttggtgccaatatccacactctggggagcgaggatcatggtccgtctgatgaaagaaatgttttctggaacgggaactcgacagagtttggaggcgacgacagaaaataggttgtggcgtggctggcagggcctgggacgacactatcagacagaatcaaagttgcgaatagacagctgaaacaaatgcctcgacaggcttattgaggaataagtattgagattatagtgctgaaataatcgctgaattgtgatgtttacatttgtggaaacatacggtcgctggatccgtatactcgttgtatagtacatagccacagatatattaaatccgaactgcttggttctactgtctgatcgaacgacatttgttttggcgttggctacgaagaaaatttgccgctacc

SEQ ID NO: 199778 - DNA, 1977 bp, Zea Mays
gccattcctacctgttgccacatctagtggttcggcctttccatctgccgttcgcccagcgtgttctccctctagtgcggcaactgggcgaccgccgccgccgctctactccgggtgcccaggcgttcgtccgtaccttctcaggccttcatcgcgtccttcgccggcgacgatcaccgacaaggtacagatggaaagaacaattaattccttgatgtacaaaggatctattcctgatgcaattaatcaatcaagaagggagaagaagctctttgtagtctacatatcaggtgaagatgaggcttccagtagtttggaacagtcatcactgattgatgaaaacgtggttgaagtgatcggtagatgttgcatcttattgcatctcaagcaaggcaatgttgatgcatcacagttttcagctatctatccccagaagtctgtaccaagtatatcagtgattggactgaatggagttctgctgtggaatcatgatggatatatcaactctgaaaatctgaaagaaagcattgagaaagcgtgggctgctcttcatctacaggagacagcagcgaccttgttgacagcatcacttgctacaagaaattctgaacctgtgaattctgctactactgttttgccagctcaagggggctcttctactttagaaaatccttctgatttatccagtcaatcaccagatgtttctggtgccagtgaagttgctcattcaactgatctggtatcacaaattcctaatagcactgccctttatgaacctcttgagataaatgaaaaagaagggtcaaaatcaaactcggatgataaaactgttgagaagctagattcgaagggagaagacattacaccatcagcaaaaagaaagaacaaagatgatggaagtcacacttctattcccttggaggatactcctagtacactcactaataaaggagtttcttcccagtcacgcgtggaacaagacaaggcaacttcttttgtttctgtgaagtcagatgatattcagcttagtattcgtatgcccagtggaaatagactggagatcaaactaacaaaacaagatgttttaaggaaagtgaagaatttcgtggatgaaaaccaaggcaatgggcttggctcatatgacctttctctggtttatcctaaaagagttttctttgaacaagatatggaagcaacactatccgagctgggtattcaaaaccgtcatgcaatgattgttgttccacatcggcagtctggtcaggtatcaaggcgtcactcctcggcatcttatgatatgggtgtcaattcaggtgcggatgatgttggtggcaattcaggtgcggggggatactttggttacctgagaaccgtcctgtcttatgtgaatccactctcctacctgaggggaaataccaactcatcaaatacagagctacagtcaaatgaaggcctgcggcagcttagacatggatctggtccatggagtgagccacggcctcttggcaataggggccatgaagtgactgatgcagactctgcaaacacgctgcgaaggcggcctagaccatttggtgccaatatccacactctggggagcgaggatcatggtccgtctgatgaaagaaatgttttctggaacgggaactcgacagagtttggaggcgacgacagaaaataggttgtggcgtggctggcagggcctgggacgacactatcagacagaatcaaagttgcgaatagacagctgaaacaaatgcctcgacaggcttattgaggaataagtattgagattatagtgctgaaataatcgctgaattgtgatgtttacatttgtggaaacatacggtcgctggatccgtatactcgttgtatagtacatagccacagatatattaaatccgaactgcttggttctactgtctgatcgaacgacatttgttttggcgttggctacgaagaaaatttgccgctacc

SEQ ID NO: 199779 - DNA, 392 bp, Zea Mays
acacgagctcacgcagtgaaagcaaggcagcatgcatgtcgtcgttgaccacaaaagtgtttggagtgccccagccagggtggtacagggtttattacatcattaataatattcaagagttagtaaccgctctgacccaagagcatccggtggtgctgatgttctgggcggactggaaccagccaagcaaggccacgtactgggatctggccatcgctaaaaaggatgaggccgtattctgccagctggactttgataagtttaaagatgtcgtagagaagttcagagtgaaggctctgccgacgttcctcctgatcaaggagggcgaggagcagcgcagggtcgtcggtgccaagcacctttgctctccaccgagcggagcgagaaaaggc

SEQ ID NO: 199780 - DNA, 4020 bp, Zea Mays
gtagcagtccacaagcgcgcgcagattccagcacgcgcgcgccagcaagctccaccaccaccagtccaccgccaccatggacgcgacggctagcagagccggcggcggcgacctgaacggcaaagaaaatgaggaggacaagaagggcgcagcgccggccaagaaggtgtcgctgctcggcatgttcaggtacgccgaccgcctggacctgctgctcatagcggtgggcacggtgggggccctgaccaacggcgtggcggaccccctcatgaccgtcctcttcggcaacgccatcgactccttcggcgacagcacctcgcaggacatcgtccgcagcgtgagaaaggtcgttatgaatttcgtatacttgggcatcggaacggctgttgtctcatttcttcaggtgtcgtgttggacgacggcaggagaacggcagtcggctcgtatccgttctttgtaccttaacgcggtcttgaggcaagacattgcctacttcgacacagagttgacaacaggccaagcggtttccaggatgtccagcgataccctcgtgattcaggatgctcttggcgagaaggcgggaaagcttatacagctctcgtcgacctttttcagtggttttataatagcgttcacaagaggctggctcctcaccctcgtcatgctaacatcgctaccgctaatcgcagtcgccggcatagtttcttctcacttcctaacaaacatttctagcaagaagctggcatcttacggagatgctggggacaccgttgaacagaccatcggagctataagaacggtagtttcctttaacggagagaacaaggccattgcagcgtacaagagcttgataaagaaggcctacaggactgacgttttggaaggcctgatcaacggtttcggcatgggatctgtcttctgcatcctgttctctagctatggcctagcgttctggtacggcgggaagctagtcgttgacaaaggatacactggtgggaagatcatcacggttctgttcgctgtgttgactggtgcaatgtctttaggcggcgcaacgccctccgtgtcttcaatcgctcagggtcaatctgcggcgtacagactgttcgaaacgattgggaggaagccggagatagattcgggtgacaccagcggtgtggttttagaagacatcaagggtgacgttgagctgaaagacgttcgctttcgctaccctgcgaggccggagcagctgatactagacgggttgacgttgcgagtaggcagtgggacaacaatggccatggtcggagagagtgggagtggcaagtcgaccgtcatcagccttgttgagcggttctacgatccacatggtggtgaggttctgatagatggcgtcaacatcaagaacctaaggcttagttggatcagagagaagatcagcctggtcagtcaggaaccactgctcttcatgacctccattaaagacaacataatgtatggtaagggagacgcgacagtagaagaggtcaggagggcagccgagcttgcaaacgcagcgaacttcatcgacaagttgccggatggctatgatactatggttgggcagcgtggcacgcagctctctggaggacagaagcaaaggatcgcgattgcaagagccatccttaaagaccccaagatactcctgctcgacgaagcgacgagcgcgttggacgtggagtctgagcgggtagttcaggaggcgctgaacaggataatggtggaaaggaccacgcttgtcgttgcccatcgcctgagcaccgtaaggaacgttgactgcatcacagtactccgtcaagggaaaatagttgaacaaggccctcacgacgtattggtgaaggatcccaacggggcatactctcagctcatcaggctacaagaaacgcgtgctgacgaaaggcgcaagacagcagactctgggtctggggtcccagatcactccagatcaaagagcaccagcctgtcgcagtcgctcgccaggcggtcactactgaacaaagactccttcggtagcagcagcagcaacagatactccttcaagaaccccctaggattagcggtcgatttacacgaggacaggagtaccataggcggggagaaaacggaggagctctccgacgttgtggtggtaccaaagaaagcacccatcggacggctcttgaagctcagcgtgccagaagcgccggtccttctgctaggctccgtggcagcgtcggtgcatggcgtcgtcttcccgctgtttggtttgctcatgtcgggcatcataaaatcgtttttcgagccgccggataagctgcgagaggacagcagcttctgggcgctgatagccgtcgctctgggcgtcacgtgcttggtcgtggtcccagcgcagtacttcctgttcgcggtcgccgggggcaagctgatcgagcgcatccgtgccctgtcgttccagagcatcgtgcgccaggagatctcttggttcgacaacgcctccaattccagtggagcgcttggtacgaggctctcggtcgacgcgctaaacgtccggcgcctagcaggagacaacctggcccttataatgcagtccatagctacactgggttacgcccaggtgaagttcttgaagggattcagcgaagatgctaaggagatgtacgaggatgcaagccaagtggcgactgatgctgtcggcagtatcagaaccgtggcgtcgttctgcgcagagaaaagagtggtcgcagcgtacagcgacaagtgtgaggctctgaggaagcagggcatccgaagcggagtcgtcggagggcttggttacggcttctcgttcttgatgttgttcttcacgtatggcctttgcttctacgtcggtgcgcagtttgtgcgccaggggaaaactacctttccagatgttttcaaggttttcttcgcgttagttctggcagctattggagtctcgcaagcgagtgcgctggcttctgatgcgaccaaagcaagggactctgctatttccatcttcagcgttctggacagggagtccaaaattgactcgagcagcggcgacgggatgacgctggaggttgtcagtggcaacatcgatttcagcaacgtcagcttcaagtacccactgcgtcctgacgtccagatattcagcgacttcaccttgcgcattccatctggaaagacagtggcgcttgtcggagagagtggcagcggcaagtcgacgataatcgctttgctggagcgtttctacgacccagattccggtagaatatccctggacggcgttgagatcaagagcctaagagtgagctggctaagggaccagatggggctggtagggcaggagccggtgctgttcaacgacacgatccgcgccaacataacgtacgggaagcacggcggcgccacagaggaagaggtggtggcggtagccaaggcggccaacgcgcacgagttcatatcgggcctgccccaagggtacgacaccatggtgggcgagaaagggatccagctgtccggcgggcagaaacagcgggtggcgatcgccagggccatagtgaaggacccgaggatactgctcctcgacgaggcgaccagcgccctcgacgccgagtcggagcgcgtcgtccaggacgcgctggaccgcgtcatggtcagccggaccaccctcgtggtggcgcaccgcctctccacgatcaagggggccgacgtgattgctgtgctcagggaaggcaagattgtggagagaggaaggcatgaagccctcatgcgcatcagcggcggagcctatgcttcccttgttgagctccgctccaagactgaatagcactggtgtatctttatagagtacagtttgtgcatttatttatacaagtatactgtttttccgcaacccaattgttcgtaacttttacaagttgaaatgaaaattacgcggtaggtgaagggaccgtattcaaatgcgtcacgaataaaccataaaaatataaaatcgattttatatgagggggctgttaattt

SEQ ID NO: 199781 - DNA, 592 bp, Zea Mays
atgtttttggtctaaaaatggggacaagatagctcactctttaaggccttagtctagctcctgcgcaagctccacattcttggaacggttccaaagataccctatacgctatatatttgcagttatattgcatactgttcgggattcgatgagtacatgaacttggtcctcgaagacgctgaggaaatcaacgtcaagaaaaacactaggaaatcacttggccggatactcctcaaaggtgacaatataactttgatgatgaacagtggcaagtgaagattcttatggcaggaacgatgtttggtgctcgcttcgattatctgtgacacaatgtactccatccatccgtccagacttaaatgatgtatcatgtcattgtggtttagtgagagttgtataactacctgaggaaactcacgtgttactatatgctaagatgctgtgacggtgagctattcagtgctcacttgtgttccaaagattagcccgacttgtgtgtgccatgctgacatcttttctggtttcatactcagctttacgtaaagctttgctctgctcacgcttgccttttggaagctgggattgaaaatca

SEQ ID NO: 199782 - DNA, 461 bp, Zea Mays
agtgacaaaaggattcgatgagtacatgaacttggtcctcgaagacgctgaggaaatcaacgtcaagaaaaacactaggaaatcacttggccggatactcctcaaaggtgacaatataactttgatgatgaacagtggcaagtgaagattcttatggcaggaacgatgtttggtgctcgcttcgattatctgtgacacaatgtactccatccatccgtccagacttaaatgatgtatcatgtcattgtggtttagtgagagttgtataactacctgaggaaactcacgtgttactatatgctaagatgctgtgacggtgagctattcagtgctcacttgtgttccaaagattagcccgacttgtgtgtgccatgctgacatcttttctggtttcatactcagctttacgtaaagctttgctctgctcacgcttgccttttggaagctgggattgaaaatca

SEQ ID NO: 199783 - DNA, 1091 bp, Zea Mays
gaaaacacagggattggagatgagctcctcatctgaagttattactctcacaacaatgattacttggaaatctgccgttgttacaaggctatttatgatattccagcaataaaagaggatccaacaaagtggataccgattcttaggaagatctgttggtacttggtgctagcacctcatgatcctatgcaatcaagccttctcaatgctacactagaggataaaaacctttcagaaatcccaaatttcaggttattactgaagcagctggtcaccatggaggtgatacagtggacaagtctgtgggaattcttcaaggaggaatatgagaaggagaaggatcttcttgggggagctttgggtgccaaagcttcagaagatttgaggctgaggattatcgaacataatatcttggttgtatccaagtactatgcaagggttaccctcgagaggcttgctgatcttctttgcctgactttgcaggaggcagagaagcatctctcagacatggttaactcgaaatctctagtggcaaagatcgacaggccgatgggagttgtcagcttccggacgacccaagacagcaatggcacactgaactcatgggccacgagccttgagaagcttctggacctcgttgagaagagctgccacgagatacataaagagaccatgatccacaagacggcgttaaaagtttaactcttttggtttaggttttgaaacccgtgctgttcatgagttaccgtaacaggagggggggttttttgttgttgttgggcacggccagtgtccccgcaaatttgctttgactcgctgaatatttttcggattcctagatctgcaatcagatacctagtcctgaaaaaaaaaagtagatgcacctttttttttattaaaattcagttctccaggcttcagtctcggaaaagtagacaccttgtttgggcgagccactttgtaacgggcacaatcagaaatgcgttcccgttttcagcctggcccagaaacggttttccagacgttttttaaatttttttgtttaaaattttaaaaatctgaaaacgtttataaaaaactgaaaagaaaaa

SEQ ID NO: 199784 - DNA, 1906 bp, Zea Mays
cacatgcggacctgccattagtgtgtaccactaggttcaaaatatagggcagtgccatcaagtttcttggaacaaagcgccaccatgacaagtggttggttgccacggaaaattatgatatcaagggttgttttgcaatgacagaactaggccatggaagcaatgtgcgaggaatagaaacaatagcaacttatgattcagaaacaagagagttcatcataaatactccatgtgaatcagctcagaagtactggattggtggagctgccaatcatgcaacacatacaatagtcttttgtcaacttcatataaatgggagaaatgaaggagttcatgcttttgtagctcaaattagggatgaagatggaactgtgttgcctaatatccatatagctgactgtggccataagattggactgaatggcgttgataatgggcggatttggtttcagaatatacgtgttcctcgtgagaacttgcttaatttggttgctgatgttttgccagatgggcgatatgttagcatgatagataatccagatcagaggtttgcagctttcctatctccgcttacacttggtcgagtaaacattgcagttaactcagtctacatttcaaaggtcagcctagcaattgctgtgagatacagtttgtcaaggagagccttttcaattgcaccagatgcccctgaaatgttgttgcttgactatcccagtcaccagcgacgccttctaccacttctagcaaaagtatgtctgatgagcagtgctggcaattttatgaaaaatatgtatgtaaagagaactcctgaaatgagcaaagacatacacatttactctagtgctctgaaggcgacactaacttggcagaatatgattacgattcaggagtgtcgcgaggcctgtggaggtcaaggtctaaagactgagaaccgcataggaattttcaaatctgaatttgatgtccagtccacatttgagggtgataacaatgtgctaatgcagcaggtaagcaaagcgctttatgctgaatttttgggtgcacaaaagaagcagcagccattcaagggattgggtttggaacacttaaatggctcgagccctgttattcctgataagctgacaagtagcatattaaggagctccaagttccagatggacctgttctgcttaagggagagagatttactgaagcagtttgtagaggaggtttctctccatcttgcacaaggcgaaagcagagaaaaggctttgatgctgagttatcaagttgctgaagacttggctagagcgtttactgagcgtacgatcctccaaatatttttggaggatgagatgaatgttccttctggttccctaaaggaggtactgggcttgctgagatctctatatgtcatggtgaacatagatgaatccacatcttttctaagatacgggcatttatcacgtgacaatgtagcccttgtgcggaaagaagtcctgaaactgtgcagtgaactcaggccccatgcgcttgctgttgttagttctttcggaatccctgatgccttccttagtccacttgcttttgactggattgaggcaaatgcactgtcaaccgggagccactgatctcaggtttccacatacgagccaggttatcctgtgaaagtactgaatattgatggcggggcatagataccgtataactacaggagcacttgttgtctcggaacaaattgttgtgaatcctgttttgtataatagttttcttgaatataagcgaacgtagcctaacaggccaaagtccatgtaatggggtttacaacagtaataacttgcagagtgatgtaagcgagttgttgagcagtaaataaaatactcttgtcccaaaatatagttctttttaacccattttttcctgtcca

SEQ ID NO: 199785 - DNA, 2600 bp, Zea Mays
aaaaaaactgttctcccctatcctcaaagaaacgtgtgccgagatgcaacctcacgctgactcggcgcatatactctgtatcattggcgcgatttctcggtttcttctgacacccgacttggattgtctcgttcgtcttcgtcatcgtcactcaacaactcgtctcatcgcgccgcatcgtttacctcaaggttgttttgttgcttccttgtcccgctctcaccagcaatcccgtcgatcacccagacctccacggcactgctccgtctcctccgttccgttccgaaccgcaagctcccaacccttccgcgatggacctcacctcgccgtcgcccgcggcgcgccgcgccgccgccatcgcgcgccacctcgccgcggccgccgcccccatcccggcgagcagccccctggaaccttcctgctgcctcagctacgtcccgccggagtccacggagcggccggcggcgtttgcgccggccgacctcaggcttctgctggacgggcacgacctgcccacgcgggactggctcttccgcgccatggaggagagcccccttttccgcagccggagttcgcggacgggatccagggtgttcgtggcgccggacttcaacgacggcaaggaagggcagcgggaggccaccatgcggcggatcgcgtacctgaatcggcgcggcgtgttccgcgggtggctcaccgaggacggcgctgccgccgagctccgcaaactagcgctcctcgactgcatcgccatctatgaccactctctcgccatcaagattggcgtccacttcttcctctggggcagtgccatcaagtttcttggaacaaagcgccaccatgacaagtggttggttgccacggaaaattatgatatcaagggttgttttgcaatgacagaactaggccatggaagcaatgtgcgaggaatagaaacaatagcaacttatgattcagaaacaagagagttcatcataaatactccatgtgaatcagctcagaagtactggattggtggagctgccaatcatgcaacacatacaatagtcttttgtcaacttcatataaatgggagaaatgaaggagttcatgcttttgtagctcaaattagggatgaagatggaactgtgttgcctaatatccatatagctgactgtggccataagattggactgaatggcgttgataatgggcggatttgatgggcgatatgttagcatgatagataatccagatcagaggtttgcagctttcctatctccgcttacacttggtcgagtaaacattgcagttaactcagtctacatttcaaaggtcagcctagcaattgctgtgagatacagtttgtcaaggagagccttttcaattgcaccagatgcccctgaaatgttgttgcttgactatcccagtcaccagcgacgccttctaccacttctagcaaaagtatgtctgatgagcagtgctggcaattttatgaaaaatatgtatgtaaagagaactcctgaaatgagcaaagacatacacatttactctagtgctctgaaggcgacactaacttggcagaatatgattacgattcaggagtgtcgcgaggcctgtggaggtcaaggtctaaagactgagaaccgcataggaattttcaaatctgaatttgatgtccagtccacatttgagggtgataacaatgtgctaatgcagcaggtaagcaaagcgctttatgctgaatttttgggtgcacaaaagaagcagcagccattcaagggattgggtttggaacacttaaatggctcgagccctgttattcctgataagctgacaagtagcatattaaggagctccaagttccagatggacctgttctgcttaagggagagagatttactgaagcagtttgtagaggaggtttctctccatcttgcacaaggcgaaagcagagaaaaggctttgatgctgagttatcaagttgctgaagacttggctagagcgtttactgagcgtacgatcctccaaatatttttggaggatgagatgaatgttccttctggttccctaaaggaggtactgggcttgctgagatctctatatgtcatggtgaacatagatgaatccacatcttttctaagatacgggcatttatcacgtgacaatgtagcccttgtgcggaaagaagtcctgaaactgtgcagtgaactcaggccccatgcgcttgctgttgttagttctttcggaatccctgatgccttccttagtccacttgcttttgactggattgaggcaaatgcactgtcaaccgggagccactgatctcaggtttccacatacgagccaggttatcctgtgaaagtactgaatattgatggcggggcatagataccgtataactacaggagcacttgttgtctcggaacaaattgttgtgaatcctgttttgtataatagttttcttgaatataagcgaacgtagcctaacaggccaaagtccatgtaatggggtttacaacagtaataacttgcagagtgatgtaagcgagttgttgagcagtaaataaaatactcttgtcccaaaatatagttctttttaacccattttttcctgtcca

SEQ ID NO: 199786 - DNA, 2670 bp, Zea Mays
atcacctcaagaggagtggagaaaacccatgaacgaccaaaggcttcaactgacaagctttgtcaaaccgttcttccataaaaaaaaactgttctcccctatcctcaaagaaacgtgtgccgagatgcaacctcacgctgactcggcgcatatactctgtatcattggcgcgatttctcggtttcttctgacacccgacttggattgtctcgttcgtcttcgtcatcgtcactcaacaactcgtctcatcgcgccgcatcgtttacctcaaggttgttttgttgcttccttgtcccgctctcaccagcaatcccgtcgatcacccagacctccacggcactgctccgtctcctccgttccgttccgaaccgcaagctcccaacccttccgcgatggacctcacctcgccgtcgcccgcggcgcgccgcgccgccgccatcgcgcgccacctcgccgcggccgccgcccccatcccggcgagcagccccctggaaccttcctgctgcctcagctacgtcccgccggagtccacggagcggccggcggcgtttgcgccggccgacctcaggcttctgctggacgggcacgacctgcccacgcgggactggctcttccgcgccatggaggagagcccccttttccgcagccggagttcgcggacgggatccagggtgttcgtggcgccggacttcaacgacggcaaggaagggcagcgggaggccaccatgcggcggatcgcgtacctgaatcggcgcggcgtgttccgcgggtggctcaccgaggacggcgctgccgccgagctccgcaaactagcgctcctcgactgcatcgccatctatgaccactctctcgccatcaagattggcgtccacttcttcctctggggcagtgccatcaagtttcttggaacaaagcgccaccatgacaagtggttggttgccacggaaaattatgatatcaagggttgttttgcaatgacagaactaggccatggaagcaatgtgcgaggaatagaaacaatagcaacttatgattcagaaacaagagagttcatcataaatactccatgtgaatcagctcagaagtactggattggtggagctgccaatctcaaattagggatgaagatggaactgtgttgcctaatatccatatagctgactgtggccataagattggactgaatggcgttgataatgggcggatttggtttcagaatatacgtgttcctcgtgagaacttgcttaatttggttgctgatgttttgccagatgggcgatatgttagcatgatagataatccagatcagaggtttgcagctttcctatctccgcttacacttggtcgagtaaacattgcagttaactcagtctacatttcaaaggtcagcctagcaattgctgtgagatacagtttgtcaaggagagccttttcaattgcaccagatgcccctgaaatgttgttgcttgactatcccagtcaccagcgacgccttctaccacttctagcaaaagtatgtctgatgagcagtgctggcaattttatgaaaaatatgtatgtaaagagaactcctgaaatgagcaaagacatacacatttactctagtgctctgaaggcgacactaacttggcagaatatgattacgattcaggagtgtcgcgaggcctgtggaggtcaaggtctaaagactgagaaccgcataggaattttcaaatctgaatttgatgtccagtccacatttgagggtgataacaatgtgctaatgcagcaggtaagcaaagcgctttatgctgaatttttgggtgcacaaaagaagcagcagccattcaagggattgggtttggaacacttaaatggctcgagccctgttattcctgataagctgacaagtagcatattaaggagctccaagttccagatggacctgttctgcttaagggagagagatttactgaagcagtttgtagaggaggtttctctccatcttgcacaaggcgaaagcagagaaaaggctttgatgctgagttatcaagttgctgaagacttggctagagcgtttactgagcgtacgatcctccaaatatttttggaggatgagatgaatgttccttctggttccctaaaggaggtactgggcttgctgagatctctatatgtcatggtgaacatagatgaatccacatcttttctaagatacgggcatttatcacgtgacaatgtagcccttgtgcggaaagaagtcctgaaactgtgcagtgaactcaggccccatgcgcttgctgttgttagttctttcggaatccctgatgccttccttagtccacttgcttttgactggattgaggcaaatgcactgtcaaccgggagccactgatctcaggtttccacatacgagccaggttatcctgtgaaagtactgaatattgatggcggggcatagataccgtataactacaggagcacttgttgtctcggaacaaattgttgtgaatcctgttttgtataatagttttcttgaatataagcgaacgtagcctaacaggccaaagtccatgtaatggggtttacaacagtaataacttgcagagtgatgtaagcgagttgttgagcagtaaataaaatactcttgtcccaaaatatagttctttttaacccattttttcctgtcca

SEQ ID NO: 199787 - DNA, 2326 bp, Zea Mays
gtcactgtatcgcgcgcgcgggtgggaagacagcgatggctcgtggcgggggcctctcgccccgccgcgggtgatctctcctctagcggggagccttcccgcgttcccaagcggaggatcccgtcgcagctggtgcctcacctatccctctccttcgcatctccgccgtgctctctcgcgcaccccctcgaccctaggtttgctccttccctcccttcctcgccacccgattcgatctcgctccctccggcctccggctaggctgctccgtctctcctccgccatgttctcgcacggcgctgattccgcccacgacgccggggccgtcggcgtcagcagcggcggggctaccgtccccacccgcttcgtctggccctatggtgggaagagggtcttcgtctcaggctccttcaccaggtggtcggaacatttgccgatgtctcctatcgaaggctgccccactgtatttcaggctatttgcagtctgtctcctgggattcacgagtacaaattctttgtggacggggaatggcggcatgatgagcgtcaacctaccatatctggggagtttggcatagttaacacactttacttgacaagggaatataaccaaataaataccttatcaagtccaagcacacctggaagcaggatgaacatggatgtggataatgaaaattttcaacgtacggttacgttgtcagatggtaccgtttcagaaggtactctgagagtttcagaggctgcaatacaaatatctaggtgtcgtgtttctgaatatctgagtttgcatacatgctatgatttactcccagattctggcaaggttattgccctagacattaatttacctgtgaagcaatcattccatattctccatgaacaggggattcctgtagctcctctctgggactcattcagaggtcaatttgttggtctccttagcccattggatttcatactcatattgcgggagaaactcatggctcgaacttgacagaagagcagcttgaaacacacactatatctgcatggaaagaggctaagcggcaaactaatggaagaaatgatggtcagtggcgaccgcaacagcatctagtgcatgccaccccttatgagtccttgagggacattgcagtaaagcttttgcaaaatggcatttctacagtgccagttatttattcatcatcatcagatggatcattcccgcagttattgcatcttgcatcactttctggaattttgaaatgtatttgtagatacttcaaaaactcaactggtaatttgcctattctgaaccaaccagtgtgctccattccgctgggttcctgggttccgaaaattggtgatctgaacagtcgtccattggctatgttgcgacctaatgcatcacttagctctgcccttaacatgttggttcaagctggagtaagctcaataccaattgtggatgacaacgactccctgcttgacacttactctagaagtgacatcacagccctagcaaaagacaaggtctacacacatgttcggctggatgagatgaccattcaccaggctttgcagcttggacaagatgccaatacaccttttggattctttaacggccagagatgccagatgtgcctccggtctgatcctttgctgaaggtgatggagcgactggctaatcctggggtgcggcgggtgttcattgtggaagctgggagcaaacgtgtggagggcatcatatcactaagtgacattttcaagttcttgctgagcttgtgaggagaggagggcatggcggagtttttttaacagtagcaaccctctgggcctttgggtccttgcggataattggctatcgtcagggttcatggtctgtaaagttccttttttttttgtttcgttttttaccatttggcccctcccgcttgtataacctcaattaatataatggcaaccttcatttaatatgaggttacttgagggttacttgaaaaattacaagagatgttctttgcgaatagtctctttatacagagccttatacttgtaatatgcggttttttagctgtcccttgtatttagaaaattaatccgatgtctttggattgtatatgctcttagaacaattttaataatagcccacaacggattttataatgttgccatgtcacatatagttaaataaaagtctactcacataattttatgactaaacaacattttttttttgtcttcggtccgccatttacgttttggtctccatagtacggtaaggcatttttggtcatccgtgagtttttctgatcgattaggcattttaagtcttcggtctgcc

SEQ ID NO: 199788 - DNA, 1758 bp, Zea Mays
cgagagggcgttcgatggcatgacctcgcgacaggaatataatgtacgagctaattctgttatggataagacatactctattggacgatttgtcactggtttacctcctttctcgaaaaagaagaatgccgagaacaagtggtctctccataaggagggtctgcaaggccgtcagatagccgagaatatgcgggaaaaatacaacaagaaaccatggattttggaagacgaaacaggccaatatcagtatcaaggtcaaatggaaggatcacagtcagctacagctacatattatttgttaatgaggcacggcaaggaatttaatgcatatcctgctggctcttggtttaatttcagtaaaattgcacagtacaaacaattgacactggaggaggctgaagaaaagatgaataagaggaagaccagtgcaactggttatgaacgctggatgatgaaagcagcggcaaatggaccagctgcctttggttcagacatgaagaagcttgaggccacaaatggtggggaaaaagaaagtgctcgtcctaagaaaggaaaaaataatgaagagggtaataattctgataagggtgaggaggatgaagaagaggaagcaacacgcaagaatagacttggactaactaaaaagggcatggatgatgatgaggaaggtggaaaagatctagatttcgatttggatgatgaaattgagaaaggtgatgactgggagcatgaagaaacattcactgacgatgatgaggctgtagacattgatccagaggaacgggcagatttagctcctgaaattcctgctccacctgaaatcaagcaggatgatgaagagaacgaagaagaagggggcctgagcaagtctggcaaggaactaaaaaagttgcttgggcgcgctgctggactaaatgagtcagatgcggatgaggatgaagaagacgaagatcaagaagatgattcatcgccagtgcttgctccaaaacagaaggatcaagttaaagatgaacctgtggatagcagcccatctaaaccagcaccatcaggacatgctcgaggcacacctccggcatccaaatccaagcaaaagagaaaatcaggtgttgatgatgcaaaaacttctagtggtgcagcttcaaagaaagcaaaggtggaattggatgcgaaagcatcaggcctcaaagaggaggcatcatctttggcaaaacctgcatcaaagacctctgctgcatcaaaaagtgggacaagcgtatcacctgtcacagaggatgaaatcaggagtgttcttcttgcagtggctccagtcaccacacaagatctggtatccagattcaagtctaggcttcgaggtgcagaggacaagaatgcatttgctgaaattctgaagaaaatttcgaagatacagaagacgaacggccacaactacgttgtcctcagagatgacaagaagtaaataaccgaacaaaggcgctgacatcgcaaccgttggctgtactgagataatatgtttatgtaacatgctgccttgaagataaacaagtctgtaacactagaattgtcttctaacccttgtgtacttgaattttattttactattccagattttatttatgcggctttgcactacacacctgttataaatggaaatccattgggagttcatctcgtgaattttggtagattgacataatttctctcgcttaaaataattattagcttatggggaacccagtgcagttgtgaattttgcgttgt

SEQ ID NO: 199789 - DNA, 1061 bp, Zea Mays
catggatggtaaagttgtgctgcaggtgatgactgggagcatgaagaaacattcactgacgatgatgaggctgtagacattgatccagaggaacgggcagatttagctcctgaaattcctgctccacctgaaatcaagcaggatgatgaagagaacgaagaagaagggggcctgagcaagtctggcaaggaactaaaaaagttgcttgggcgcgctgctggactaaatgagtcagatgcggatgaggatgaagaagacgaagatcaagaagatgattcatcgccagtgcttgctccaaaacagaaggatcaagttaaagatgaacctgtggatagcagcccatctaaaccagcaccatcaggacatgctcgaggcacacctccggcatccaaatccaagcaaaagagaaaatcaggtgttgatgatgcaaaaacttctagtggtgcagcttcaaagaaagcaaaggatgcgaaagcatcaggcctcaaagaggaggcatcatctttggcaaaacctgcatcaaagacctctgctgcatcaaaaagtgggacaagcgtatcacctgtcacagaggatgaaatcaggagtgttcttcttgcagtggctccagtcaccacacaagatctggtatccagattcaagtctaggcttcgaggtgcagaggacaagaatgcatttgctgaaattctgaagaaaatttcgaagatacagaagacgaacggccacaactacgttgtcctcagagatgacaagaagtaaataaccgaacaaaggcgctgacatcgcaaccgttggctgtactgagataatatgtttatgtaacatgctgccttgaagataaacaagtctgtaacactagaattgtcttctaacccttgtgtacttgaattttattttactattccagattttatttatgcggctttgcactacacacctgttataaatggaaatccattgggagttcatctcgtgaattttggtagattgacataatttctctcgcttaaaataattattagcttatggggaacccagtgcagttgtgaattttgcgttgt

SEQ ID NO: 199790 - DNA, 3151 bp, Zea Mays
gttgtttcgctgcctgattccaaaaaaaaaaaaaagttgttttgctgctggcgggacacgcttcgggcgcgacagtcgtcaccccgctttcccctactggatccagccacttgacttcgcttaaaccctgatcctcttcctccctctcctccggtcctcccgcgccgccacccccatctcccaccgcaaaaccttaggtccgacgagcccccgccgttgccgtgggcgccagaagcagccatggcttcgagttcgacgtgtgttcttaagaagaactaccgctgcgaccgctccctgcagcagttttacactggtgggccctttgcggtcgggcttgcccccggcggcgatggcgagggcggcgccgaggctgaggccttcctcgcatgcgcctgcggtggagaggtgcgcgtggtgtcctccgcggacgcctctgccataggggagcccgtcgacggcgactcggaggccatcaccgcgctggcgctgtcccccgactcacggctcctctttgccgcggggcacagcaggcttattagggcctgggacctcgcgtcccgagcttgcatacgcagctggaagggacatgatggtcctatcatggccatggcatgccatgtttctggtggtttgcttgcaactgccggagcagacaagaaggtctgcgtatgggatgtggatggtggattttgcacccatttccttagaggccatacaggggttgtgacatccgttatgttccacaaagatccaaagcgccttctgttgttttcaggaagtgaagatggcaccgtgcgagtgtggaaccttgaaactaaaaaatgtgttgctgtgcttaaagagcatttttcagcagttacttcattggcattgtctgatgatggacaaacattgctgagcgctgggagggataagattgttaccgcgtgggatattcgtaaatacagctcaaagaagacaataccgacatatgaaatgatagaagctgtttccttcattggaccaggaagtgagtttttggcttgtttgggcatagaactggcaaacaaaaaggagaaagatactgcttatttccttacagttggtgaacgtggggtcgtgcgcatctggtgcttggagagagaacaaggaaacaaggaggggctttacatctgctgttatgttgccaaatgaacaaggattgctatgtgttactgctgatcagcagtttttgttctattgtcccaaaaggactgatgatgggacctttgaactgtccctatatagacgactaataggttataatgatgagattcttgacttaaagtttattggggaggaggaacaatatcttgctgtagctaccaacttggagcaggtccgtgtttatgatgttgcgtcaatgtcatgttcttatgtgcttgctggccacaccgaaataattgtttgcattgacacatgtgtctctgcttccgggaagacacttgttgtaactgggagcaaggataacactgtgaggttatgggatgctgaaagaaaaagctgtattggcattggcaaaggccatctgggagctgttggttctgttgccttctcgaagaaaacaaaggacttttttgttagtggcagcagcgatcgaaccatcaaggtatggacctgggacaacacacttggtgatgctgaggatgaagtccctcttaaagcaaaggctgttgtagctgcacatgataaagatattaattatctgacagtttcacctaatgatggtcttgtttgcagtggttctgaggaccggactgcttgcatatggaaactccctaatctagtgttctctgttgcccttaaggggcacaaaagaggaatctggtcagttgagttttctcctgttgaacaatgtgtcatgacatcctcgggtgatagaacaatcaaaatatggtccgttgctgatggctcttgtttgaagacatttgagggtcatacatcaagtgttctgcgagcgtctttcctttcacgtggaactcaagttgtttcttgtggaagtgatggtctagtgaagctatggacaattaagacaaatgaatgcattgctacttatgataagcatgatgggaaggtctgggcattggctgttggcaggaaaactgaaatggttgctactggtggaaccgatgctgtcctcaatctgtggcatgattgcaccatggaagataagcaggaagatttccgtaagaaggagcaagaagttttaagaggccaggaattggaaaatgctgtgtcagattctgactatgcaaaggcaatacaacttgcatttgagcttagaagaccacacaagcttctagatttattctcacagcttgccaggcgagctgacgcagaggatccaatagaaaaggctcttcttggtcttccaaaggatggccttcgtgtgcttctagagtacgcccgtgaatggaatacgaagcccaagttctgtcatgttgcgcagtttgtgctttttcgggtattgaggagtttctctcccactgatatcctggagataaagggcatcagtgagctcctcgagggccttattccgtattcgcagaggcatttcagcagagtggacagactagtccgaagcacgtttctgttggactatacgctgacgcgaatgtccgtggtagacccagatgtggatgcggggtcaatcaaagacgaaatgaatggttcgtctgtggagaacggtgaacttgcagagcctcggcctgcttcacctgtgccagagaagtcaagcaagaagagaaaatctggcaaatcaagtaaaaagggaaaggagaaggtgatgaagcttgcctcgagtggacttggcaagggtgtttctgttgaagcctgaaaatctagctgagaatctggttttgcttatgcatgcatgcatccaattttgtagcagctgttgaaactgacgttgcccaacgcacgaatcacatttgatgtaaatgcagttttttgctgcgtttattagaaggccgcagcgcatttaatgcattggagtgtatgatttgctatcaaaatttggcacgccaaaggttttgataagccaaagttgctaaaagttgggcaaaatatgttatatagatatagcaagccaaatgtggcaagtttttgtgcgaaccaaatagctagcaaaaag

SEQ ID NO: 199791 - DNA, 3443 bp, Zea Mays
aaaaaaaaaaaagttgttttgctgctggcgggacacgcttcgggcgcgacagtcgtcaccccgctttcccctactggatccagccacttgacttcgcttaaaccctgatcctcttcctccctctcctccggtcctcccgcgccgccacccccatctcccaccgcaaaaccttaggtccgacgagcccccgccgttgccgtgggcgccagaagcagccatggcttcgagttcgacgtgtgttcttaagaagaactaccgctgcgaccgctccctgcagcagttttacactggtgggccctttgcggtcgggcttgcccccggcggcgatggcgagggcggcgccgaggctgaggccttcctcgcatgcgcctgcggtggagaggtgcgcgtggtgtcctccgcggacgcctctgccataggggagcccgtcgacggcgactcggaggccatcaccgcgctggcgctgtcccccgactcacggctcctctttgccgcggggcacagcaggcttattagggcctgggacctcgcgtcccgagcttgcatacgcagctggaagggacatgatggtcctatcatggccatggcatgccatgtttctggtggtttgcttgcaactgccggagcagacaagaaggtctgcgtatgggatgtggatggtggattttgcacccatttccttagaggccatacaggggttgtgacatccgttatgttccacaaagatccaaagcgccttctgttgttttcaggaagtgaagatggcaccgtgcgagtgtggaaccttgaaactaaaaaatgtgttgctgtgcttaaagagcatttttcagcagttacttcattggcattgtctgatgatggacaaacattgctgagcgctgggagggataagattgttaccgcgtgggatattcgtaaatacagctcaaagaagacaataccgacatatgaaatgatagaagctgtttccttcattggaccaggaagtgagtttttggcttgtttgggcatagaactggcaaacaaaaaggagaaagatactgcttatttccttacagttggtgaacgtggggtcgtgcgcatctggtgcttggagagttgtctttgcgtatttgagcagcaaacatctgatgtaactgttaactcagagaacaaggaaacaaggaggggctttacatctgctgttatgttgccaaatgaacaaggattgctatgtgttactgctgatcagcagtttttgttctattgtcccaaaaggactgatgatgggacctttgaactgtccctatatagacgactaataggttataatgatgagattcttgacttaaagtttattggggaggaggaacaatatcttgctgtagctaccaacttggagcaggtccgtgtttatgatgttgcgtcaatgtcatgttcttatgtgcttgctggccacaccgaaataattgtttgcattgacacatgtgtctctgcttccgggaagacacttgttgtaactgggagcaaggataacactgtgaggttatgggatgctgaaagaaaaagctgtattggcattggcaaaggccatctgggagctgttggttctgttgccttctcgaagaaaacaaaggacttttttgttagtggcagcagcgatcgaaccatcaaggtatggacctgggacaacacacttggtgatgctgaggatgaagtccctcttaaagcaaaggctgttgtagctgcacatgataaagatattaattatctgacagtttcacctaatgatggtcttgtttgcagtggttctgaggtaagattttagcaaggtactccctccactccaaattatgtcactttcgttttgtccgaagtcaaacttctctgaatttgagctggtttattgaaaaagttactatatctacgacactaaattaatttaactaaattcaccagaaatatgtcttcatgcgtttttttggtattacatatgctaatatttttttctaaaaacctggccagaatgtatgaatttggcttaggacagttgaagtgacctataatttggaaaggagagggaccggactgcttgcatatggaaactccctaatctagtgttctctgttgcccttaaggggcacaaaagaggaatctggtcagttgagttttctcctgttgaacaatgtgtcatgacatcctcgggtgatagaacaatcaaaatatggtccgttgctgatggctcttgtttgaagacatttgagggtcatacatcaagtgttctgcgagcgtctttcctttcacgtggaactcaagttgtttcttgtggaagtgatggtctagtgaagctatggacaattaagacaaatgaatgcattgctacttatgataagcatgatgggaaggtctgggcattggctgttggcaggaaaactgaaatggttgctactggtggaaccgatgctgtcctcaatctgtggcatgattgcaccatggaagataagcaggaagatttccgtaagaaggagcaagaagttttaagaggccaggaattggaaaatgctgtgtcagattctgactatgcaaaggcaatacaacttgcatttgagcttagaagaccacacaagcttctagatttattctcacagcttgccaggcgagctgacgcagaggatccaatagaaaaggctcttcttggtcttccaaaggatggccttcgtgtgcttctagagtacgcccgtgaatggaatacgaagcccaagttctgtcatgttgcgcagtttgtgctttttcgggtattgaggagtttctctcccactgatatcctggagataaagggcatcagtgagctcctcgagggccttattccgtattcgcagaggcatttcagcagagtggacagactagtccgaagcacgtttctgttggactatacgctgacgcgaatgtccgtggtagacccagatgtggatgcggggtcaatcaaagacgaaatgaatggttcgtctgtggagaacggtgaacttgcagagcctcggcctgcttcacctgtgccagagaagtcaagcaagaagagaaaatctggcaaatcaagtaaaaagggaaaggagaaggtgatgaagcttgcctcgagtggacttggcaagggtgtttctgttgaagcctgaaaatctagctgagaatctggttttgcttatgcatgcatgcatccaattttgtagcagctgttgaaactgacgttgcccaacgcacgaatcacatttgatgtaaatgcagttttttgctgcgtttattagaaggccgcagcgcatttaatgcattggagtgtatgatttgctatcaaaatttggcacgccaaaggttttgataagccaaagttgctaaaagttgggcaaaatatgttatatagatatagcaagccaaatgtggcaagtttttgtgcgaaccaaatagctagcaaaaag

SEQ ID NO: 199792 - DNA, 3194 bp, Zea Mays
aaaaaaaaaaaagttgttttgctgctggcgggacacgcttcgggcgcgacagtcgtcaccccgctttcccctactggatccagccacttgacttcgcttaaaccctgatcctcttcctccctctcctccggtcctcccgcgccgccacccccatctcccaccgcaaaaccttaggtccgacgagcccccgccgttgccgtgggcgccagaagcagccatggcttcgagttcgacgtgtgttcttaagaagaactaccgctgcgaccgctccctgcagcagttttacactggtgggccctttgcggtcgggcttgcccccggcggcgatggcgagggcggcgccgaggctgaggccttcctcgcatgcgcctgcggtggagaggtgcgcgtggtgtcctccgcggacgcctctgccataggggagcccgtcgacggcgactcggaggccatcaccgcgctggcgctgtcccccgactcacggctcctctttgccgcggggcacagcaggcttattagggcctgggacctcgcgtcccgagcttgcatacgcagctggaagggacatgatggtcctatcatggccatggcatgccatgtttctggtggtttgcttgcaactgccggagcagacaagaaggtctgcgtatgggatgtggatggtggattttgcacccatttccttagaggccatacaggggttgtgacatccgttatgttccacaaagatccaaagcgccttctgttgttttcaggaagtgaagatggcaccgtgcgagtgtggaaccttgaaactaaaaaatgtgttgctgtgcttaaagagcatttttcagcagttacttcattggcattgtctgatgatggacaaacattgctgagcgctgggagggataagattgttaccgcgtgggatattcgtaaatacagctcaaagaagacaataccgacatatgaaatgatagaagctgtttccttcattggaccaggaagtgagtttttggcttgtttgggcatagaactggcaaacaaaaaggagaaagatactgcttatttccttacagttggtgaacgtggggtcgtgcgcatctggtgcttggagagttgtctttgcgtatttgagcagcaaacatctgatgtaactgttaactcagagaacaaggaaacaaggaggggctttacatctgctgttatgttgccaaatgaacaaggattgctatgtgttactgctgatcagcagtttttgttctattgtcccaaaaggactgatgatgggacctttgaactgtccctatatagacgactaataggttataatgatgagattcttgacttaaagtttattggggaggaggaacaatatcttgctgtagctaccaacttggagcaggtccgtgtttatgatgttgcgtcaatgtcatgttcttatgtgcttgctggccacaccgaaataattgtttgcattgacacatgtgtctctgcttccgggaagacacttgttgtaactgggagcaaggataacactgtgaggttatgggatgctgaaagaaaaagctgtattggcattggcaaaggccatctgggagctgttggttctgttgccttctcgaagaaaacaaaggacttttttgttagtggcagcagcgatcgaaccatcaaggtatggacctgggacaacacacttggtgatgctgaggatgaagtccctcttaaagcaaaggctgttgtagctgcacatgataaagatattaattatctgacagtttcacctaatgatggtcttgtttgcagtggttctgaggtaagattttagcaaggaccggactgcttgcatatggaaactccctaatctagtgttctctgttgcccttaaggggcacaaaagaggaatctggtcagttgagttttctcctgttgaacaatgtgtcatgacatcctcgggtgatagaacaatcaaaatatggtccgttgctgatggctcttgtttgaagacatttgagggtcatacatcaagtgttctgcgagcgtctttcctttcacgtggaactcaagttgtttcttgtggaagtgatggtctagtgaagctatggacaattaagacaaatgaatgcattgctacttatgataagcatgatgggaaggtctgggcattggctgttggcaggaaaactgaaatggttgctactggtggaaccgatgctgtcctcaatctgtggcatgattgcaccatggaagataagcaggaagatttccgtaagaaggagcaagaagttttaagaggccaggaattggaaaatgctgtgtcagattctgactatgcaaaggcaatacaacttgcatttgagcttagaagaccacacaagcttctagatttattctcacagcttgccaggcgagctgacgcagaggatccaatagaaaaggctcttcttggtcttccaaaggatggccttcgtgtgcttctagagtacgcccgtgaatggaatacgaagcccaagttctgtcatgttgcgcagtttgtgctttttcgggtattgaggagtttctctcccactgatatcctggagataaagggcatcagtgagctcctcgagggccttattccgtattcgcagaggcatttcagcagagtggacagactagtccgaagcacgtttctgttggactatacgctgacgcgaatgtccgtggtagacccagatgtggatgcggggtcaatcaaagacgaaatgaatggttcgtctgtggagaacggtgaacttgcagagcctcggcctgcttcacctgtgccagagaagtcaagcaagaagagaaaatctggcaaatcaagtaaaaagggaaaggagaaggtgatgaagcttgcctcgagtggacttggcaagggtgtttctgttgaagcctgaaaatctagctgagaatctggttttgcttatgcatgcatgcatccaattttgtagcagctgttgaaactgacgttgcccaacgcacgaatcacatttgatgtaaatgcagttttttgctgcgtttattagaaggccgcagcgcatttaatgcattggagtgtatgatttgctatcaaaatttggcacgccaaaggttttgataagccaaagttgctaaaagttgggcaaaatatgttatatagatatagcaagccaaatgtggcaagtttttgtgcgaaccaaatagctagcaaaaag

SEQ ID NO: 199793 - DNA, 973 bp, Zea Mays
cgcgtcttggttggggcaatggagcctagttaaggttggcttatcttcacgaggggctggaaccgaaggttgttcaccgtgacatcaaagctagcaacattcttcttgaccagcagtggaacgctagagtatccgattttgggcttgcaaagctattgtggtcagagaaaagctatgttacaacccgtgttatgggaacatttgggtacgtggcgcctgaatatgccagcaccggaatgctgaacgagaggagtgatgtatatagctttggcgtactcataatggagatcatcactggtagatctcctgtagactacacaagagcagctggagaggtcaacttggttgagtggctcaagaccatggttgccgagaggaaagcggaggaagttctggacccaaagatggctgaaaagccttctcccaaaacgctgaaacgggcgctcctggtcgcgcttcgctgtgtcgaccctgatgcgaacaagaggcctaaaatggggcatgtgattcacatgctcgagatggacgatctcctcttccgagatgataagaagcccgggagagacgttcatcctcacggttcagacagatacagctccaaggaggaagggagcatcagcaagcgcgagcaccaccaccaccaccaccatcggcacagatgatacacagcaagcgcgagcatatgaggattgccattagagagtagcgacattaaccatgttccccacttctttcccctcccgttcaatctcactggtctttgattgtattatatgtgagcatccatcattctgtgacgatacttgatacttgaatcgcacacacagacacaatgacacgcgagtgtaggggaaaagataggcatgatgttgtgactgactaacatgcccaggccaggccaaaaccctgcagattttcaatgcaaggaatccagcaaacgcgagtatagtacggggttttttttttgggtcta

SEQ ID NO: 199794 - DNA, 615 bp, Zea Mays
attttgcctgttggatatcgatatgcacatgcattttcagacatcttatgatcaaggggacaaatgagatcatgccaactctactccatgtactgctggtgtcacaggattaatatacaatgaagatgttgattcttggagttgcacgaaataaccttgtgattgtgattagttacttcaaagcgttttttggtcttaatgcatggatgggagagtgtcggatgcttcttcatatactatttcttggtccatcaaatctgcttgactcaaatgcaagttttgctcaaatgtggcaaaaataattgtctcaccaattgtcagcgcgcctgtttccagcaaagtttcagagaaggaaaagatggaatgtaactcaaattttggtggccgcacaagtgtggagacttgaattcatatatacttagttaggctcaatattagtgcaaacagttgataaccaagtttttcaattagtatttagttttggctttagagtacacttatgtatgagttatttgacaatatttatttatgagatattgaatggtacttatctatattatattagttacaatgttattaaatatatgtgtatgtatatttctctttcaaattatt

SEQ ID NO: 199795 - DNA, 2290 bp, Zea Mays
gttccgtgcacctacaacccaaaccagtcaagacgggccacgtcgtattccgccgcccagcagtgcgaacgatagtccacctccaccagtactaccaccaaccaaaacctccactcttcctcccaccaaggcaccaacccgacgcaaagccgccggctttccccgatggcgacggcgatgtcagtttcggcggtgtccccgcccgccgcggcggtcacgcggccgcggacgatggtctgcgtgccggcgacggcgcgggcgccgcgggagatggcggcggagctggccgccgccgccgcgctcggcgctgacgtggcggagcttcgcctcgactgcctcgccgggttcgcgccgcgcagggacctgcccgtcatcctcgccaagccccgcccgctccccgccctcgtcacctacaggcccaagtgggaaggaggcgaatacgaaggcgatgacgaatcacggtttgaggctctgctattggcaatggagctgggagctgaatatgtggatgtcgagcttaaggtggctgacaaatttatgaaacttatttctgggaggaaacctgataactgtaaacttatagtttcatcccacaactatgagaccactccatcgtccgaggaacttgcaaatttggtggctcagattcaagcaacgggggctgatatcgtgaaaatagctacaaccgctactgaaattgttgatgtggcaaaaatgtttcaaatacttgttcactgccaggtgccaatcattgggctggtgatgaacgacagaggttttatttctcgggttctttgcccaaaatatggtggattccttacttttgggtcactcaagaaaggaaaagagtctgcacctgcacagccaactgctgcagacttgataaatctgtacaatattaggcagatagggccagacactaaggtctttggtataattggtaaaccagttggccatagcaaaagcccaattttgcataatgaagctttcagatctgtgggtttcaacgctgtgtatgtgccatttttggtggatgacttggctaaatttcttgatacatactcttcaccagactttgctggcttcagttgcacaattccacacaaagaagctgctgttaggtgctgtgacgaggtcgatcccgttgccagggacattggagctgttaacacaattgttagaagacctgatggaaagcttgttggctataatactgactatgttggtgctatatctgctattgaggatggaataaaagcatcagaatcagaaccaacagatccagacaaatcaccactggctggaaggctttttgttgttataggggctggtggtgcgggaaaagcactagcatatggggcaaaagagaaaggagcaagagttgtaattgcaaaccgtacctttgcacgagcacaagaacttgccaacttaattggtgggcctgcattgactcttgcggatttggaaaactaccatccagaggaagggatgattcttgcaaatacaacagccattggaatgcatccaaatgtgaatgaaactcctctatctaagcaagcactcagatcttatgctgttgtgtttgatgcggtctacacaccaaaagagaccagacttctccgagaagctgcagaatgtggagccacagttgttagtggtctggagatgtttatacgccaagctatgggccagtttgagcatttcacgggcatgccagctccagatagcttgatgcgtgatattgttctgacaaagacatagtgaggtttgtccaaagagcaagcttcccttccatcgtaatttctgcgcaattgattccagttgtgtcccctcctcgtccttcccgcatcttcctcaacctgtagaatccacatttttttttatctcagtggacgattacaaattccgagcaattgcaagttcattggacaatcctaacaccatgaagcctcgtctgtgagagattcatccatgcccacaaacttccttgtttttcctttttagattcggattcagtgatcagtttgcctctcagccattgtaaattaatttgatgttccgagctgaaacattttggtgtgccttatttgtatcagcatgaacagcagtcatcgtgggtttgaatcagtctcttagcatttgcgttccaagacttgtctcgatttgtcccttttctaggtatcactaaggacttatttagttgtgtctggatcaaaacgatcaaaacgcggattgaatttccttctatttaattttgatttagaccccgttcggcaagctaagattcaag

SEQ ID NO: 199796 - DNA, 1109 bp, Zea Mays
gcatcctaccacaccaccccccactgcagggctccgccagtgacatttcctcgcccagaggggaagatcaagactctggtgcttcctgaggatgtgtatgtcacgaagttcaacagaatacatccagattcgctttaccatgatgcaatcaagataagtggatttgatccaccgccagctcgagtgtttgcttggcgtgtcctggagttgaaagagcaaggagtcgatgaagatgttgcgatggctgtagcagataacgagtaccggacagagaagaaggcaaagaagaaagcgtacaaggagctgaaagaaatcgcccgcagcgaagggaggaagccacctccgaatccatacccgagtgccataaaggaaatacaagcggaggaaaagaagtatgtcatggaccgtttgcataacccgaaggtaatcgagattgcgaacaagatgaaggaggagcgagacaggatgttgagggatagagcagcaggtcagcggtagtcgtagcagcaggtaatgtttggactggcccgactgggtgttgtcgtttacgacatgggccaactggcgtcataaataatggttgttggagattgatatggcaaatatgaaactcgtgtttttgttattcgtatttctgggatttagatggcctctggaatgcaatgttgattgggatgtgtttttgccagcaagctggtaaattgagacgtgttttgcttgctccagaaagttctgcttatagctgatacaaggctagaccgaatcagcagttgcattgtgatatgttagcagaacgccagttccccttctattcgccccttgcatgttaatttctgcatatccctgtgatgagcattttagtaatctgagtgagtgctcattcagttggtgctccctccgatgagaggttgaaggaaccaatacctgttgagatgtggcattctgagggatatgattgagttgttggttgctctctaacattcaaggtttttttttgttgttgtttttttacttcaagaatttcttgcgaatttttctctctctctctgtgtgtgtgtgtgtttgccttgccgtttagttttggaagatcttgtcgctgttcttaaatc

SEQ ID NO: 199797 - DNA, 1417 bp, Zea Mays
gatttataaactttgttagcatcctctatgcatcaagtctcatgtgcacgcctccattagcctcgcattgacgcggtccgcaactcctctaaacccttcctctccctccggcgccggcgccgacatggccatccactacctcctccgccgcggggtctccggtggctcactgctccaccctatccgcggtctcttcctcgcctccaaggagcttgggaggcgtccgttgggctctgcggcggcgggagacgcagcggccgagctgaggggcgcgcgggaggacgtcaggcagctgctcaaggccacctcctgccatcccatcctggttcgattaggttggcatgatgctggtacatatgacaagaacattaccgagtggcccaagtgtggtggagctaatggtagcttgagattcgaagtcgagttgaagcatggggccaatgctggtcttgtgaatgctctgaagctgatccaacctatcaaggacaagttttcaggtgttacctatgcagatctgtttcagcttgccagcgccacagccattgaggaagcaggtggccccaaaattcctatgatctatggaagagttgatgttattgcccccgaacaatgcccaccagaggggaggcttcctgctgctggcccaccttcacccgcggaacatttgcgtgaagtattctacagaatgggcctgaacgacaaggaaatcgttgcactgtcaggagctcatacacttggacgtgcaagaccagagcgtagtggctggggtaaatcagaaacaaagtacactaaagatgggcctggtgcacctgggggacaatcttggacatctcattggctcaagtttgacaacagctatttcaagaaagacgagatgatcacctcctagttctgcctactgatgctgtgctgtttgaggattcctcattcaagatctatgctacaaaatatgccaaggatcaggacacatttttcgaggactacgctgaagctcatgccaaattgagcaatcttggggcaaagtttgacccgccaaagggtatctcactcgagtagttgtggatggaggtgactgaacaggaagggtcatgtttctttgcgtgaccattttcgaaggttggcaaggaaaagttattggggttgaatgatagctccacaaattggattcaccgattaaaggatttttttcttagcgtgccctgtttttttagtagtatcctacactatgaataaagcaacacctgtcatttcaagataaatatttgttacactaactaactgaaagcatccgaatcctaagtggtttcggtgattaatgacgacataagatcgttataactaacttatgctttattgagtccatttaagttaggtcacaataataatgattatttggtcaattaaggttttttatgcc

SEQ ID NO: 199798 - DNA, 1959 bp, Zea Mays
gtaattccgtggccttgtgagcgggcgttggcgtgttgccccgtgtgggcgctctctctcgtagccctgatcgcggtgttgctttcggctcggatctatgtgatgtcccgcgtgcgtttctgtggtgaacgctgtggataagtcgggcttttgtcggcatttggcagtggctggctggtatgaaactgggcctgctgttgtggattgcaggggccagggggaggaggagggaaggggagtacggacacgatggaagccgactctgggaagctcttcgtcggcggcatctcgtgggagacggacgaggatcgcctccgcgagtacttcggtcgcttcggcgacgtcaccgaggccgttatcatgcgggaccgcaacaccggccgcgcccgtgggttcgggttcgtcgtcttcgccgactctgggatcgccgagcgcgtcaccatggagaagcatatgatcgacggccgcatggtggaagcaaagaaggccgttcccagggacgaccaaagtattgcgagcaagaacaatagcagcatagggtcacctggaccaggacgtactagaaagatctttgttgggggtctggcttcaaatgttaccgaggtcgaattcagaaggtactttgagcaattcggtgtgataaccgatgtggtggtgatgtatgaccacaatacgcagaggcccaggggctttggtttcatcacatatgactcagaagacgcagtggataaggcactgcacaagaacttccatgagctcaatggtaaaatggttgaggtcaagagggctgtaccaaaggagcagtctcctggacctattgcacgtgcacggaatgggttctcttcgtttggtccaggttatggaatgggcatgagcgttgaaggtggaatgcgtggatattttggtgcaagttctggtttcgtcaatagctccaatgggcggcaaataggttcttactttaatggtagttcaaaccgattaggtagtccaattgggtatgttggccttaacgatgattcaggatcaatactgagttcaatgtctagaaatgtctggggtaatggaaatctgaactacataggcaaccatacaaacatgaattcttttcctcaacctggaagtggtgggggtatttctggtgatgaaattagttggggaagccttacttctgctcatgggatgagcaacatttcaagccttggatcgggaaaccttggccgtggaaccggagataacaactttggcttgccttctggaaactatgttaggagcaactcaactggtacaattggtgagccattttctgcatcagccaatgcatatgaatcgaacaatccaggtgcatatggcagcagctctatttatggtgactcaacctggaggttcaactcatctgaggttgatatgcctccttttggtcatgatcttggaaatgatgatccagatatcaaatcagaaatatcagcaagctatatgggcaactatactgttaataacaatcagacaagcagaggtatcacttcctagggagagtactattatattcatatatgacttgggataggtgaaacacccactactatatcaggctttcaggtgcatgactgtgaattggtgatgtcagattaatatacagtgttgattgcggcacatacttagaagtgttccaacataagctggaattctgtcatacggaaggataaacttgtataccaagggaatgctgtattattatctttgcccatttatggctacattagcttgcttgtttctattctctttaaccatttcatctgtatactagacagttgcttgacttactattcaaactatattcaaactattgggggtacagagccatattgagacctagtaataaagccaccgaaagtatatacatgtactatctgtcccttttgtgccatgcgaatgcttttgcggaattctgttataaacctt

SEQ ID NO: 199799 - DNA, 2048 bp, Zea Mays
gtaattccgtggccttgtgagcgggcgttggcgtgttgccccgtgtgggcgctctctctcgtagccctgatcgcggtgttgctttcggctcggatctatgtgatgtcccgcgtgcgtttctgtggtgaacgctgtggataagtcgggcttttgtcggcatttggcagtggctggctggtatgaaactgggcctgctgttgtggattgcaggggccagggggaggaggagggaaggggagtacggacacgatggaagccgactctgggaagctcttcgtcggcggcatctcgtgggagacggacgaggatcgcctccgcgagtacttcggtcgcttcggcgacgtcaccgaggccgttatcatgcgggaccgcaacaccggccgcgcccgtgggttcgggttcgtcgtcttcgccgactctgggatcgccgagcgcgtcaccatggagaagcatatgatcgacggccgcatggtggaagcaaagaaggccgttcccagggacgaccaaagtattgcgagcaagaacaatagcagcatagggtcacctggaccaggacgtactagaaagatctttgttgggggtctggcttcaaatgttaccgaggtcgaattcagaaggtactttgagcaattcggtgtgataaccgatgtggtggtgatgtatgaccacaatacgcagaggcccaggggctttggtttcatcacatatgactcagaagacgcagtggataaggcactgcacaagaacttccatgagctcaatggtaaaatggttgaggtcaagagggctgtaccaaaggagcagtctcctggacctattgcacgtgcacggaatgggttctcttcgtttggtccaggttatggaatgggcatgagcgttgaaggtggaatgcgtggatattttggtgcaagttctggtttcgtcaatagctccaatgggcggcaaataggttcttactttaatggtagttcaaaccgattaggtagtccaattgggtatgttggccttaacgatgattcaggatcaatactgagttcaatgtctagaaatgtctggggtaatggaaatctgaactacataggcaaccatacaaacatgaattcttttcctcaacctggaagtggtgggggtatttctggtgatgaaattagttggggaagccttacttctgctcatgggatgagcaacatttcaagccttggatcgggaaaccttggccgtggaaccggagataacaactttggcttgccttctggaaactatgttaggagcaactcaactggtacaattggtgagccattttctgcatcagccaatgcatatgaatcgaacaatccaggtgcatatggcagcagctctatttatggtgactcaacctggaggttcaactcatctgaggttgatatgcctccttttggtcatgatcttggaaatgatgatccagatatcaaatcagaaatatcagcaagctatatgggcaactatactgttaataacaatcagacaagcagaggtatcacttcctagggagagtactattatattcatatatgacttgggataggtgaaacacccactactatatcaggctttcaggtgcatgactgtgaattggtgatgtcagattaatatacaggctgagactttgcttggctacctgcgggagcagagacaagggtttggctgcagagctggagcagtggtagcaactagcttggccaggtaaagcaagaattatggtcgaaatctgatccattctctgtggaaattttgcgagcagatgtaaataacagcttattctggttagtttggctatgtgaatacacatgtggtttgcgagtgaggatgcttggttggttactaacgtagtgtcagttaagagtaaggcttaagatttgggtggtaatgacgataatgctggtttgtagctatgtacaggatgctagggtatgcttgctttgtcttgtcaagttatgggggaacgttggattgtcaatcagtgttttttttgctcgaggtcagagtccaaattcctctcttccttttta

SEQ ID NO: 199800 - DNA, 763 bp, Zea Mays
tcggattccacggacccacctcgcacctcacgctttaaggccttatccttatcatctgaagcatttgaccatctcccgtcacctagaacccaaaaggacctggccgccatcacctgagggagctcgggagggcgaagccgagggccacggacacaagcttcaccgcccggaccaccgaccacctcctgtgcgatgaggaagacaggagtaacattcctacagttactattcagatattgatcgaaccatgaagaagttaactattcagatattcagatctttcttctggttcttgatctggaaaaggtttggtgtgtaaatgataaagacaaggttcaactctcaccctctgaccaatccaaattttacactggcgattgctacatatttcagtatacttatcctagagatgataagaaggaatgtcttattggaacctggtttgggaaaaagagtattgaggaggataggctaatagcagtttcacttgcaagcaagatggttgaatctgctaagtttcaggctgtccaggcgcgcttttatgaggggaaagaaccgattcagttctttgtgattatcaatcagtgcgggagtgatgtcgttgtggtgcttttgaacctattattagaatgcatcagtcaaactcgccttcagtctagtggcgttgtactcccatttcaacaaactgtaaatgatctagttgtgaatgatattataattgtgatgcttttgtgaatatataattgtggtgcttttgtgttta

SEQ ID NO: 199801 - DNA, 1583 bp, Zea Mays
gattttgctgctgcgcctgccaagcacctgtcgacagcaaatctaccctgccttggcgccaacagaccgccggaatctaccgctgccgtgcgtgggccgtgggctccaacgccagaccagcggatggccggcggtaacacacagcacaaggagctcgcggccgatcgagctgcgttgcgagggcagagaaagagatgggcagtgcagtgacgaagataaggacccgccctttggaagtgcacacacacaaaccaacactgacatcacagcgggttcaggggaggaggagagggagagacttctttaagatcaccacaccctcccctcacccctcctcctcattgtcatctctccctctctctctctctctctccattgcactcgctctatactaggtccaaggactttgccaaggttagcgaggtcccgccccattttgcttctcccctgggcttgcggttgcgtttgagtgcacccctgaggctttgattgggccctcccgctccgcacttaagctctccgcctcgtccatggcgtcgcagccctcaagacttgctgtctcttggtagctgccgcttctagctactccacctaactgaaagagcgtatagttagttggtcttggattcttggtccggtgctgccgccgccatgttcctgagatcgaagatccaggagatgatcctgcggaggagatcgaggtcgatgaacagcgccggcgcgcagaggggccacgtccccgatcaggccccgagctcgtcgaccgttccggcgccggcgtcgtcgccttcgccaggagccccgcggcggagcccgagcccgagacggcctcctccctgagcccgacctccgtgctggacgcggcggcggcctacgtgccacgcacgggcaagcggcgccgcccgtggcgcgcgcgggacaacaacggcggcctcgcggacgtgctggactgcaccgatgaccagcagcaggagcggatcgtcctcgcggctacgtcgtcctcgcgctctctgctcaggtcgtgctccctggaccgccgcgtcgagttcggcgtcaagaacaagagctcgtggctgcccctccgcggccgcggcgagcccgcggcgccggcgccggccgacccgcgcgagatcgggccgtcgtcggaggactacacgtgcgtcatctcccgcgggcccaacccgaggacggtgcacatcttcggcgaccgcgtcgtggaggcggaggcggagacggagacggagagctcgccgcggccgatcagtctgccgacgcgaacggatccccgtccacgcacgcgtagcctgatgagtgatgacgccgcctagctaggtaaagaaaccgaatttaattagctgagtgctattattgagttcaggcagccttgatgttgctgtattgtattggttgctccgatccgttccatcgtctgatcagaaagatagatagagttgatcattcataggtgttttcttgatcagatgatgaactagacgttttgtccaggttgagctgaagctgtgatataaatttgatcatgttgttactaggggggaaaaaaagaagaagaagtgcaaattcag

SEQ ID NO: 199802 - DNA, 2759 bp, Zea Mays
cccgcctagttcatgtgctcatgcacccgcacatcattataaataccagttttgctgtttacccgttccaacttcgcctggcccgagaggccgagatcaatactagacctcgactcgagtctcgagtcacgtttccgccgttatctgcatcaacggggtcaggcgactgaacagtacaggcccttggccgccgccgccgccgccgccgtactccaggtgcccaggtcttcgtccgaccctttgccagcgacgagcacccaccacaccaggatttcatcatggttgattctgttcatgacaatattgtgctgaacaagtgtatcaaggacatccttgcactaatcaaaccagtagaggatgatagaagcaagcggttatccacaattcaggagctggaaaattgtatccattctcttgcatctctgtcaggtgctgctgtcaaaccgtttgggtcttttgtatcagatctttactcaaaatcaggtgacttagatttgtcagttcagtttgggaatggttcaaaccacccaataaacaagaaaaagaagcagaatgccttgagagatgttaggaaagctttactaagtcgagatgcagttcatcccacatgcaagagttccagtccttcaatatgtgagcaagcaatttggcatctcctgtgatatatcaattggcaactttgctggtcgaattaagtccaaaatcttctactgggtcaatactgtagatgagcggtttggtgatatggttttgctgatcaaggaatgggcaaaagcacaaaacattaacgatccaaagagcgggaccctcaactcttattcgctttgcctacttgtcctctatcattttcaggtgttgtttcttatacctaagtatctctctatgtgttcctacttatttatggtttcactaatgctacgtttggacgtcgatattggagaggatggaattgaattgggttgaataccaaatcatacatggtattgaaatgagatgtaattccaattctattgtttggatgtcactgaattggagtttggaattgtgcggtctaattccacgcaataccgtggggcgaggctttgtattgggagagggggtttctagtcatagtccaattccagggaattgggcctctaattccaaatctcaattccacgtgcaaccaaacaacataatttaggaaagctgtttcgaattctcaattatgtgcttctatttctacatccaaacgaggtataaatgacttgcttattaacttgtatttttagacatctgagccaccaattctaccacctctgaatgagatttatgaagggaatattgcaggagatgttacagaagcagcactttttgatgagcaacatcttgatgaggtttgtgctgcaaatatagaaagatttagactccagaacaagggccgaagaaatgaaacttcaacttgtcgtctacttgggactttttttcagaagtttgctcatatcaatgccttaacagataatgtcatatctacttactcgggccagattgagcgaatccagaacaacccaagttggatgaggaaatcttaccatttatttgttgaagatcctgtagagagacctgataatgccgctagagcagttagtatgaaaggccttgacctcattgctattgcattcaatgatgcttgtcacaagtttaagtctctggaacatatcgatcggaatgaattattggcactgttgtgtacccctgttgttcgcttgaaacttggtgtgagagtcagagagaactcttacccaaaatctccaaggaataatgtgcatagcaggattagaggacagatgtggcgtgatcgaggccaagcacccagcgcgagagggtttactggaaccagatcagtccatgaaaatccactagcgaacactacagcacatgaaacagcagtgcaataccacaaccatgtgcagccgacaacagttcggcaaacagccatccgcaatcaagtaacaaatactgcagtgcatcagaccgcgccttaccagaaccatactgctcgacaggtgtatcctacttggtcccagacagctgaaccctaccagaatcataatcagcaggtatacgctactgggtttcaaacagggccataccaaagccataatcaagtccatgcttatagagcagggttgccacctggaggaatatatgagatccacaatcaacaggtgtataatgcagggttccaaaccgacggtccgcaccagaatcagcagcggcgaaagggatacccatcaaaccatcagaataacaggctttctgcgacggcagcgaggtacgagcccgttcgtggacagtttaacaacggatcgacatgggactcaaggtcccaagcaccgggcagtgcagctctgcgaaggtagccgtcagcatctcaggaggatagtagtaacaggcaaatcggctggattttgactgctgggcagctcttccttgtgtaaaaaattctagcacttctttactggtggacaactcttccttatgtaaaaattgctgttagcagtcggttcgtagtatgtgtcaattaattttttttaaggtgtgattgggtttatttatcgtgtctcagaaattcatcgcccttctccgtatgctcacgtatcatgtaaataaagtacaatagctggtccatgacacgcagaaatattcatcatgtaaaaagctgcctcacgccatatatgagcttttaagattttttaggaatcaattgttttttctct

SEQ ID NO: 199803 - DNA, 1002 bp, Zea Mays
actttttggcacgtttttgtttgtttcattacatccacgaacaagggcagaagggggcgaccggccggttggtgccattgtcatgcatgtctcctcgccgcttctgacgcgtgcgtagccagcgttcaggtgccgtgctgatccgccgacgatgccgggcaaccaccaggagggccaagggccgccgggcgccagcgtgtgcttgtggctggtgacggtgctgctcctcctctccctgctcggcggcggcgcgtgcctcgcggcctacatcctgctgccgccgcacgaggcgccggcctggctcgccgccgtcggcctggcgctcgtcgcgcttccgtgggcgttttggatcgtcacgtgcgcgtaccggtgcgccaaggtgcgggccaacgagagcagaacgatggccgtggcgccggcctctggcagcatgtgctcccgctccggctcatgagcaatcactgcaagacgccttggcgtgcagaccaaatttcaggattgctgaagacgcagaacgacatgaggaactgaaggaattaaatctgttcgtagctcaatctacatattgatgtcgagtggaggatgccaaaactctggtgctacaatgccctgttttccaaagtagcgaatgtatatattttcctgatgagatcctagccaacatttctttccctgtacagttcttgtcaatgttttaagagtttgaagttgagccgaacgtcttgactcttgagtgggaaggagattgtgttcagaaaactgtacaaataccttttagcttgctgggttgcaaactgttgcagttggaaggccttgatctttaaactatccgaagcagtatcatttaagggataattgtgccagtgcccctattttgaaatgtatctgtagatttatcctctgctttttagactttgcgtgtttattcctatttttttaaacgaatctgttgtatacccctacttcgtagttgtattcaatagtgttaagttttgataaaaa

SEQ ID NO: 199804 - DNA, 2545 bp, Zea Mays
cgtctgggcaagcacggcggcgcgaaggcggaggaagcggtccttgaggaccatcgcacgctgctgctctccgtcaagggcagtgaggaagaggcacgggcgtcgctgctgtacagctacaagcacaccctcaacggcttcgcggccatcctctcccaggaagaggccacgaaactgtcagagaggagcgaggtggtgtccgcgttccagagcgaggggaggtgggcgccgcacaccacgaggtcttggcggtttctgggcttcgaggaggggctcgaccgtcgcccccccgacgacggtggggatcagtggctgctgccgtcgtccctcgacaaggccagcgaggacatcatcgtcggcatcctcgactccgggatttggccggagtcgaggagcttcagcgaccaagggctcggcccggtgccggcgcgctggaaagggacgtgccaaggcggggattccttcccctcctcgtcctgcaacaggaagatcataggcgcgcgatactacctcaaggcctacgaggcgcactacaacggcggcctcaacgcgacgtacgcctaccgctcgccgcgggaccacgacgggcacggcacgcacacggcgtccacggccgcgggccgcgccgtggccggcgcgtccgcgctgggcgggttcgcgcgcgggtcggcctcgggcggggcgcccctggcccgcctggccgtctacaaggcgtgctggcccatcccgggccccgaccccaacgtcgagaacacgtgcttcgaggccgacatgctggccgccatggacgacgcggtcggcgacggcgtcgacgtcctcagcgtctccatcggctcctcgggcgccccgccgcggttcgcggacgacggcatcgcgctgggggcgctgcacgccgccgcgcgcggcgtggtcgtctcgtgcagcggcggcaactccgggcccaggcccgccaccgtgtccaacctcgcgccctggatgctcacggttgccgccagcagcatcgaccgcgccttccacgcgccggtcaggctgggcaacggtgtgacggtcatgggtcaaaccgtgacaccgtaccagctccccggcgacaagccctatcctttggtttatgcggcagacgcagttgttcctgggactcccgctaatgtttccaaccaatgcctgcccaactccctggccagcgacaaggtgcgaggcaagatcgtcgtgtgcttgcggggcgctgggctgcgggtggggaagggcctggaggtgaagcgcgcgggcggcgcggccattctgctcggcaacccagcggcctccggctccgaagtccccgtcgacgcgcacgtcctcccgggcaccgcggtcgccgcagccgacgccgacaccatcctccgctacatcaactccagctccagcccgaccgccgtgctggacccctccaggaccgtggtggacgtccggccgtcgccggtgatggcgcagttctcgtcgcgtggccccaacgtcctggagcccagcattctcaagccggacatcacggcgccggggctgaacatcctggcggcgtggagcggggcgtcgtcgccgacgaaactcgacggcgaccaccgcgtggtgcagtacaacatcatgtcggggacgtccatgtcgtgcccgcacgcctccgccgccgccgcgctcgtcaaggccgcgcaccccgactggagctccgccgcgatccgatcggccatcatgaccacggccacgaccagcgacgcggaaggcggcccactgatgaacggggacgggtcggtcgcggggcccatggactacggctcgggccacatccggcccaggcacgcgcttgaccctggcctcgtgtacgacacgtcgtaccatgactacctgctcttcgcgtgcgccgccagcagcgccgggtccgggtcccagctggaccgctcggtgccgtgcccgccgcgcccgccgccgccgcaccagctgaaccacccgtcggtggccgtgcgcgggctcaacggctcggtgaccgtgcgccggaccgtcaccaacgtcggcccgggcgcggcgcggtatgccgtcgccgtcgtcgagcccgcgggcgtgtccgtgacggtctcgccgagacggctccgcttcgcgcgggccggcgagaagagggcgttcaggataaagttggaggcggccagcagggggaggagcggcgcacgcgtggcgagagggcaggtcgtggccggctcgtacgcgtggagcgacggcggcgcccatgtcgttaggagccccattgttgttatcttcgactgatcatcgttcggtaagctagtggctagcctcgcgcggacagacaactctggaggaggataggtgtttagccataccttgttcgaagcaggggatgcaaggcaatgaaaaccttcggctatgtgtggaagaataatcatcacatcaagcagaaaaataaaatccagttgtcttatgtgacgttataaaccactaattgatgactagtcacttgcgcgcgccagcgcgcgcacgtaagcaacgtaatattaatagaaataatatt

SEQ ID NO: 199805 - DNA, 1642 bp, Zea Mays
gttccaacccacaaaccgagcggcggccgccgcctcccttttcgtctctgactttttctacaagctcattcttcctcccccgatctcgggagcagccgaagcatgtcctggcggtggactctcgcgcgccgcgtcgccacgctggccgcgatcggtggcggcggtgcccaggcgcagaggctcctgtccacctcgtcagccggcggtggcactggcctcctgggtcggcactacatacccctcgcctcccagattcggagcaaggtagttggttgcagaggagctgctcttgtgagctccagatggttgcatgaggcccaataccaggttcgccaggacggggcttccagggctcagcaagatccatttgaattagtcgccgatgagctatcacttcttgcaaataggttacgatccatggtggctgctgaggtccccaaactggcatcagcagctgagtactttttcaaggtgggagcagagggaaaaagattccgacctacggttttgttgctcatggcatcagctctgaaatttcctttgtcagagtcaacagaaggaagagttctcagtatattggcagataaactccgcacaaggcaacagaacattgctgagataactgaaatgattcatgtcgcaagccttctgcatgatgatgttcttgatgatgctgatactaggcgtggtgtcagttcattgaatctcatcatggggaacaagctttctgtgctggctggtgatttccttctgtctagagcatgtgtggcccttgcagcacttgggaacacagaggtggtttctctaatggcaactgctgtagaacatctagttactggtgaaactatgcagatctcaacaagcagagagcaacggcgaagcatggagtactacctgcagaagacatactacaaaacggcatcattgatatcaaatagttgcaaggctgttgctattcttgcagggcacacaactgaggtctcggtgcttgcatatgaatatggtcgaaacctgggtctagccttccagttaattgatgatgttcttgatttcaccggcacctctgcatcccttgggaagggttcattgtctgatattcgccacggaattattactgccccgatgctatatgcgatggaggaattcccacaactgcaagaagttgttgaccggggttttgataatcctgcaaatgttgaaattgcccttgactatctccagaagagccgtgggattgaaaagacaaaagagcttgcacgagaacatgctgatcgtgcagtcaaggctatagaatctctacctgatagcgacgacgaggatgttctgacttcaaggcgtgctcttattgatatcacagaaagagtcatcacacggacaaaataggaaggtgttcggcgtccataagccaaaaccccaagttttgtgtatcattgctgaaatttaggattaagaaatggccctgcatttctgggaagcttctagaggttttggctgcatgtggcaacaaaatatatgtcaccgattgcaatggcaccagatatcgtgtagccatataagtgtgggagcattgtacccaatatacactcccgtaaagactaagatagtactaccataaaatatctgttaaccgttcctcttcaaa

SEQ ID NO: 199806 - DNA, 1648 bp, Zea Mays
gttccaacccacaaaccgagcggcggccgccgcctcccttttcgtctctgactttttctacaagctcattcttcctcccccgatctcgggagcagccgaagcatgtcctggcggtggactctcgcgcgccgcgtcgccacgctggccgcgatcggtggcggcggtgcccaggcgcagaggctcctgtccacctcgtcagccggcggtggcactggcctcctgggtcggcactacatacccctcgcctcccagattcggagcaaggtagttggttgcagaggagctgctcttgtgagctccagatggttgcatgaggcccaataccaggttcgccaggacggggcttccagggctcaggaacagcaagatccatttgaattagtcgccgatgagctatcacttcttgcaaataggttacgatccatggtggctgctgaggtccccaaactggcatcagcagctgagtactttttcaaggtgggagcagagggaaaaagattccgacctacggttttgttgctcatggcatcagctctgaaatttcctttgtcagagtcaacagaaggaagagttctcagtatattggcagataaactccgcacaaggcaacagaacattgctgagataactgaaatgattcatgtcgcaagccttctgcatgatgatgttcttgatgatgctgatactaggcgtggtgtcagttcattgaatctcatcatggggaacaagctttctgtgctggctggtgatttccttctgtctagagcatgtgtggcccttgcagcacttgggaacacagaggtggtttctctaatggcaactgctgtagaacatctagttactggtgaaactatgcagatctcaacaagcagagagcaacggcgaagcatggagtactacctgcagaagacatactacaaaacggcatcattgatatcaaatagttgcaaggctgttgctattcttgcagggcacacaactgaggtctcggtgcttgcatatgaatatggtcgaaacctgggtctagccttccagttaattgatgatgttcttgatttcaccggcacctctgcatcccttgggaagggttcattgtctgatattcgccacggaattattactgccccgatgctatatgcgatggaggaattcccacaactgcaagaagttgttgaccggggttttgataatcctgcaaatgttgaaattgcccttgactatctccagaagagccgtgggattgaaaagacaaaagagcttgcacgagaacatgctgatcgtgcagtcaaggctatagaatctctacctgatagcgacgacgaggatgttctgacttcaaggcgtgctcttattgatatcacagaaagagtcatcacacggacaaaataggaaggtgttcggcgtccataagccaaaaccccaagttttgtgtatcattgctgaaatttaggattaagaaatggccctgcatttctgggaagcttctagaggttttggctgcatgtggcaacaaaatatatgtcaccgattgcaatggcaccagatatcgtgtagccatataagtgtgggagcattgtacccaatatacactcccgtaaagactaagatagtactaccataaaatatctgttaaccgttcctcttcaaa

SEQ ID NO: 199807 - DNA, 1040 bp, Zea Mays
tcagtataaacattactttactactatacaaagcgcgacgtaaaagtacgacaccgttcgtccacgtcacctttaaaatttttagccgttcgatcagattttagcggccaagaatccctccgtgtatcaaatcctggaatagcctcgatggttccagacagcgaacgaacgggatgaggaaaaggacccaccagcctgctgtccattgctcctagaagcatcgcgtcgtggatcggctttctccgtgctccgcctcgtcggcctcatgccctgtagccccgactccccatctgccgcctccacctcatgggccgccgggtccaccctcgccgtccagcttggcaacatctttgaccgtggtggcgacgaactccgcctcctgcaccccctccgcctcctcgccccttccgctgaggcccgcgtcagcgcgttcctgccatagtcggcaaccaataggagcgtaaaactggagctagggattgaagctgttgcaggtacatgtcatatataaatggacatgggcaggcactcccgctgagggtgcttcttggcttcgtctgtagaggcttgctgatatttggcataggatattgttaatttgtggtcaaagccatccaagccgcaattacttcagggacagggtgttcactggggctagaaggattctgtttttattgcacgacacatgacaacatatccaagtagtccttgattgatttagcagcagggagtaagcgtcttgctaaaagtggctccacaggtgaacttaggttcaagaaggacacatgagtatccgagaaaaaactcccaagaaatcttcccaaaactgaatgttgccttctaccatcaacaacctttgaagttctagggtgtttatttttgaatgttctctacaattatgtgtgtatatatatatatatgcttcttcatccttttcaagacaatttttataaatataacaacttgatttcaaacgttgaaacacgataatttacctaactctatttagatgactatatgtatatcttactcaaaatgtt

SEQ ID NO: 199808 - DNA, 2606 bp, Zea Mays
ctcggctcatcagtattattattattattattattcggctcctgctcatcagctgcagcagtcgtgctccggaccggagaagtcgaaatggaggagaggctgttcgccacggagaagcacggtggccgggcgctctacaggctccacgccgtcacggtgttcctggggatatgcctgctgctctgctacagggcgacgcacgtcccggctgccggctccggcggcagggcggcgtggctggggatgctcgcggcggagctctggttcggcttctactgggtcatcacgcagtccgtgcgctggtgccccatccgccgccgcaccttccacgacaggctcgccgccaggttcggagagcggctcccctgcgtggacatcttcgtgtgcacagcggacccgcggtcggagccgccgagccttgtcgtggccacggtcctgtcggtgatggcgtacaactacccgcccgcgaagctcaacgtctacctctccgacgacggcggctccatcctcaccttctacgctctgtgggaggcctccgccttcgccaagcactggctcccgttctgcaggaggtacggcgtcgagccacggtcgccggccgcttacttcgcccagtctgatgagaagcctcgtcatgatccgccgcacgccttgcaggagtggacgtccgtcaaaaacctatacgatgaaatgacggagcggattgactccgctgctcggacgggcaatgttcctgaagaaactagagcgaaacacaaagggttttctgagtgggatacgggtattacctcaaaagaccaccacccgatcgttcagatgggaaagacaaggctgtagctgacaacgaaggcaatgtgctgccgacgctggtgtacgtggcacgagagaagaggcctcagtaccaccacaacttcaaagccggggcgatgaacgctctgatccgagtatcgtccgtgataagcaacagccctatcatcctgaacgtggactgcgacatgtattccaacaacagcgacacgatcagagacgcgctgtgcttcttcctcgacgaagaaacgggccacaggatcgcgttcgtgcagtaccctcagaactacaacaacctcaccaagaacaacatatacggcaactccctcaatgtcatcaaccaggtggagctgagcggcctggacgcttggggcggcccgctgtacatcggcacgggatgcttccataggagggagaccctgtgcggcaggaggttcaccgaggactacaaggaagactgggacagaggaaccaaggagcagcagcagcaccgccaccgcgtcgacggcgagaccgaagcgaaggccaagtcgctagcgacctgcgcctacgagcacgacgacgacacgcggtggggagacgaggtggggctcaagtacggctgctcggtggaggacgtcatcacggggctggcgatacactgcagagggtgggagtcggtgtacagcaaccccgcgagagcggcgttcgtcggcgtcgcgccgaccacgctcgcccagaccatactgcagcacaagcggtggagcgagggcaacttcggcatcttcgtttccaggtactgccccttcgtctttggacgacggggcaaaaccaggttgccgcaccagatgggctactccatctacgggctatgggcgcccaactcgctgcctacgctgtactacgctgtcgtcccttcgctgtgcctgctcaagggcacccctctgttccctgagctcacgagtccgtggatcgcgcctttcgtctacgtcgcggtcgccaagaacgtctacagcgcgtgggaggcgctgtggtgcggagacacgctgagagggtggtggaacgggcagaggatgtggctggtccggagaacgacctcgtacctctacggcttcgtcgacaccgtcagggactcgctggggctgtccaagatgggcttcgtggtgtcgtccaaggtgagcgacgaggacgaggccaagaggtacgagcaggagatgatggagttcgggacggcgtcgccggagtacgtgatcgtcgcggccgtcgcgctgctcaacctcgtgtgcctggcagggatggcggcggcactggatgtgttcttcgtccaggtcgctctctgcggggtgctggtgctcctcaacgtcccggtctatgaagccatgttcgtcaggaaggacagggggaggatgccgttcccgatcacgctagcctccgttggctttgtgacgctggccctcattgtgccattcttttgactttgaggtgctaataatacgtgtacgggcacacgcacgttcgcatgtatgacgattatgggcaacaggcgtgtaataccactaatacctattaaacactccagtctccaagtgatccattgctacacgtgtgttcctcctgttctctatatgcatgagctgctgatggtgatacgatactgtcagatactgcaataagacgccaaacaagataagcatcggcaatcgagtggatcctcacaaccacagtggacgctatgcaggtctttggaggcagttgctatgcacactttgattggcgcttcacaaatagactttcgttatgatggcgtcttttagtccctt

SEQ ID NO: 199809 - DNA, 2639 bp, Zea Mays
ctcggctcatcagtattattattattattattattcggctcctgctcatcagctgcagcagtcgtgctccggaccggagaagtcgaaatggaggagaggctgttcgccacggagaagcacggtggccgggcgctctacaggctccacgccgtcacggtgttcctggggatatgcctgctgctctgctacagggcgacgcacgtcccggctgccggctccggcggcagggcggcgtggctggggatgctcgcggcggagctctggttcggcttctactgggtcatcacgcagtccgtgcgctggtgccccatccgccgccgcaccttccacgacaggctcgccgccaggttcggagagcggctcccctgcgtggacatcttcgtgtgcacagcggacccgcggtcggagccgccgagccttgtcgtggccacggtcctgtcggtgatggcgtacaactacccgcccgcgaagctcaacgtctacctctccgacgacggcggctccatcctcaccttctacgctctgtgggaggcctccgccttcgccaagcactggctcccgttctgcaggaggtacggcgtcgagccacggtcgccggccgcttacttcgcccagtctgatgagaagcctcgtcatgatccgccgcacgccttgcaggagtggacgtccgtcaaaaacctatacgatgaaatgacggagcggattgactccgctgctcggacgggcaatgttcctgaagaaactagagcgaaacacaaagggttttctgagtgggatacgggtattacctcaaaagaccaccacccgatcgttcagattctgatagatgggaaagacaaggctgtagctgacaacgaaggcaatgtgctgccgacgctggtgtacgtggcacgagagaagaggcctcagtaccaccacaacttcaaagccggggcgatgaacgctctgatcgccgccaatttgaactgcagatccgagtatcgtccgtgataagcaacagccctatcatcctgaacgtggactgcgacatgtattccaacaacagcgacacgatcagagacgcgctgtgcttcttcctcgacgaagaaacgggccacaggatcgcgttcgtgcagtaccctcagaactacaacaacctcaccaagaacaacatatacggcaactccctcaatgtcatcaaccaggtggagctgagcggcctggacgcttggggcggcccgctgtacatcggcacgggatgcttccataggagggagaccctgtgcggcaggaggttcaccgaggactacaaggaagactgggacagaggaaccaaggagcagcagcagcaccgccaccgcgtcgacggcgagaccgaagcgaaggccaagtcgctagcgacctgcgcctacgagcacgacgacgacacgcggtggggagacgaggtggggctcaagtacggctgctcggtggaggacgtcatcacggggctggcgatacactgcagagggtgggagtcggtgtacagcaaccccgcgagagcggcgttcgtcggcgtcgcgccgaccacgctcgcccagaccatactgcagcacaagcggtggagcgagggcaacttcggcatcttcgtttccaggtactgccccttcgtctttggacgacggggcaaaaccaggttgccgcaccagatgggctactccatctacgggctatgggcgcccaactcgctgcctacgctgtactacgctgtcgtcccttcgctgtgcctgctcaagggcacccctctgttccctgagctcacgagtccgtggatcgcgcctttcgtctacgtcgcggtcgccaagaacgtctacagcgcgtgggaggcgctgtggtgcggagacacgctgagagggtggtggaacgggcagaggatgtggctggtccggagaacgacctcgtacctctacggcttcgtcgacaccgtcagggactcgctggggctgtccaagatgggcttcgtggtgtcgtccaaggtgagcgacgaggacgaggccaagaggtacgagcaggagatgatggagttcgggacggcgtcgccggagtacgtgatcgtcgcggccgtcgcgctgctcaacctcgtgtgcctggcagggatggcggcggcactggatgtgttcttcgtccaggtcgctctctgcggggtgctggtgctcctcaacgtcccggtctatgaagccatgttcgtcaggaaggacagggggaggatgccgttcccgatcacgctagcctccgttggctttgtgacgctggccctcattgtgccattcttttgactttgaggtgctaataatacgtgtacgggcacacgcacgttcgcatgtatgacgattatgggcaacaggcgtgtaataccactaatacctattaaacactccagtctccaagtgatccattgctacacgtgtgttcctcctgttctctatatgcatgagctgctgatggtgatacgatactgtcagatactgcaataagacgccaaacaagataagcatcggcaatcgagtggatcctcacaaccacagtggacgctatgcaggtctttggaggcagttgctatgcacactttgattggcgcttcacaaatagactttcgttatgatggcgtcttttagtccctt

SEQ ID NO: 199810 - DNA, 2285 bp, Zea Mays
cagttccgttccctcccaaaccctaactcccgaatcccctcgctctcctctaatggccgccgatgccgacgcagccgaggtggagcggctttacgagctcggcgagcgcctctcttccgccaaggacaagtccgagcttgcggcggactacgaggcgattattgcagcagtgaaggggcagagtgtcaaggcgaagcagctcgcagcgcagctcatcccgaggttcttccggagcttccctgcactcgccacccgcgccatgtcggccatgttcgacctcgttgatatggaggagctcgcgatcagaatacaagctattcggggttttccacttcttggtaaagatactgaatttgtgtcaaaaattgcagatgttttgggacaactccttacaagcgaggaaaatgtggaacgtgatgctgttcataaagcactcatgtcccttatacgagaagatgttaaaaattctttacaacctttatttaagcatgtggagcaaggatcagagattcgtgagaagattatttgttttcttcgagacaaggtttttcctcttaaagcagagctactgaaacctcaagcagaaatggagagatttataacggatttgagtgtgcaagatgtaactggttcagaatttgaactattcatggggtttctgcgaagcttgagcatatttggggattctgctcctagagagtcctttcaagaactaattgaaattattcaagcacaggctgatctcaactcacaattcaatgtttcggacattgaccacattgaaaggtggatttcatgcatgtatatggctcttcctatcttcatgagaggagcatcagcaagcaagttcctcaattacttcgttaagcaaattgttccagcattcgagaagattcctgaagaaaagaaactggatttgctcaagactattgcttcaagttcaccgtacgcgacagctcaagattcacgtcagctgcttccatctgttgttcagttactcaacaaatatatgcctgggaagaaggtggacgatatcaaccataattatgttgaatgcttgctgtacacttatcatcatttggctcataagactccaaacacaacgaacagtctatgtggttacaagattgttactgggcaaccatcggatagacttggagaggacttcacagagcattacaaagattttacagagaggttaactggaacagaagagacggtaagagcagcctcaaagcgactaactcagggaatggcagatttcagcaaggcaatatcttcagcaaaaaccgaagaggaaaaaactaaaattaaaggcgatcaacaaacttcaacaaggacaatgaggtcatataacaatatattggcaatggcacagccattgcattcaaaatcccctttatttatcggtgataagaaaatcgctctatcatggatggagcatcccaagaaaccaacagctacgacagcaggggggaagaggtcacaacctgctactacaaatgggaatggccctgcaaacaagaaagggagaggaggaatgcacaaccagcttgtgaacagagcttttgaaggactgtctcgtggtggtagaggcactggaagggggcgtggcaggggtggccgaggacgaagagggtggggtggctaccgctgagatgacctggaaactctgttcaaacctgacatgggatgagctttctgcttccacttgagagtaaatgcaaaggtcgatatttatttgtgtgcctcagcgcaacaagtttaaattggaaggcacacaacagcagaatgcgtacagaaagagtaaaaaagaatgcttgagaaatgtccgcaagatctgtgcatctttcctattcatttgccatcaagccgtgttctttgccaccctccgtcgcttcacctgagttggctgtttgatgaaatgttggcaagatctgtgcatcatctttcatattcacttaccatctcaccgtgttctttgaaccctaacagtcgtttcacctgtgttggctgttagaactcaacagtaagatatcgttcatttattttatttgattttaccagtgtttgaagaggcgaccgagcttttgtgttggacttcgtttaagttcgttttatgatccgttttaccggcacagaggtatagtgatgtttaaattttatagtaaggattgatctattttaggatccgatttacctgctgtacaacccacataaaaatgataaatgacctgtattttaaggggtattaagtgtttaagggtatcaaaggggtaagtgtt

SEQ ID NO: 199811 - DNA, 1616 bp, Zea Mays
tggctgccgagatcaatgggggcatcctcaccgtcggcaggcccaggcagcactgagttgcgctctgctgcggccgctacttccagatggatggatttgatcaaacagtgaatgtgaaggttgtaatggcaactaatagggcagatactctagatcctgctttgctgtggccaggtagacttgacacgaaagttgagttcccttgtcctgattggcggcaaaagaggcttgtgttccaagtctatactgctaagatggatttgagtgacgaggttgatttggaagattatgtttgcagaccggataagatcagtgctgctgatgttgagttggtttcatggcacataccaagatttttatgcatttgttgttttctaactactgtattgctagggtacttatgtcctgtgctggccaaagctctcaaaaccatgaaaaggcaaagaaggtgctccttatagtaaagccacattatggatttggtgagaagggtagaccaacagttggagaggaaggtgttgtgatgagcatcatcttgttctacatcatcactaatgaactggttgaacttttggttgctttggtagagacaagatatctgaatgctagcattcgggagcttggtgatcattttcagacaaaacgtgatggtgaaaatggtgttgatgcatcaattgaaaagagaacacctaagctacttcagtttacttttcaagagttgaaatctgccacgcttaacttcaggccaggcaatattcttggggagggtgggttcggttatgtattcaatgggtggattgagccaaacagcactgctcctgcaaaacctggcacaggggttactgtggcagtaaaaagtttgaagccagatgcgcttcaaggtcatagagaatgggtgaagttgactttctgggacagttgcatcataaacaccttgttaagttgattggatattgtattgaggatgatcaaaggttacttgtatatgaattcatggcacggggaagtcttgaaaatcatcttttcagaagggctcttcccctaccttggtccaacaggatgaagattgttctaggtgccgcgaaaggagtagccttcctccatggaggtcccaaacctgttatttacagggattttaagacatcgaatgttcttcttgatgtggagtacaacgcaaaactatccgatttcagtttagcaaaagctggtcctcagggtgataaaactcatgtatatactcgggttgttggcacctatggttatgctgcaccagagtatgtaatgacagatgcgttttttttgggaccaagccctatgggcaacaatggagatgaccagcgtcttggtttatcaagaggaagttaatccctctcaactgaaactcccatcaaatttggggcatagtgtgtcgattcaattgtaactattatatgtcattttgggttagcaaactgtatctactaatttctcagccttaagccttttgagctagaaacttgtgtaaggatttgttgcactaagtgacatgctgatatttgaactatttaggctgccaaatctgaattttttaactatcaagtatctcaacatttctctcattctaacactcccctttt

SEQ ID NO: 199812 - DNA, 2918 bp, Zea Mays
cgttctgccgcgcgcagcccgcatcccgcccgcggccggacctcgccccgcatcccgccgccctcccgcgctccttccatcctccgccctcatcctgccgccctctccttccattttgagctttgacggcgcggatccccaacgctcgcttccatcctcgtggatccccacccacgaatcccgcgctcccttccatcctcgtggcttccttcaacagcgcggatcccccaccctcgaatcccattgccgcaatggaaggtcgtctgtaccacgccgtggatccgccacccagtaccgcgccgtggatggcagacctcccaaccctaccgtctgcggattccgatgaaggcgcgaacccgtgacatggttgtatctctgctcgccgctcgatactccggttccggtaaaacctagcagccgccacttcgtcggactcggacctcagtgacacgcgcagcgtggcgccggcgttgcgcatccggatccggccagcagccagccacgcagtgtcgcggtcgtcggtcgtcgacgcaacttctcaggcgccgatgcagcacccggcagctggctgctcgtcttgggtatgtggcctcgacccccaactaacctgattcaatgggtgctcgatctggcgctgcagtccaacggcaagcctggcggcatcttcgacaccgccgaggagcgctcccaggagggaggtcaagaatcctaagaagccgctgtcgcgcgtggcctcgcggggcgtgcttccggccgacggtgacggcagcggctcgaccaagggcagctacgttcatgatgcagtagagacaagatatctgaatgctagcattcgggagcttggtgatcattttcagacaaaacgtgatggtgaaaatggtgttgatgcatcaattgaaaagagaacacctaagctacttcagtttacttttcaagagttgaaatctgccacgcttaacttcaggccaggcaatattcttggggagggtgggttcggttatgtattcaatgggtggattgagccaaacagcactgctcctgcaaaacctggcacaggggttactgtggcagtaaaaagtttgaagccagatgcgcttcaaggtcatagagaatgggtgaagttgactttctgggacagttgcatcataaacaccttgttaagttgattggatattgtattgaggatgatcaaaggttacttgtatatgaattcatggcacggggaagtcttgaaaatcatcttttcagaagtaagcaatcacctaacagagttaatgctttaagttaagtagatttagtgcctttattactaatttgtttccccacttaggcctaaccagtttttttcttcactaagtcttctttcatttttccgagcaaccttggattttttttgttctctatcctctgtgacatcagagataagtacattctaacttgatttgattatggtaatgtagacatgaacattttagcctgcccttattaagtttgatttgtgccagttacacctgttcagatcttcttagttaaatactagatgcatttcgcacacacaaaaaagttgcaatagtactgtagtgagcaaggatgcatgcctactaccaatggtggtgttcattctattgctaacttttatattggtattaggtcatacccatgtaaccattattatttggaacaattggatttataccattaaaagatccaaactttagatatataccatggaccccatatgtcattgactcatgtggacccacatgtaagtgagatagtaatggtatggatctaaaatgatgatcttttaatggtatggatccaaatttcccttattattttgaagggggtagggacattgccagcttttcacaaaagttgattttatttttatgtgcctaatcttgtcaaccataatctttctatctgctcgttcttatgatcctgtcatcttactttgtttaatcttgaaggggctcttcccctaccttggtccaacaggatgaagattgttctaggtgccgcgaaaggagtagccttcctccatggaggtcccaaacctgttatttacagggattttaagacatcgaatgttcttcttgatgtggagtacaacgcaaaactatccgatttcagtttagcaaaagctggtcctcagggtgataaaactcatgtatatactcgggttgttggcacctatggttatgctgcaccagagtatgtaatgacaggtatcagggataaactgaaggacttcagtagctacctgtagcagaaattctatagcttgcttatctgttgcatgttggttctttacactgtttttctgagcttgtagttattcttgtgttcactccatattggatagtaaattggcttaacatttttgtccgaagacataaaactagggtgccattacaaatgttcttctttcaagtgaaactgtgtttttcgtttttacatgcagtaaaggctgtaaggttgtagacttatataatgaatcttctgctccacttctttgggacacgttttaacatttcttaacatttaactctgtaacgctttctgacacttttcatatgttttttagatgcgttttttttgggaccaagccctatgggcaacaatggagatgaccagcgtcttggtttatcaagaggaagttaatccctctcaactgaaactcccatcaaatttggggcatagtgtgtcgattcaattgtaactattatatgtcattttgggttagcaaactgtatctactaatttctcagccttaagccttttgagctagaaacttgtgtaaggatttgttgcactaagtgacatgctgatatttgaactatttaggctgccaaatctgaattttttaactatcaagtatctcaacatttctctcattctaacactcccctttt

SEQ ID NO: 199813 - DNA, 2195 bp, Zea Mays
cgttctgccgcgcgcagcccgcatcccgcccgcggccggacctcgccccgcatcccgccgccctcccgcgctccttccatcctccgccctcatcctgccgccctctccttccattttgagctttgacggcgcggatccccaacgctcgcttccatcctcgtggatccccacccacgaatcccgcgctcccttccatcctcgtggcttccttcaacagcgcggatcccccaccctcgaatcccattgccgcaatggaaggtcgtctgtaccacgccgtggatccgccacccagtaccgcgccgtggatggcagacctcccaaccctaccgtctgcggattccgatgaaggcgcgaacccgtgacatggttgtatctctgctcgccgctcgatactccggttccggtaaaacctagcagccgccacttcgtcggactcggacctcagtgacacgcgcagcgtggcgccggcgttgcgcatccggatccggccagcagccagccacgcagtgtcgcggtcgtcggtcgtcgacgcaacttctcaggcgccgatgcagcacccggcagctggctgctcgtcttgggtatgtggcctcgacccccaactaacctgattcaatgggtgctcgatctggcgctgcagtccaacggcaagcctggcggcatcttcgacaccgccgaggagcgctcccaggagggaggtcaagaatcctaagaagccgctgtcgcgcgtggcctcgcggggcgtgcttccggccgacggtgacggcagcggctcgaccaagggcagctacgttcatgatgcagtagagacaagatatctgaatgctagcattcgggagcttggtgatcattttcagacaaaacgtgatggtgaaaatggtgttgatgcatcaattgaaaagagaacacctaagctacttcagtttacttttcaagagttgaaatctgccacgcttaacttcaggccaggcaatattcttggggagggtgggttcggttatgtattcaatgggtggattgagccaaacagcactgctcctgcaaaacctggcacaggggttactgtggcagtaaaaagtttgaagccagatgcgcttcaaggtcatagagaatgggtgaagttgactttctgggacagttgcatcataaacaccttgttaagttgattggatattgtattgaggatgatcaaaggttacttgtatatgaattcatggcacggggaagtcttgaaaatcatcttttcagaagggctcttcccctaccttggtccaacaggatgaagattgttctaggtgccgcgaaaggagtagccttcctccatggaggtcccaaacctgttatttacagggattttaagacatcgaatgttcttcttgatgtggagtacaacgcaaaactatccgatttcagtttagcaaaagctggtcctcagggtgataaaactcatgtatatactcgggttgttggcacctatggttatgctgcaccagagtatgtaatgacaggtatcagggataaactgaaggacttcagtagctacctgtagcagaaattctatagcttgcttatctgttgcatgttggttctttacactgtttttctgagcttgtagttattcttgtgttcactccatattggatagtaaattggcttaacatttttgtccgaagacataaaactagggtgccattacaaatgttcttctttcaagtgaaactgtgtttttcgtttttacatgcagtaaaggctgtaaggttgtagacttatataatgaatcttctgctccacttctttgggacacgttttaacatttcttaacatttaactctgtaacgctttctgacacttttcatatgttttttagatgcgttttttttgggaccaagccctatgggcaacaatggagatgaccagcgtcttggtttatcaagaggaagttaatccctctcaactgaaactcccatcaaatttggggcatagtgtgtcgattcaattgtaactattatatgtcattttgggttagcaaactgtatctactaatttctcagccttaagccttttgagctagaaacttgtgtaaggatttgttgcactaagtgacatgctgatatttgaactatttaggctgccaaatctgaattttttaactatcaagtatctcaacatttctctcattctaacactcccctttt

SEQ ID NO: 199814 - DNA, 2559 bp, Zea Mays
cgttctgccgcgcgcagcccgcatcccgcccgcggccggacctcgccccgcatcccgccgccctcccgcgctccttccatcctccgccctcatcctgccgccctctccttccattttgagctttgacggcgcggatccccaacgctcgcttccatcctcgtggatccccacccacgaatcccgcgctcccttccatcctcgtggcttccttcaacagcgcggatcccccaccctcgaatcccattgccgcaatggaaggtcgtctgtaccacgccgtggatccgccacccagtaccgcgccgtggatggcagacctcccaaccctaccgtctgcggattccgatgaaggcgcgaacccgtgacatggttgtatctctgctcgccgctcgatactccggttccggtaaaacctagcagccgccacttcgtcggactcggacctcagtgacacgcgcagcgtggcgccggcgttgcgcatccggatccggccagcagccagccacgcagtgtcgcggtcgtcggtcgtcgacgcaacttctcaggcgccgatgcagcacccggcagctggctgctcgtcttgggtatgtggcctcgacccccaactaacctgattcaatgggtgctcgatctggcgctgcagtccaacggcaagcctggcggcatcttcgacaccgccgaggagcgctcccaggagggaggtcaagaatcctaagaagccgctgtcgcgcgtggcctcgcggggcgtgcttccggccgacggtgacggcagcggctcgaccaagggcagctacgttcatgatgcagtagagacaagatatctgaatgctagcattcgggagcttggtgatcattttcagacaaaacgtgatggtgaaaatggtgttgatgcatcaattgaaaagagaacacctaagctacttcagtttacttttcaagagttgaaatctgccacgcttaacttcaggccaggcaatattcttggggagggtgggttcggttatgtattcaatgggtggattgagccaaacagcactgctcctgcaaaacctggcacaggggttactgtggcagtaaaaagtttgaagccagatgcgcttcaaggtcatagagaatgggtgaagttgactttctgggacagttgcatcataaacaccttgttaagttgattggatattgtattgaggatgatcaaaggttacttgtatatgaattcatggcacggggaagtcttgaaaatcatcttttcagaagtaagcaatcacctaacagagttaatgctttaagttaagtagatttagtgcctttattactaatttgtttccccacttaggcctaaccagtttttttcttcactaagtcttctttcatttttccgagcaaccttggattttttttgttctctatcctctgtgacatcagagataagtacattctaacttgatttgattatggtaatgtagacatgaacattttagcctgcccttattaagtttgatttgtgccagttacacctgttcagatcttcttagttaaatactagatgcatttcgcacacacaaaaaagttgcaatagtactgtagtgagcaaggatgcatgcctactaccaatggtggtgttcattctattgctaacttttatattggtattaggtcatacccatgtaaccattattatttggaacaattggatttataccattaaaagatccaaactttagatatataccatggaccccatatgtcattgactcatgtggacccacatgtaagtgagatagtaatggtatggatctaaaatgatgatcttttaatggtatggatccaaatttcccttattattttgaagggggtagggacattgccagcttttcacaaaagttgattttatttttatgtgcctaatcttgtcaaccataatctttctatctgctcgttcttatgatcctgtcatcttactttgtttaatcttgaaggggctcttcccctaccttggtccaacaggatgaagattgttctaggtgccgcgaaaggagtagccttcctccatggaggtcccaaacctgttatttacagggattttaagacatcgaatgttcttcttgatgtggagtacaacgcaaaactatccgatttcagtttagcaaaagctggtcctcagggtgataaaactcatgtatatactcgggttgttggcacctatggttatgctgcaccagagtatgtaatgacagatgcgttttttttgggaccaagccctatgggcaacaatggagatgaccagcgtcttggtttatcaagaggaagttaatccctctcaactgaaactcccatcaaatttggggcatagtgtgtcgattcaattgtaactattatatgtcattttgggttagcaaactgtatctactaatttctcagccttaagccttttgagctagaaacttgtgtaaggatttgttgcactaagtgacatgctgatatttgaactatttaggctgccaaatctgaattttttaactatcaagtatctcaacatttctctcattctaacactcccctttt

SEQ ID NO: 199815 - DNA, 2371 bp, Zea Mays
cacaaatcctcaagcaccccaaaacggcaaaacccatcaggtccccgccacacctcgatactctaacttcggccgccgccgccgccgccgccgccgcgaatgccggagccccaggccatcctcccgctgcgcgctctcccgccggacgcgccgctgcccttccccgtccccgcgccgttccacccccaagcccccggccccggtgggaccgccccggccacgcccccgaacccgacccctccgcaaccgttaacccccgccgcgccgccttcctcctcttcgacgcggccgccgcacccatgggagatctccgcgcgagcatggctagagtccttccccgacggacggccgcccaccgagcccgaggtcgacgcctacatcgacgtgcaccgccccgagctcccttccctcccccgctcccagctacaccagcgcctcctcgccctccgcggcgaccaggttctggatgcagaccagagcgcattcccgtacaggttccagcgtactgatctatggaagcctgtgtaccagtggttggaatctcttgagctggactcactagttgctacacagcagatatcagactggcttacatcgaacccaaagataatggacagaatggttgagaaacattcaaaataccatttgattcactacacccagaggatgcacttgaagatgctaaaaaagaagggaaagttgccaaagactctgcaactttctgcggctagagccacagttcgaccaattgctgctccgttcactccagaagaaaacattgtgccgttacagaaaactataactccagtgacaggtagacttcccagtgccagttcagggagacaacagagcggtaccacaggcagattttccagtgccagttcagggagacaacagagctgtaccccaggcagatttcaaggtggaaatgcaactcttagggacaagaagacgtcattgtccaaaaagaaagaagctttgctcaaatacgaacttttgacagacttacagaaccaattgactgctgtgctgttaaagcaatgccgtactgttgccattaaagaaacagattcatcatatgtggaatctccaaatccagagactaacatgagtatacaagggaccactactgcaaatgcttcagccccttcagaggcaaagaatgtgtttatcaatgaacagtcagttccagcaggagccacagaaagtgaacctgggcataagaggaagagaaaccctatcatcgttacacctgcatggtgttatagtgaagcatcagcaggaaccttgcagaatgaaataaatcctagctcaaatagtgatgtttcaagaaatttcaatatttggagaggacatgctaatccactagtttcacatagagatactaagaaaaatatattattctgtcttgagggacgcgaaactggtgtcagctgctctcaagctgcttcttatggaggttatgctggacgaaattgtgaaagatggactccatttcttgaaggatggaattcacctgcattccagtttgaagggcctgctgtacatgttgttagaaaaagttacctatcttggtgtccaacatcatgtgcttatacgtcaagtgcaccttctgctcagcctcatggcaggcaaggtatccgcaaagttcttgatgtaaaatttcatccagaagggttgcctcagcttgtttctagctctaatgaggcacccaatgaattactgctattcaatctgctttctggaagggcaattcagcttagaggccacaatactaagatccagtctatcgcctttgcagtcaaaggagcaagtgtagtgtcttgtgcttctaatttattaaaggtatgggactgcattactgggtcttgcctctatacgctgggtggcgatgatcaaaattcagtggggcatactcagaaaataaatgctatggcagtgaataaatggcaatcctgtcttgttgtcaccagtggagcaaaaggtgatgggaagcttctactatggaatgctttaagaggtgaacttgcttctgatctaaattcgaacttgaggtctcaggatatgatctatccctcagttgatacaatggagttctatagtgagaatcatctggcatgtggaagtgattgtgactatggtggctcagctgtggtacaattatgggatattgattctccagagtcttatttatctttctctgcaagtgactcttacattacttcccttaaagtcaaccctgctggcaacactctcattactggttctggcgatgggactattggcttatttgacatccgtacttgttctgcaattagccacttgtcagtgggatctagttgtgaggttacatctgtttcatttagcaaaa

SEQ ID NO: 199816 - DNA, 2353 bp, Zea Mays
ccgcagcacaaatcctcaagcaccccaaaacggcaaaacccatcaggtccccgccacacctcgatactctaacttcggccgccgccgccgccgccgccgccgcgaatgccggagccccaggccatcctcccgctgcgcgctctcccgccggacgcgccgctgcccttccccgtccccgcgccgttccacccccaagcccccggccccggtgggaccgccccggccacgcccccgaacccgacccctccgcaaccgttaacccccgccgcgccgccttcctcctcttcgacgcggccgccgcacccatgggagatctccgcgcgagcatggctagagtccttccccgacggacggccgcccaccgagcccgaggtcgacgcctacatcgacgtgcaccgccccgagctcccttccctcccccgctcccagctacaccagcgcctcctcgccctccgcggcgaccaggttctggatgcagaccagagcgcattcccgtacaggttccagcgtactgatctatggaagcctgtgtaccagtggttggaatctcttgagctggactcactagttgctacacagcagatatcagactggcttacatcgaacccaaagataatggacagaatggttgagaaacattcaaaataccatttgattcactacacccagaggatgcacttgaagatgctaaaaaagaagggaaagttgccaaagactctgcaactttctgcggctagagccacagttcgaccaattgctgctccgttcactccagaagaaaacattgtgccgttacagaaaactataactccagtgacagggagacaacagagcggtaccacaggcagattttccagtgccagttcagggagacaacagagctgtaccccaggcagatttcaaggtggaaatgcaactcttagggacaagaagacgtcattgtccaaaaagaaagaagctttgctcaaatacgaacttttgacagacttacagaaccaattgactgctgtgctgttaaagcaatgccgtactgttgccattaaagaaacagattcatcatatgtggaatctccaaatccagagactaacatgagtatacaagggaccactactgcaaatgcttcagccccttcagaggcaaagaatgtgtttatcaatgaacagtcagttccagcaggagccacagaaagtgaacctgggcataagaggaagagaaaccctatcatcgttacacctgcatggtgttatagtgaagcatcagcaggaaccttgcagaatgaaataaatcctagctcaaatagtgatgtttcaagaaatttcaatatttggagaggacatgctaatccactagtttcacatagagatactaagaaaaatatattattctgtcttgagggacgcgaaactggtgtcagctgctctcaagctgcttcttatggaggttatgctggacgaaattgtgaaagatggactccatttcttgaaggatggaattcacctgcattccagtttgaagggcctgctgtacatgttgttagaaaaagttacctatcttggtgtccaacatcatgtgcttatacgtcaagtgcaccttctgctcagcctcatggcaggcaaggtatccgcaaagttcttgatgtaaaatttcatccagaagggttgcctcagcttgtttctagctctaatgaggcacccaatgaattactgctattcaatctgctttctggaagggcaattcagcttagaggccacaatactaagatccagtctatcgcctttgcagtcaaaggagcaagtgtagtgtcttgtgcttctaatttattaaaggtatgggactgcattactgggtcttgcctctatacgctgggtggcgatgatcaaaattcagtggggcatactcagaaaataaatgctatggcagtgaataaatggcaatcctgtcttgttgtcaccagtggagcaaaaggtgatgggaagcttctactatggaatgctttaagaggtgaacttgcttctgatctaaattcgaacttgaggtctcaggatatgatctatccctcagttgatacaatggagttctatagtgagaatcatctggcatgtggaagtgattgtgactatggtggctcagctgtggtacaattatgggatattgattctccagagtcttatttatctttctctgcaagtgactcttacattacttcccttaaagtcaaccctgctggcaacactctcattactggttctggcgatgggactattggcttatttgacatccgtacttgttctgcaattagccacttgtcagtgggatctagttgtgaggttacatctgtttcatttagcaaaa

SEQ ID NO: 199817 - DNA, 1775 bp, Zea Mays
cggagcgcgcgcatcgctcggcgactcggcgtaccgctccacgccttcaccctcgtggcttcccttctccctcgtggcctcccttctctctctccctcggactctcttttctggcggccacacgtcagggcgagcggcgccgcccgtggccagctaggccttcgtcggagcgcctcgtcggcgacgagcatccaccccagccatgtcccacgccggggcctccatcggcggcggcggcggcgctgctcgcggccgcagccgcagcctcgggagcagcagcagagccggcaatggcaacggcgccggggcgttcgtgagggcgggggccgacggcaacgagatgtacgtgcgggcggacaagatcgacctcaagaccctggacgtgcagctggagaagacgcggtcgcaggtgtggctggaccaccagcggtcggcggcgtcgccgcggccggagacgccgctgctcgggtgggagatcgacctcctcggcaagctcgacatccagaaccagatcgcgcatggcaccttcggcgtcgtgtaccgcggcacctacgacggccacgacgtcgcagtgaaggttctggactgggggcatgatgggcaggacacggcggcgaagcaccgcgaggccttcgagaaggaggtcgccgtctggcagaagcttgaccaccccaacgtcactaagttcgtgggcgcgtcgatggggacgtcccagctgaagatccccaggaagcaggggtcgacgtcgacctcctcctcctcctcctcttgcggcggtcgcactgcgccgaacgagtgctgcgtcgtcgtggtagagttccagcacggcggcacgctgaagacgctgctgtacaaccaccgggacaagaagctttcctacaggaaggtcgtccggctcgcgctagatctcgccagagggctgaactacctgcactcgaagaagatcatgcaccgcgacgtgaaggcggagaacatgctgctggaccgtaagcggacgctgaagatcgccgacttcggcgtggcgcgcgtggaggcgcagagctgcgaggtgacggggcagacgggcacgctgggctacatggcgccggaggtgctgcaggggaagccgtacgaccacaagtgcgacgtgtacagcttcggcatcctgctgtgggagacctactgctgcgccatggcctaccccaactacagcctcgccgacatctcctaccacgtcgtcaagctgggcatccggccggacattccgaggtgctgccctcggccgatggcggacatcatgacgcggtgctgggacgggaacccagacaatcggccggagatgtcggaggtggtggcgctgctggagaagatcgacaccggcagcggcaagggcggcatgacgcccgtcgacgacgtctcgcaggggtgcacctgcttcggcttcaaccgcagcgtcgcctagcggcctagcctagctctctagctcgtcagctcagacatcagttaagttaataataagctacacctaagtatgcatggccggccatgcatgcctcaactcgtttggccggcgggcatcgatcgatcgtcttatctgcattacaatgtcatccccgtcattgtgcggatgtgcttggggacttgcgtaacctgtaatttgtcatgtgttttgtgtggtctgacatggaatctgtgttggcatcacaatgatgatcttcaaggctgcctctgcaattttaatcggtttggacatttctcgattagacgctaaaatgttagaaaacgtcgatctacca

SEQ ID NO: 199818 - DNA, 1248 bp, Zea Mays
gctttgttgttgttgttggttgtctacttgttagtatcaaccattaaaatacatataaaagaaaatttactaggcaggatagtaaaatttcagacagaacgctggatagtaccttggactggacaaaccattgctcaggtgatgattttatggatcgccacattttggtttgtgggttcctggatagtgccattgttggctcatgctgctgggtttagcaaggaaacattgacgcacagaggccaggcactatacagtctcttgacagacataacagagggccttgccgggatcgcaatccttcaccaatgccttggtagattccgaccccttcctccagggtggttcgagttcaatctgaagggcaaatggcacttggacgtagcatttgggtgcctgctattcccactagttaatctactctcacacataaacatcagcctagttccagcgtcaccaggtccagctgttggggtttccagcgtagaacagtccatcgtggcccgggatccagtggcaatggctttgtatgctgtggtagtcacggtatgcgcgcctatatgggaagaaatcgtgttccgaggattccttctcccgtctctaacacggtacatgccactcccatggtcgatcctagcgagcgccgctgcgttcgcgctcgctcacttcaacgcacagagggtgatgccgctagtgtttcttggagtggtgatgggaggagtctttgcaaggtcgcgcaacctgctggcgtcgatggtgctgcacagcttgtggaatggatttgtgttcttggatttgatgaagtgagcagctgagctggagttattgtttcggttccaaccttggacatatctgcttgagcctcgtctgaaaatgttttggacaagattggttctattcttttttcaggattaaaagcaaggcatctaatgcagcggcggaacagaaggagtcgtgtaagtctgaagcgaagagggaacagttagtgcaggaaaatagaccacagaacagaagaaatgtttatttttttcagaattttgtgtagaatgatcagtcactgcagtcttaggacctgtgcccagcttccataagcatctgccacatttttgtaaattgcataggcgggagaatatttgtctcgtcgtgtatagaatcccccccccccttggaaaggagatatatatggtttcctgccattcaatgccatgctttaggggtggatattttaaaaccgaaaatcgaacccga

SEQ ID NO: 199819 - DNA, 2053 bp, Zea Mays
aacgactaagttttattgggttcaaaccagcccactaaccctcacgctgggcttcatcatccaccgtggcctgctagtggtggttgagtcctccgctaccgtgacagcctgcgagttcgccgtccgcccgtccgcgtcctgccgacctcatccacgccggcgccgcgcccgcctccgcgcccgcctccgcggaccgcatattcgttgtgacgccatcagctgcgccgcgcgtccttaggcctgcctcagccgcgtcgccgcgcccgcctcaggttgcccagcccccacgcgcgctgcgcctgcctcagtccccacgcgcgcccgccggcggccggcctcacgcctcagccctcaggcgctcaggctcagcagcgcctgcgccacgtgccgatgcgcgccctcctggccgccgcctccctgcttcgtggtgcctgcagcctgcctgtctggtgctagccgcgtcgccagagggatcaagaggcctggcctggagccgtcagcgtggtggcgcctcctccaccccacagcacccatgtcctccgcctcgtgcctcgtccatcccgctccaaggttccgggttcggctactgcctctcccctcctccgtcgccgcgaggccgttgcttggcttcaggcctcggtgtggggctccagcgaagggatgggcattgtggcacgtctcatgcttcagaaatggtcaggatgggccaacaacatctgacgaaggtgatgacttcaagtatgttgcccaatcacagagctctggtggtgcagaggtgaaaaaggaagaggtgagtagcttaaacggggatcaggagcagaatttgaaggatggcgattggttcctgcaactgcagaagataaaagaaaatttactaggcaggatagtaaaatttcagacagaacgctggatagtaccttggactggacaaaccattgctcaggtgatgattttatggatcgccacattttggtttgtgggttcctggatagtgccattgttggctcatgctgctgggtttagcaaggaaacattgacgcacagaggccaggcactatacagtctcttgacagacataacagagggccttgccgggatcgcaatccttcaccaatgccttggtagattccgaccccttcctccagggtggttcgagttcaatctgaagggcaaatggcacttggacgtagcatttgggtgcctgctattcccactagttaatctactctcacacataaacatcagcctagttccagcgtcaccaggtccagctgttggggtttccagcgtagaacagtccatcgtggcccgggatccagtggcaatggctttgtatgctgtggtagtcacggtatgcgcgcctatatgggaagaaatcgtgttccgaggattccttctcccgtctctaacacggtacatgccactcccatggtcgatcctagcgagcgccgctgcgttcgcgctcgctcacttcaacgcacagagggtgatgccgctagtgtttcttggagtggtgatgggaggagtctttgcaaggtcgcgcaacctgctggcgtcgatggtgctgcacagcttgtggaatggatttgtgttcttggatttgatgaagtgagcagctgagctggagttattgtttcggttccaaccttggacatatctgcttgagcctcgtctgaaaatgttttggacaagattggttctattcttttttcaggattaaaagcaaggcatctaatgcagcggcggaacagaaggagtcgtgtaagtctgaagcgaagagggaacagttagtgcaggaaaatagaccacagaacagaagaaatgtttatttttttcagaattttgtgtagaatgatcagtcactgcagtcttaggacctgtgcccagcttccataagcatctgccacatttttgtaaattgcataggcgggagaatatttgtctcgtcgtgtatagaatcccccccccccttggaaaggagatatatatggtttcctgccattcaatgccatgctttaggggtggatattttaaaaccgaaaatcgaacccga

SEQ ID NO: 199820 - DNA, 2126 bp, Zea Mays
tacgccaaacaataaagaaaacgactaagttttattgggttcaaaccagcccactaaccctcacgctgggcttcatcatccaccgtggcctgctagtggtggttgagtcctccgctaccgtgacagcctgcgagttcgccgtccgcccgtccgcgtcctgccgacctcatccacgccggcgccgcgcccgcctccgcgcccgcctccgcggaccgcatattcgttgtgacgccatcagctgcgccgcgcgtccttaggcctgcctcagccgcgtcgccgcgcccgcctcaggttgcccagcccccacgcgcgctgcgcctgcctcagtccccacgcgcgcccgccggcggccggcctcacgcctcagccctcaggcgctcaggctcagcagcgcctgcgccacgtgccgatgcgcgccctcctggccgccgcctccctgcttcgtggtgcctgcagcctgcctgtctggtgctagaccctcttttgatctgttcctggatctgccactgctccacggcattgtgcgaagccgcgtcgccagagggatcaagaggcctggcctggagccgtcagcgtggtggcgcctcctccaccccacagcacccatgtcctccgcctcgtgcctcgtccatcccgctccaaggttccgggttcggctactgcctctcccctcctccgtcgccgcgaggccgttgcttggcttcaggcctcggtgtggggctccagcgaagggatgggcattgtggcacgtctcatgcttcagaaatggtcaggatgggccaacaacatctgacgaaggtgatgacttcaagtatgttgcccaatcacagagctctggtggtgcagaggtgaaaaaggaagaggtgagtagcttaaacggggatcaggagcagaatttgaaggatggcgattggttcctgcaactgcagaagataaaagaaaatttactaggcaggatagtaaaatttcagacagaacgctggatagtaccttggactggacaaaccattgctcaggtgatgattttatggatcgccacattttggtttgtgggttcctggatagtgccattgttggctcatgctgctgggtttagcaaggaaacattgacgcacagaggccaggcactatacagtctcttgacagacataacagagggccttgccgggatcgcaatccttcaccaatgccttggtagattccgaccccttcctccagggtggttcgagttcaatctgaagggcaaatggcacttggacgtagcatttgggtgcctgctattcccactagttaatctactctcacacataaacatcagcctagttccagcgtcaccaggtccagctgttggggtttccagcgtagaacagtccatcgtggcccgggatccagtggcaatggctttgtatgctgtggtagtcacggtatgcgcgcctatatgggaagaaatcgtgttccgaggattccttctcccgtctctaacacggtacatgccactcccatggtcgatcctagcgagcgccgctgcgttcgcgctcgctcacttcaacgcacagagggtgatgccgctagtgtttcttggagtggtgatgggaggagtctttgcaaggtcgcgcaacctgctggcgtcgatggtgctgcacagcttgtggaatggatttgtgttcttggatttgatgaagtgagcagctgagctggagttattgtttcggttccaaccttggacatatctgcttgagcctcgtctgaaaatgttttggacaagattggttctattcttttttcaggattaaaagcaaggcatctaatgcagcggcggaacagaaggagtcgtgtaagtctgaagcgaagagggaacagttagtgcaggaaaatagaccacagaacagaagaaatgtttatttttttcagaattttgtgtagaatgatcagtcactgcagtcttaggacctgtgcccagcttccataagcatctgccacatttttgtaaattgcataggcgggagaatatttgtctcgtcgtgtatagaatcccccccccccttggaaaggagatatatatggtttcctgccattcaatgccatgctttaggggtggatattttaaaaccgaaaatcgaacccga

SEQ ID NO: 199821 - DNA, 613 bp, Zea Mays
cttcccagttcggcagttccctccctccctcctcgtcacctaatccgccccgtcgcccccggaagcttcaagaaggtggacggtcggagggacgggctacatggggggctgcttctggtagcttcggtcgcccgccgcgccgccgccaggagaagacatgctttgttgtcctcaaagaggcctacatagctggagaagacactgcaattgaggcgcaccccatgttggaagtgttcaagaagtatgttgagttgatggagcagtcacgggaaatcataagatgtcgacggagcgggaagcctattgaactagagtccaaggcatgcggggatagctgagaagaaggatgggaatacatgtgcaaatatgacctctataacaagaatgtggatatgtactcttggtaggagctagtttatttctcattatttgcagagaaatacatcaagtgctgaaacagcttggtgactatatttaatctgcattcttaatttccagttgttcattacttgactgtgtactattgatgtcttaatcacacaatagtttcgtcagagatttctgatttccaggtcttcgacttaacttgtatcgatcaattcttagttcttct

SEQ ID NO: 199822 - DNA, 1144 bp, Zea Mays
ctcccttatgtcgcatattcgctttggcgaagatgtataggaggaattgggttttggatcttgacatgtcaactgacaatctagtggattttagtttaagtcaacacgatttttcagttctttctcccagtcccagctattgattttagattccagacgagtctagacgaacaacagatggttctcgaatgttttcatgtcaggatgaaaagtgcttacgtacttgatgaatcgatcatgaccctgctccggcaactttaccgtgctgaacggcgacaagatacctactaactgttatcggtgagttgaagaggatccttgttcagactactggcttggagcctgagaggcagaggctcttcttccgtgggaaggagaagagtgacagagagttcctgcacacggcaggtgttaaggatggagcaaagctgcttctgctcgagaagcctgcccctgccaacatagagcagaaggttgagcctgtgattatggatgaaagcatgatgaaggcatgtgcggctgttgctcgtgttagagttgaagttgataagctgtctgctaaggtgtgtgacttggagaagaatgtactaggagggagaaaggttgaggataaagaatttgttgtcttgacggagctgcttatgatgcagctgctgaaactcgatggcattgaagctgaaggagaagcaagggcacagaggaaggctgaggtgcgccgagttcagtcccttgtggagaccttggataagctgaaagcaagaaatgcaaaccccttcagcgatcataataaggctgtttcagtaacaacgcagtgggagacgtttgagaacggcatgggcagcttgagtgctccacctccccgtgtttcttcaacgcaagctaacactgactgggagcagttcgactaggctcagatgaagctgttgatgtatcatgaaatctgtgagatcggtatggacattcctttccgaggcagcgaggtgttgtgtatatgcaccacgtttgataacttttggcgtcccaagtgcctgtgattctgtgaatgttaccagatcgtgccactgccatactaccatgtgaattgcatcgctcattgagggtcatatttcaatatgctcctgccagtgccattcgcgtgctattt

SEQ ID NO: 199823 - DNA, 1035 bp, Zea Mays
cgaccccataagctctctcgtggggaccgtcctatccacggcggacacggcgagtcagcacagcaacagcgcacagcagcacacggtatccgtcccgggccggagccaactccccaagccagtccagtccttccgtccacccatccatcgtccccgcctgcacctcgcgagcatccaaagctgtacttgcggtgagttgaagaggatccttgttcagactactggcttggagcctgagaggcagaggctcttcttccgtgggaaggagaagagtgacagagagttcctgcacacggcaggtgttaaggatggagcaaagctgcttctgctcgagaagcctgcccctgccaacatagagcagaaggttgagcctgtgattatggatgaaagcatgatgaaggcatgtgcggctgttgctcgtgttagagttgaagttgataagctgtctgctaaggtgtgtgacttggagaagaatgtactaggagggagaaaggttgaggataaagaatttgttgtcttgacggagctgcttatgatgcagctgctgaaactcgatggcattgaagctgaaggagaagcaagggcacagaggaaggctgaggtgcgccgagttcagtcccttgtggagaccttggataagctgaaagcaagaaatgcaaaccccttcagcgatcataataaggctgtttcagtaacaacgcagtgggagacgtttgagaacggcatgggcagcttgagtgctccacctccccgtgtttcttcaacgcaagctaacactgactgggagcagttcgactaggctcagatgaagctgttgatgtatcatgaaatctgtgagatcggtatggacattcctttccgaggcagcgaggtgttgtgtatatgcaccacgtttgataacttttggcgtcccaagtgcctgtgattctgtgaatgttaccagatcgtgccactgccatactaccatgtgaattgcatcgctcattgagggtcatatttcaatatgctcctgccagtgccattcgcgtgctattt

SEQ ID NO: 199824 - DNA, 877 bp, Zea Mays
aggcatcgtacgtgctggagattcgtccgtccatcaagtgggacaagggcaaggccctcgagttcttgctcaagtctcttggctatgctgggcgcaacgacgtcttcccgatttacatcggagatgatcgcactgacgaggacgctttcaaggtgctccgcaacatggggcagggcatcggaatcctggtgtccaagcttcctaaggagacggcggcatcctactcgctgagtgaccctgccgaggtcaaggagttcctccgcaagctggccaataagaagggggcgcgccaaccatgaaaatgaagacgacctcgtgcatgcatgtagctaagctaggcatggcgtggacgatggatggatggacgagcacaacagcaaagaggcgcttattagctacaactactggccttttttgttgttttctttttgctcctacctatgcatagatagtagtctctactctctactctctacctagcaacaacaacaacctagctgatgcgcgcatgcatgcatgcattggtcgtcgcttactacatgcatggccattcagtgcagtgcgtgtgtgcgatggcggagaaacaacctagctagctagctgctcgatcgatcgatcggccttgtcttggaagaaggcggcagggagggggtccctgtgtaactgctggggatccgatatatcgatctgtccttccggccggcaagatcttgtaattagccgctgtggtactagctagcagctagagagaaatggataacaaaacaaataacatgcgtcgtcgtcttcgtctccgttcattctcgtccctctggatcctagagcctgtatgtacatgcgtggtcagacgacggtcgatctgttggcaacgcgcgca

SEQ ID NO: 199825 - DNA, 4199 bp, Zea Mays
gaaacccccaattttgtcaaggccattattccagcccaaccccatcgtcttctatagttacatctacactacacctagggcccaggaaaaaagcccacacccacagcatagggcacaggtccacagcggtccaagcgagtgctaggctgttagcaaatatcaaactccactgctaccactaatacacatcgcccccgcacatatcgatctcgtcgtcgtctcccccggtggcatgctccgctcccgctagatccgatctattatctatggatccccgccgtctccccatccttctctccctcctgcttgccttcttctccgccgttgtcgcctctgacgagatccacggatgcggcggcgtcgtcgaggcgagctctggcttggccaagtcgaggaaggcatcggattccaagctcgattactccgacatcacggttgagctctgcactgttgatggtttggttaaagaaagcacacagtgtgctcctaatggatactattttatccccgtctatgataagggttcgttcatggtcagagtgaaggggcccaagggatggtcatggaagcccgaaactgttcctgtcatcattgatcacaatgggtgcaatggaaatgcggatataaatttccagttcactgggtttatgatatccggtaaagtagtgggagctgttggtggtaagagctgctcaaaacggggaggacctgctggtgtgaaaattgaactgatgacagattctgatgagttgattgcatctgctttgacgtcatcatcaggagaatattcatttacaaacataattccagggcgttacatattacgtgcttctcatcctgattatgaaattgagttgagaggctcaccagagattgacctgcgatttggaaatgccgtggcagatgatgtcttctttgtatctggttatgacatttatggcactgtggttgcacagggaaatccaatagtgggagtccacctatatttgtattcaaatgatgtaacgaaggtcccttgcccacaaggtttcagtgatgcacccaaggaaggtgcactttgccatgcaatatctggtgctgatgggaagttcacatttagatcactaccttgtggtagctatgagttgttgccatactacaagggagagaacaccgtatttgatatttcaccatcttcactttctgtttctgttgagcatagtcatttgacgattccccaaaaattccaggtcactggattttctgttggagggcgtgttatcgatggttatggtgctggtgtggagagtgccaatgttatagttgatgggcagttgagagccataacagatagtcttggatactatagactcgatcaggttacatccaagaagtatactataactgccgagaaggatcattataagttcaaccgtttggaggattttatgattttaccaaatttggcaagtattgatgatatcagatcagttagatatgatgtatgtggtattgttcgaacagttactctgaattcaaaagcaatggttactttaacacatggaccagaaaatgtaaagccacagcggaaattagtgggtgaaaatggacatttttgctttgaggttcctgctggtgaataccagttatctgcattacctgtagattccgaacgctcttctagtcttatgttttcaccgggatctattagcgtcaatgtaaatagcccgttgcttgatctggaattctctcagtcacaagtcaatgttcatggtaaagtctcatgcaaacagcaatgcagccagaacattctggtctcacttgttagattggctggcggagttgaacaggaaaagaagacaactacattggaacaagataatgttaattttgtgtttaagaaagtatttcctggaaaatatcgtgtagaggtgaagaattctttacccgagggcttagctaaggatgattggtgctgggaccagagtatcttgaatatagatgttggtactgatgatgtgagagacattgtgtttgtacaaaaaggctattggattgagctagtttcaactcatgatactaatgcttatattcagcagccagattcttctagacttgatttgttgataaagaaaggatcacaaagaatttgtgttgaaacttcagggcaacatgagattcatttaactaatccttgtatttcctttgggacctcgtctgttttgtttgatacagctaatttaatgccgatccatatcaatgcaaagaagtatcttgtaaaaggtgaaatccatgtggacatgagctccattcaggaaaacattgattccaaggacatagtcgtggatatcttgaagagtgatggcagtttcatagaaaagatatccacatcacttgttcttggaaaggacaatcaaaatgacttcactgcctttgagtactctatttgggctgaccttggggaggacttcatctttgtcccccatgattctagcattggaaggaacaaagtcctattttatccagcaagacagcagtattcagtttctatgaatggatgccaagatactgttcctctaatcactgcaagaactggtctatatcttgaaggatcagtgttacctgcaacttctgatgttgacatcaagattctagcagctggaaagagcaactatgcccatctgaacaaaggggatgtagcaacagaggcaaagacagattctgaaggatcattttttgcaggtcctttgtatgatgacatagtatataaagttgaagcttcaaaggatggttaccatctcaaacaaactggcccatacaccttttcttgtcagaagcttggtcagatattagtgcggatttatggtgaaaattcagagcttttaccttcagtattattatcattgagtggcgagaaagggtacagaaataactcaattagtagttctggtggaaccttcacctttgacaacttatttcctggaagtttctatctccgaccacttctaaaggaatataaatttaatccgtcagcagtagctattgatcttaattctggagagtctagggaggctgaatttcgtgcaaccagagtggcttacagtgccatgggttctgtaacactattaactggccaaccaaaggagggtgtttttgttgaagcaagatctgaatccacaggtttttatgaggaagctaccacggattcttttggtagatttcgtcttagaggacttgtgcctggatcgacttactctataagagtggctgcaaaagataatcttcagtttgcagcagttgagcgtgcttcacctgaatatttgtcagttaatgttggtcatgaagacatgactggtattgattttgtggtttttgaacgccccgaagtaacaatcttgagtggccatgtggaaggagatggcattgatacgttacatccgcatctctctgttgaaatcagatcagcaacagactcttctagagtagaagctgtacttcctcttcctctttcatactactttgaagtccgagatttgcccaagggcaagcatcttgttcagcttcgatctggccttccatcacatacacataggtttgaatcggagttagtcgaagtagatctggaaaaggatccccaaatccatgttggtcccctcaaatataaaactgaggagcgtcatcaaaagcaggaactgaccccagcaccagtttttccgcttattgttggagtttctgtggttgcactggtgatcagtatgccaaggttaaatgacttataccagagcgctgtagggatgacttctctgggttcagggatggcaccgaccaaaaaggagccacgcaagaatatattaagaaagagagtgtaaatggcagattagcttagccttaggggtcgagaaatgagacatgacaaattgagcaatttcaagagtggaatagcttctggtttccccctcggttttagactataaagaaagagttgctgcatcatgaatgaactttctcaccagtcagcatgcacgatcgaataggttaatctgagcggtccaggactaagtagaatagacaagtttgttgtggcacgttgtttgcccctctttttgattgtacaacgaccaagtaaagcgtgcgcaatgacttctctatgacttacggatctggttcgccctttagcatatgtggtctagcgtggagcgtttataatataaatttaaata

SEQ ID NO: 199826 - DNA, 2990 bp, Zea Mays
caggtccacagcggtccaagcgagtgctaggctgttagcaaatatcaaactccactgctaccactaatacacatcgcccccgcacatatcgatctcgtcgtcgtctcccccggtggcatgctccgctcccgctagatccgatctattatctatggatccccgccgtctccccatccttctctccctcctgcttgccttcttctccgccgttgtcgcctctgacgagatccacggatgcggcggcgtcgtcgaggcgagctctggcttggccaagtcgaggaaggcatcggattccaagctcgattactccgacatcacggttgagctctgcactgttgatggtttggttaaagaaagcacacagtgtgctcctaatggatactattttatccccgtctatgataagggttcgttcatggtcagagtgaaggggcccaagggatggtcatggaagcccgaaactgttcctgtcatcattgatcacaatgggtgcaatggaaatgcggatataaatttccagttcactgggtttatgatatccggtaaagtagtgggagctgttggtggtaagagctgctcaaaacggggaggacctgctggtgtgaaaattgaactgatgacagattctgatgagttgattgcatctgctttgacgtcatcatcaggagaatattcatttacaaacataattccagggcgttacatattacgtgcttctcatcctgattatgaaattgagttgagaggctcaccagagattgacctgcgatttggaaatgccgtggcagatgatgtcttctttgtatctggttatgacatttatggcactgtggttgcacagggaaatccaatagtgggagtccacctatatttgtattcaaatgatgtaacgaaggtcccttgcccacaaggtttcagtgatgcacccaaggaaggtgcactttgccatgcaatatctggtgctgatgggaagttcacatttagatcactaccttgtggtagctatgagttgttgccatactacaagggagagaacaccgtatttgatatttcaccatcttcactttctgtttctgttgagcatagtcatttgacgattccccaaaaattccaggtcactggattttctgttggagggcgtgttatcgatggttatggtgctggtgtggagagtgccaatgttatagttgatgggcagttgagagccataacagatagtcttggatactatagactcgatcaggttacatccaagaagtatactataactgccgagaaggatcattataagttcaaccgtttggaggattttatgattttaccaaatttggcaagtattgatgatatcagatcagttagatatgatgtatgtggtattgttcgaacagttactctgaattcaaaagcaatggttactttaacacatggaccagaaaatgtaaagccacagcggaaattagtgggtgaaaatggacatttttgctttgaggttcctgctggtgaataccagttatctgcattacctgtagattccgaacgctcttctagtcttatgttttcaccgggatctattagcgtcaatgtaaatagcccgttgcttgatctggaattctctcagtcacaagtcaatgttcatggtaaagtctcatgcaaacagcaatgcagccagaacattctggtctcacttgttagattggctggcggagttgaacaggaaaagaagacaactacattggaacaagataatgttaattttgtgtttaagaaagtatttcctggaaaatatcgtgtagaggtgaagaattctttacccgagggcttagctaaggatgattggtgctgggaccagagtatcttgaatatagatgttggtactgatgatgtgagagacattgtgtttgtacaaaaaggctattggattgagctagtttcaactcatgatactaatgcttatattcagcagccagattcttctagacttgatttgttgataaagaaaggatcacaaagaatttgtgttgaaacttcagggcaacatgagattcatttaactaatccttgtatttcctttgggacctcgtctgttttgtttgatacagctaatttaatgccgatccatatcaatgcaaagaagtatcttgtaaaaggtgaaatccatgtggacatgagctccattcaggaaaacattgattccaaggacatagtcgtggatatcttgaagagtgatggcagtttcatagaaaagatatccacatcacttgttcttggaaaggacaatcaaaatgacttcactgcctttgagtactctatttgggctgaccttggggaggacttcatctttgtcccccatgattctagcattggaaggaacaaagtcctattttatccagcaagacagcagtattcagtttctatgaatggatgccaagatactgttcctctaatcactgcaagaactggtctatatcttgaaggatcagtgttacctgcaacttctgatgttgacatcaagattctagcagctggaaagagcaactatgcccatctgaacaaaggggatgtagcaacagaggcaaagacagattctgaaggatcattttttgcaggtcctttgtatgatgacatagtatataaagttgaagcttcaaaggatggttaccatctcaaacaaactggcccatacaccttttcttgtcagaagcttggtcagatattagtgcggatttatggtgaaaattcagagcttttaccttcagtattattatcattgagtggcgagaaagggtacagaaataactcaattagtagttctggtggaaccttcacctttgacaacttatttcctggaagtttctatctccgaccacttctaaaggaatataaatttaatccgtcagcagtagctattgatcttaattctggagagtctagggaggctgaatttcgtgcaaccagagtggcttacagaagtcagcaacttgcatttctga

SEQ ID NO: 199827 - DNA, 3999 bp, Zea Mays
cagcggtccaagcgagtgctaggctgttagcaaatatcaaactccactgctaccactaatacacatcgcccccgcacatatcgatctcgtcgtcgtctcccccggtggcatgctccgctcccgctagatccgatctattatctatggatccccgccgtctccccatccttctctccctcctgcttgccttcttctccgccgttgtcgcctctgacgagatccacggatgcggcggcgtcgtcgaggcgagctctggcttggccaagtcgaggaaggcatcggattccaagctcgattactccgacatcacggttgagctctgcactgttgatggtttggttaaagaaagcacacagtgtgctcctaatggatactattttatccccgtctatgataagggttcgttcatggtcagagtgaaggggcccaagggatggtcatggaagcccgaaactgttcctgtcatcattgatcacaatgggtgcaatggaaatgcggatataaatttccagttcactgggtttatgatatccggtaaagtagtgggagctgttggtggtaagagctgctcaaaacggggaggacctgctggtgtgaaaattgaactgatgacagattctgatgagttgattgcatctgctttgacgtcatcatcaggagaatattcatttacaaacataattccagggcgttacatattacgtgcttctcatcctgattatgaaattgagttgagaggctcaccagagattgacctgcgatttggaaatgccgtggcagatgatgtcttctttgtatctggttatgacatttatggcactgtggttgcacagggaaatccaatagtgggagtccacctatatttgtattcaaatgatgtaacgaaggtcccttgcccacaaggtttcagtgatgcacccaaggaaggtgcactttgccatgcaatatctggtgctgatgggaagttcacatttagatcactaccttgtggtagctatgagttgttgccatactacaagggagagaacaccgtatttgatatttcaccatcttcactttctgtttctgttgagcatagtcatttgacgattccccaaaaattccaggtcactggattttctgttggagggcgtgttatcgatggttatggtgctggtgtggagagtgccaatgttatagttgatgggcagttgagagccataacagatagtcttggatactatagactcgatcaggttacatccaagaagtatactataactgccgagaaggatcattataagttcaaccgtttggaggattttatgattttaccaaatttggcaagtattgatgatatcagatcagttagatatgatgtatgtggtattgttcgaacagttactctgaattcaaaagcaatggttactttaacacatggaccagaaaatgtaaagccacagcggaaattagtgggtgaaaatggacatttttgctttgaggttcctgctggtgaataccagttatctgcattacctgtagattccgaacgctcttctagtcttatgttttcaccgggatctattagcgtcaatgtaaatagcccgttgcttgatctggaattctctcagtcacaagtcaatgttcatggtaaagtctcatgcaaacagcaatgcagccagaacattctggtctcacttgttagattggctggcggagttgaacaggaaaagaagacaactacattggaacaagataatgttaattttgtgtttaagaaagtatttcctggaaaatatcgtgtagaggtgaagaattctttacccgagggcttagctaaggatgattggtgctgggaccagagtatcttgaatatagatgttggtactgatgatgtgagagacattgtgtttgtacaaaaaggctattggattgagctagtttcaactcatgatactaatgcttatattcagcagccagattcttctagacttgatttgttgataaagaaaggatcacaaagaatttgtgttgaaacttcagggcaacatgagattcatttaactaatccttgtatttcctttgggacctcgtctgttttgtttgatacagctaatttaatgccgatccatatcaatgcaaagaagtatcttgtaaaaggtgaaatccatgtggacatgagctccattcaggaaaacattgattccaaggacatagtcgtggatatcttgaagagtgatggcagtttcatagaaaagatatccacatcacttgttcttggaaaggacaatcaaaatgacttcactgcctttgagtactctatttgggctgaccttggggaggacttcatctttgtcccccatgattctagcattggaaggaacaaagtcctattttatccagcaagacagcagtattcagtttctatgaatggatgccaagatactgttcctctaatcactgcaagaactggtctatatcttgaaggatcagtgttacctgcaacttctgatgttgacatcaagattctagcagctggaaagagcaactatgcccatctgaacaaaggggatgtagcaacagaggcaaagacagattctgaaggatcattttttgcaggtcctttgtatgatgacatagtatataaagttgaagcttcaaaggatggttaccatctcaaacaaactggcccatacaccttttcttgtcagaagcttggtcagatattagtgcggatttatggtgaaaattcagagcttttaccttcagtattattatcattgagtggcgagaaagggtacagaaataactcaattagtagttctggtggaaccttcacctttgacaacttatttcctggaagtttctatctccgaccacttctaaaggaatataaatttaatccgtcagcagtagctattgatcttaattctggagagtctagggaggctgaatttcgtgcaaccagagtggcttacaggtttttatgaggaagctaccacggattcttttggtagatttcgtcttagaggacttgtgcctggatcgacttactctataagagtggctgcaaaagataatcttcagtttgcagcagttgagcgtgcttcacctgaatatttgtcagttaatgttggtcatgaagacatgactggtattgattttgtggtttttgaacgccccgaagtaacaatcttgagtggccatgtggaaggagatggcattgatacgttacatccgcatctctctgttgaaatcagatcagcaacagactcttctagagtagaagctgtacttcctcttcctctttcatactactttgaagtccgagatttgcccaagggcaagcatcttgttcagcttcgatctggccttccatcacatacacataggtttgaatcggagttagtcgaagtagatctggaaaaggatccccaaatccatgttggtcccctcaaatataaaactgaggagcgtcatcaaaagcaggaactgaccccagcaccagtttttccgcttattgttggagtttctgtggttgcactggtgatcagtatgccaaggttaaatgacttataccagagcgctgtagggatgacttctctgggttcagggatggcaccgaccaaaaaggagccacgcaagaatatattaagaaagagagtgtaaatggcagattagcttagccttaggggtcgagaaatgagacatgacaaattgagcaatttcaagagtggaatagcttctggtttccccctcggttttagactataaagaaagagttgctgcatcatgaatgaactttctcaccagtcagcatgcacgatcgaataggttaatctgagcggtccaggactaagtagaatagacaagtttgttgtggcacgttgtttgcccctctttttgattgtacaacgaccaagtaaagcgtgcgcaatgacttctctatgacttacggatctggttcgccctttagcatatgtggtctagcgtggagcgtttataatataaatttaaata

SEQ ID NO: 199828 - DNA, 3947 bp, Zea Mays
cagcggtccaagcgagtgctaggctgttagcaaatatcaaactccactgctaccactaatacacatcgcccccgcacatatcgatctcgtcgtcgtctcccccggtggcatgctccgctcccgctagatccgatctattatctatggatccccgccgtctccccatccttctctccctcctgcttgccttcttctccgccgttgtcgcctctgacgagatccacggatgcggcggcgtcgtcgaggcgagctctggcttggccaagtcgaggaaggcatcggattccaagctcgattactccgacatcacggttgagctctgcactgttgatggtttggttaaagaaagcacacagtgtgctcctaatggatactattttatccccgtctatgataagggttcgttcatggtcagagtgaaggggcccaagggatggtcatggaagcccgaaactgttcctgtcatcattgatcacaatgggtgcaatggaaatgcggatataaatttccagttcactgggtttatgatatccggtaaagtagtgggagctgttggtggtaagagctgctcaaaacggggaggacctgctggtgtgaaaattgaactgatgacagattctgatgagttgattgcatctgctttgacgtcatcatcaggagaatattcatttacaaacataattccagggcgttacatattacgtgcttctcatcctgattatgaaattgagttgagaggctcaccagagattgacctgcgatttggaaatgccgtggcagatgatgtcttctttgtatctggttatgacatttatggcactgtggttgcacagggaaatccaatagtgggagtccacctatatttgtattcaaatgatgtaacgaaggtcccttgcccacaaggtttcagtgatgcacccaaggaaggtgcactttgccatgcaatatctggtgctgatgggaagttcacatttagatcactaccttgtggtagctatgagttgttgccatactacaagggagagaacaccgtatttgatatttcaccatcttcactttctgtttctgttgagcatagtcatttgacgattccccaaaaattccaggttacatccaagaagtatactataactgccgagaaggatcattataagttcaaccgtttggaggattttatgattttaccaaatttggcaagtattgatgatatcagatcagttagatatgatgtatgtggtattgttcgaacagttactctgaattcaaaagcaatggttactttaacacatggaccagaaaatgtaaagccacagcggaaattagtgggtgaaaatggacatttttgctttgaggttcctgctggtgaataccagttatctgcattacctgtagattccgaacgctcttctagtcttatgttttcaccgggatctattagcgtcaatgtaaatagcccgttgcttgatctggaattctctcagtcacaagtcaatgttcatggtaaagtctcatgcaaacagcaatgcagccagaacattctggtctcacttgttagattggctggcggagttgaacaggaaaagaagacaactacattggaacaagataatgttaattttgtgtttaagaaagtatttcctggaaaatatcgtgtagaggtgaagaattctttacccgagggcttagctaaggatgattggtgctgggaccagagtatcttgaatatagatgttggtactgatgatgtgagagacattgtgtttgtacaaaaaggctattggattgagctagtttcaactcatgatactaatgcttatattcagcagccagattcttctagacttgatttgttgataaagaaaggatcacaaagaatttgtgttgaaacttcagggcaacatgagattcatttaactaatccttgtatttcctttgggacctcgtctgttttgtttgatacagctaatttaatgccgatccatatcaatgcaaagaagtatcttgtaaaaggtgaaatccatgtggacatgagctccattcaggaaaacattgattccaaggacatagtcgtggatatcttgaagagtgatggcagtttcatagaaaagatatccacatcacttgttcttggaaaggacaatcaaaatgacttcactgcctttgagtactctatttgggctgaccttggggaggacttcatctttgtcccccatgattctagcattggaaggaacaaagtcctattttatccagcaagacagcagtattcagtttctatgaatggatgccaagatactgttcctctaatcactgcaagaactggtctatatcttgaaggatcagtgttacctgcaacttctgatgttgacatcaagattctagcagctggaaagagcaactatgcccatctgaacaaaggggatgtagcaacagaggcaaagacagattctgaaggatcattttttgcaggtcctttgtatgatgacatagtatataaagttgaagcttcaaaggatggttaccatctcaaacaaactggcccatacaccttttcttgtcagaagcttggtcagatattagtgcggatttatggtgaaaattcagagcttttaccttcagtattattatcattgagtggcgagaaagggtacagaaataactcaattagtagttctggtggaaccttcacctttgacaacttatttcctggaagtttctatctccgaccacttctaaaggaatataaatttaatccgtcagcagtagctattgatcttaattctggagagtctagggaggctgaatttcgtgcaaccagagtggcttacagtgccatgggttctgtaacactattaactggccaaccaaaggagggtgtttttgttgaagcaagatctgaatccacaggtttttatgaggaagctaccacggattcttttggtagatttcgtcttagaggacttgtgcctggatcgacttactctataagagtggctgcaaaagataatcttcagtttgcagcagttgagcgtgcttcacctgaatatttgtcagttaatgttggtcatgaagacatgactggtattgattttgtggtttttgaacgccccgaagtaacaatcttgagtggccatgtggaaggagatggcattgatacgttacatccgcatctctctgttgaaatcagatcagcaacagactcttctagagtagaagctgtacttcctcttcctctttcatactactttgaagtccgagatttgcccaagggcaagcatcttgttcagcttcgatctggccttccatcacatacacataggtttgaatcggagttagtcgaagtagatctggaaaaggatccccaaatccatgttggtcccctcaaatataaaactgaggagcgtcatcaaaagcaggaactgaccccagcaccagtttttccgcttattgttggagtttctgtggttgcactggtgatcagtatgccaaggttaaatgacttataccagagcgctgtagggatgacttctctgggttcagggatggcaccgaccaaaaaggagccacgcaagaatatattaagaaagagagtgtaaatggcagattagcttagccttaggggtcgagaaatgagacatgacaaattgagcaatttcaagagtggaatagcttctggtttccccctcggttttagactataaagaaagagttgctgcatcatgaatgaactttctcaccagtcagcatgcacgatcgaataggttaatctgagcggtccaggactaagtagaatagacaagtttgttgtggcacgttgtttgcccctctttttgattgtacaacgaccaagtaaagcgtgcgcaatgacttctctatgacttacggatctggttcgccctttagcatatgtggtctagcgtggagcgtttataatataaatttaaata

SEQ ID NO: 199829 - DNA, 4024 bp, Zea Mays
agcaaatatcaaactccactgctaccactaatacacatcgcccccgcacatatcgatctcgtcgtcgtctcccccggtggcatgctccgctcccgctagatccgatctattatctatggatccccgccgtctccccatccttctctccctcctgcttgccttcttctccgccgttgtcgcctctgacgagatccacggatgcggcggcgtcgtcgaggcgagctctggcttggccaagtcgaggaaggcatcggattccaagctcgattactccgacatcacggttgagctctgcactgttgatggtttggttaaagaaagcacacagtgtgctcctaatggatactattttatccccgtctatgataagggttcgttcatggtcagagtgaaggggcccaagggatggtcatggaagcccgaaactgttcctgtcatcattgatcacaatgggtgcaatggaaatgcggatataaatttccagttcactgggtttatgatatccggtaaagtagtgggagctgttggtggtaagagctgctcaaaacggggaggacctgctggtgtgaaaattgaactgatgacagattctgatgagttgattgcatctgctttgacgtcatcatcaggagaatattcatttacaaacataattccagggcgttacatattacgtgcttctcatcctgattatgaaattgagttgagaggctcaccagagattgacctgcgatttggaaatgccgtggcagatgatgtcttctttgtatctggttatgacatttatggcactgtggttgcacagggaaatccaatagtgggagtccacctatatttgtattcaaatgatgtaacgaaggtcccttgcccacaaggtttcagtgatgcacccaaggaaggtgcactttgccatgcaatatctggtgctgatgggaagttcacatttagatcactaccttgtggtagctatgagttgttgccatactacaagggagagaacaccgtatttgatatttcaccatcttcactttctgtttctgttgagcatagtcatttgacgattccccaaaaattccaggtcactggattttctgttggagggcgtgttatcgatggttatggtgctggtgtggagagtgccaatgttatagttgatgggcagttgagagccataacagatagtcttggatactatagactcgatcaggttacatccaagaagtatactataactgccgagaaggatcattataagttcaaccgtttggaggattttatgattttaccaaatttggcaagtattgatgatatcagatcagttagatatgatgtatgtggtattgttcgaacagttactctgaattcaaaagcaatggttactttaacacatggaccagaaaatgtaaagccacagcggaaattagtgggtgaaaatggacatttttgctttgaggttcctgctggtgaataccagttatctgcattacctgtagattccgaacgctcttctagtcttatgttttcaccgggatctattagcgtcaatgtaaatagcccgttgcttgatctggaattctctcagtcacaagtcaatgttcatggtaaagtctcatgcaaacagcaatgcagccagaacattctggtctcacttgttagattggctggcggagttgaacaggaaaagaagacaactacattggaacaagataatgttaattttgtgtttaagaaagtatttcctggaaaatatcgtgtagaggtgaagaattctttacccgagggcttagctaaggatgattggtgctgggaccagagtatcttgaatatagatgttggtactgatgatgtgagagacattgtgtttgtacaaaaaggctattggattgagctagtttcaactcatgatactaatgcttatattcagcagccagattcttctagacttgatttgttgataaagaaaggatcacaaagaatttgtgttgaaacttcagggcaacatgagattcatttaactaatccttgtatttcctttgggacctcgtctgttttgtttgatacagctaatttaatgccgatccatatcaatgcaaagaagtatcttgtaaaaggtgaaatccatgtggacatgagctccattcaggaaaacattgattccaaggacatagtcgtggatatcttgaagagtgatggcagtttcatagaaaagatatccacatcacttgttcttggaaaggacaatcaaaatgacttcactgcctttgagtactctatttgggctgaccttggggaggacttcatctttgtcccccatgattctagcattggaaggaacaaagtcctattttatccagcaagacagcagtattcagtttctatgaatggatgccaagatactgttcctctaatcactgcaagaactggtctatatcttgaaggatcagtgttacctgcaacttctgatgttgacatcaagattctagcagctggaaagagcaactatgcccatctgaacaaaggggatgtagcaacagaggcaaagacagattctgaaggatcattttttgcaggtcctttgtatgatgacatagatggttaccatctcaaacaaactggcccatacaccttttcttgtcagaagcttggtcagatattagtgcggatttatggtgaaaattcagagcttttaccttcagtattattatcattgagtggcgagaaagggtacagaaataactcaattagtagttctggtggaaccttcacctttgacaacttatttcctggaagtttctatctccgaccacttctaaaggaatataaatttaatccgtcagcagtagctattgatcttaattctggagagtctagggaggctgaatttcgtgcaaccagagtggcttacagtgccatgggttctgtaacactattaactggccaaccaaaggagggtgtttttgttgaagcaagatctgaatccacaggtttttatgaggaagctaccacggattcttttggtagatttcgtcttagaggacttgtgcctggatcgacttactctataagagtggctgcaaaagataatcttcagtttgcagcagttgagcgtgcttcacctgaatatttgtcagttaatgttggtcatgaagacatgactggtattgattttgtggtttttgaacgccccgaagtaacaatcttgagtggccatgtggaaggagatggcattgatacgttacatccgcatctctctgttgaaatcagatcagcaacagactcttctagagtagaagctgtacttcctcttcctctttcatactactttgaagtccgagatttgcccaagggcaagcatcttgttcagcttcgatctggccttccatcacatacacataggtttgaatcggagttagtcgaagtagatctggaaaaggatccccaaatccatgttggtcccctcaaatataaaactgaggagcgtcatcaaaagcaggaactgaccccagcaccagtttttccgcttattgttggagtttctgtggttgcactggtgatcagtatgccaaggttaaatgacttataccagagcgctgtagggatgacttctctgggttcagggatggcaccgaccaaaaaggagccacgcaagaatatattaagaaagagagtgtaaatggcagattagcttagccttaggggtcgagaaatgagacatgacaaattgagcaatttcaagagtggaatagcttctggtttccccctcggttttagactataaagaaagagttgctgcatcatgaatgaactttctcaccagtcagcatgcacgatcgaataggttaatctgagcggtccaggactaagtagaatagacaagtttgttgtggcacgttgtttgcccctctttttgattgtacaacgaccaagtaaagcgtgcgcaatgacttctctatgacttacggatctggttcgccctttagcatatgtggtctagcgtggagcgtttataatataaatttaaata

SEQ ID NO: 199830 - DNA, 3967 bp, Zea Mays
tcgcccccgcacatatcgatctcgtcgtcgtctcccccggtggcatgctccgctcccgctagatccgatctattatctatggatccccgccgtctccccatccttctctccctcctgcttgccttcttctccgccgttgtcgcctctgacgagatccacggatgcggcggcgtcgtcgaggcgagctctggcttggccaagtcgaggaaggcatcggattccaagctcgattactccgacatcacggttgagctctgcactgttgatggtttggttaaagaaagcacacagtgtgctcctaatggatactattttatccccgtctatgataagggttcgttcatggtcagagtgaaggggcccaagggatggtcatggaagcccgaaactgttcctgtcatcattgatcacaatgggtgcaatggaaatgcggatataaatttccagttcactgggtttatgatatccggtaaagtagtgggagctgttggtggtaagagctgctcaaaacggggaggacctgctggtgtgaaaattgaactgatgacagattctgatgagttgattgcatctgctttgacgtcatcatcaggagaatattcatttacaaacataattccagggcgttacatattacgtgcttctcatcctgattatgaaattgagttgagaggctcaccagagattgacctgcgatttggaaatgccgtggcagatgatgtcttctttgtatctggttatgacatttatggcactgtggttgcacagggaaatccaatagtgggagtccacctatatttgtattcaaatgatgtaacgaaggtcccttgcccacaaggtttcagtgatgcacccaaggaaggtgcactttgccatgcaatatctggtgctgatgggaagttcacatttagatcactaccttgtggtagctatgagttgttgccatactacaagggagagaacaccgtatttgatatttcaccatcttcactttctgtttctgttgagcatagtcatttgacgattccccaaaaattccaggtcactggattttctgttggagggcgtgttatcgatggttatggtgctggtgtggagagtgccaatgttatagttgatgggcagttgagagccataacagatagtcttggatactatagactcgatcaggttacatccaagaagtatactataactgccgagaaggatcattataagttcaaccgtttggaggattttatgattttaccaaatttggcaagtattgatgatatcagatcagttagatatgatgtatgtggtattgttcgaacagttactctgaattcaaaagcaatggttactttaacacatggaccagaaaatgtaaagccacagcggaaattagtgggtgaaaatggacatttttgctttgaggttcctgctggtgaataccagttatctgcattacctgtagattccgaacgctcttctagtcttatgttttcaccgggatctattagcgtcaatgtaaatagcccgttgcttgatctggaattctctcagtcacaagtcaatgttcatggtaaagtctcatgcaaacagcaatgcagccagaacattctggtctcacttgttagattggctggcggagttgaacaggaaaagaagacaactacattggaacaagataatgttaattttgtgtttaagaaagtatttcctggaaaatatcgtgtagaggtgaagaattctttacccgagggcttagctaaggatgattggtgctgggaccagagtatcttgaatatagatgttggtactgatgatgtgagagacattgtgtttgtacaaaaaggctattggattgagctagtttcaactcatgatactaatgcttatattcagcagccagattcttctagacttgatttgttgataaagaaaggatcacaaagaatttgtgttgaaacttcagggcaacatgagattcatttaactaatccttgtatttcctttgggacctcgtctgttttgtttgatacagctaatttaatgccgatccatatcaatgcaaagaagtatcttgtaaaaggtgaaatccatgtggacatgagctccattcaggaaaacattgattccaaggacatagtcgtggatatcttgaagagtgatggcagtttcatagaaaagatatccacatcacttgttcttggaaaggacaatcaaaatgacttcactgcctttgagtactctatttgggctgaccttggggaggacttcatctttgtcccccatgattctagcattggaaggaacaaagtcctattttatccagcaagacagcagtattcagtttctatgaatggatgccaagatactgttcctctaatcactgcaagaactggtctatatcttgaaggatcagtgttacctgcaacttctgatgttgacatcaagattctagcagctggaaagagcaactatgcccatctgaacaaaggggatgtagcaacagaggcaaagacagattctgaaggatcattttttgcaggatggttaccatctcaaacaaactggcccatacaccttttcttgtcagaagcttggtcagatattagtgcggatttatggtgaaaattcagagcttttaccttcagtattattatcattgagtggcgagaaagggtacagaaataactcaattagtagttctggtggaaccttcacctttgacaacttatttcctggaagtttctatctccgaccacttctaaaggaatataaatttaatccgtcagcagtagctattgatcttaattctggagagtctagggaggctgaatttcgtgcaaccagagtggcttacagtgccatgggttctgtaacactattaactggccaaccaaaggagggtgtttttgttgaagcaagatctgaatccacaggtttttatgaggaagctaccacggattcttttggtagatttcgtcttagaggacttgtgcctggatcgacttactctataagagtggctgcaaaagataatcttcagtttgcagcagttgagcgtgcttcacctgaatatttgtcagttaatgttggtcatgaagacatgactggtattgattttgtggtttttgaacgccccgaagtaacaatcttgagtggccatgtggaaggagatggcattgatacgttacatccgcatctctctgttgaaatcagatcagcaacagactcttctagagtagaagctgtacttcctcttcctctttcatactactttgaagtccgagatttgcccaagggcaagcatcttgttcagcttcgatctggccttccatcacatacacataggtttgaatcggagttagtcgaagtagatctggaaaaggatccccaaatccatgttggtcccctcaaatataaaactgaggagcgtcatcaaaagcaggaactgaccccagcaccagtttttccgcttattgttggagtttctgtggttgcactggtgatcagtatgccaaggttaaatgacttataccagagcgctgtagggatgacttctctgggttcagggatggcaccgaccaaaaaggagccacgcaagaatatattaagaaagagagtgtaaatggcagattagcttagccttaggggtcgagaaatgagacatgacaaattgagcaatttcaagagtggaatagcttctggtttccccctcggttttagactataaagaaagagttgctgcatcatgaatgaactttctcaccagtcagcatgcacgatcgaataggttaatctgagcggtccaggactaagtagaatagacaagtttgttgtggcacgttgtttgcccctctttttgattgtacaacgaccaagtaaagcgtgcgcaatgacttctctatgacttacggatctggttcgccctttagcatatgtggtctagcgtggagcgtttataatataaatttaaata

SEQ ID NO: 199831 - DNA, 3997 bp, Zea Mays
cgcacatatcgatctcgtcgtcgtctcccccggtggcatgctccgctcccgctagatccgatctattatctatggatccccgccgtctccccatccttctctccctcctgcttgccttcttctccgccgttgtcgcctctgacgagatccacggatgcggcggcgtcgtcgaggcgagctctggcttggccaagtcgaggaaggcatcggattccaagctcgattactccgacatcacggttgagctctgcactgttgatggtttggttaaagaaagcacacagtgtgctcctaatggatactattttatccccgtctatgataagggttcgttcatggtcagagtgaaggggcccaagggatggtcatggaagcccgaaactgttcctgtcatcattgatcacaatgggtgcaatggaaatgcggatataaatttccagttcactgggtttatgatatccggtaaagtagtgggagctgttggtggtaagagctgctcaaaacggggaggacctgctggtgtgaaaattgaactgatgacagattctgatgagttgattgcatctgctttgacgtcatcatcaggagaatattcatttacaaacataattccagggcgttacatattacgtgcttctcatcctgattatgaaattgagttgagaggctcaccagagattgacctgcgatttggaaatgccgtggcagatgatgtcttctttgtatctggttatgacatttatggcactgtggttgcacagggaaatccaatagtgggagtccacctatatttgtattcaaatgatgtaacgaaggtcccttgcccacaaggtttcagtgatgcacccaaggaaggtgcactttgccatgcaatatctggtgctgatgggaagttcacatttagatcactaccttgtggtagctatgagttgttgccatactacaagggagagaacaccgtatttgatatttcaccatcttcactttctgtttctgttgagcatagtcatttgacgattccccaaaaattccaggtcactggattttctgttggagggcgtgttatcgatggttatggtgctggtgtggagagtgccaatgttatagttgatgggcagttgagagccataacagatagtcttggatactatagactcgatcaggttacatccaagaagtatactataactgccgagaaggatcattataagttcaaccgtttggaggattttatgattttaccaaatttggcaagtattgatgatatcagatcagttagatatgatgtatgtggtattgttcgaacagttactctgaattcaaaagcaatggttactttaacacatggaccagaaaatgtaaagccacagcggaaattagtgggtgaaaatggacatttttgctttgaggttcctgctggtgaataccagttatctgcattacctgtagattccgaacgctcttctagtcttatgttttcaccgggatctattagcgtcaatgtaaatagcccgttgcttgatctggaattctctcagtcacaagtcaatgttcatggtaaagtctcatgcaaacagcaatgcagccagaacattctggtctcacttgttagattggctggcggagttgaacaggaaaagaagacaactacattggaacaagataatgttaattttgtgtttaagaaagtatttcctggaaaatatcgtgtagaggtgaagaattctttacccgagggcttagctaaggatgattggtgctgggaccagagtatcttgaatatagatgttggtactgatgatgtgagagacattgtgtttgtacaaaaaggctattggattgagctagtttcaactcatgatactaatgcttatattcagcagccagattcttctagacttgatttgttgataaagaaaggatcacaaagaatttgtgttgaaacttcagggcaacatgagattcatttaactaatccttgtatttcctttgggacctcgtctgttttgtttgatacagctaatttaatgccgatccatatcaatgcaaagaagtatcttgtaaaaggtgaaatccatgtggacatgagctccattcaggaaaacattgattccaaggacatagtcgtggatatcttgaagagtgatggcagtttcatagaaaagatatccacatcacttgttcttggaaaggacaatcaaaatgacttcactgcctttgagtactctatttgggctgaccttggggaggacttcatctttgtcccccatgattctagcattggaaggaacaaagtcctattttatccagcaagacagcagtttctatgaatggatgccaagatactgttcctctaatcactgcaagaactggtctatatcttgaaggatcagtgttacctgcaacttctgatgttgacatcaagattctagcagctggaaagagcaactatgcccatctgaacaaaggggatgtagcaacagaggcaaagacagattctgaaggatcattttttgcaggtcctttgtatgatgacatagtatataaagttgaagcttcaaaggatggttaccatctcaaacaaactggcccatacaccttttcttgtcagaagcttggtcagatattagtgcggatttatggtgaaaattcagagcttttaccttcagtattattatcattgagtggcgagaaagggtacagaaataactcaattagtagttctggtggaaccttcacctttgacaacttatttcctggaagtttctatctccgaccacttctaaaggaatataaatttaatccgtcagcagtagctattgatcttaattctggagagtctagggaggctgaatttcgtgcaaccagagtggcttacagtgccatgggttctgtaacactattaactggccaaccaaaggagggtgtttttgttgaagcaagatctgaatccacaggtttttatgaggaagctaccacggattcttttggtagatttcgtcttagaggacttgtgcctggatcgacttactctataagagtggctgcaaaagataatcttcagtttgcagcagttgagcgtgcttcacctgaatatttgtcagttaatgttggtcatgaagacatgactggtattgattttgtggtttttgaacgccccgaagtaacaatcttgagtggccatgtggaaggagatggcattgatacgttacatccgcatctctctgttgaaatcagatcagcaacagactcttctagagtagaagctgtacttcctcttcctctttcatactactttgaagtccgagatttgcccaagggcaagcatcttgttcagcttcgatctggccttccatcacatacacataggtttgaatcggagttagtcgaagtagatctggaaaaggatccccaaatccatgttggtcccctcaaatataaaactgaggagcgtcatcaaaagcaggaactgaccccagcaccagtttttccgcttattgttggagtttctgtggttgcactggtgatcagtatgccaaggttaaatgacttataccagagcgctgtagggatgacttctctgggttcagggatggcaccgaccaaaaaggagccacgcaagaatatattaagaaagagagtgtaaatggcagattagcttagccttaggggtcgagaaatgagacatgacaaattgagcaatttcaagagtggaatagcttctggtttccccctcggttttagactataaagaaagagttgctgcatcatgaatgaactttctcaccagtcagcatgcacgatcgaataggttaatctgagcggtccaggactaagtagaatagacaagtttgttgtggcacgttgtttgcccctctttttgattgtacaacgaccaagtaaagcgtgcgcaatgacttctctatgacttacggatctggttcgccctttagcatatgtggtctagcgtggagcgtttataatataaatttaaata

SEQ ID NO: 199832 - DNA, 3277 bp, Zea Mays
gataatcactaacgctacaaccatatgattgcatggaaatccaatagtgggagtccacctatatttgtattcaaatgatgtaacgaaggtcccttgcccacaaggtttcagtgatgcacccaaggaaggtgcactttgccatgcaatatctggtgctgatgggaagttcacatttagatcactaccttgtggtagctatgagttgttgccatactacaagggagagaacaccgtatttgatatttcaccatcttcactttctgtttctgttgagcatagtcatttgacgattccccaaaaattccaggtcactggattttctgttggagggcgtgttatcgatggttatggtgctggtgtggagagtgccaatgttatagttgatgggcagttgagagccataacagatagtcttggatactatagactcgatcaggttacatccaagaagtatactataactgccgagaaggatcattataagttcaaccgtttggaggattttatgattttaccaaatttggcaagtattgatgatatcagatcagttagatatgatgtatgtggtattgttcgaacagttactctgaattcaaaagcaatggttactttaacacatggaccagaaaatgtaaagccacagcggaaattagtgggtgaaaatggacatttttgctttgaggttcctgctggtgaataccagttatctgcattacctgtagattccgaacgctcttctagtcttatgttttcaccgggatctattagcgtcaatgtaaatagcccgttgcttgatctggaattctctcagtcacaagtcaatgttcatggtaaagtctcatgcaaacagcaatgcagccagaacattctggtctcacttgttagattggctggcggagttgaacaggaaaagaagacaactacattggaacaagataatgttaattttgtgtttaagaaagtatttcctggaaaatatcgtgtagaggtgaagaattctttacccgagggcttagctaaggatgattggtgctgggaccagagtatcttgaatatagatgttggtactgatgatgtgagagacattgtgtttgtacaaaaaggctattggattgagctagtttcaactcatgatactaatgcttatattcagcagccagattcttctagacttgatttgttgataaagaaaggatcacaaagaatttgtgttgaaacttcagggcaacatgagattcatttaactaatccttgtatttcctttgggacctcgtctgttttgtttgatacagctaatttaatgccgatccatatcaatgcaaagaagtatcttgtaaaaggtgaaatccatgtggacatgagctccattcaggaaaacattgattccaaggacatagtcgtggatatcttgaagagtgatggcagtttcatagaaaagatatccacatcacttgttcttggaaaggacaatcaaaatgacttcactgcctttgagtactctatttgggctgaccttggggaggacttcatctttgtcccccatgattctagcattggaaggaacaaagtcctattttatccagcaagacagcagtattcagtttctatgaatggatgccaagatactgttcctctaatcactgcaagaactggtctatatcttgaaggatcagtgttacctgcaacttctgatgttgacatcaagattctagcagctggaaagagcaactatgcccatctgaacaaaggggatgtagcaacagaggcaaagacagattctgaaggatcattttttgcaggtcctttgtatgatgacatagtatataaagttgaagcttcaaaggatggttaccatctcaaacaaactggcccatacaccttttcttgtcagaagcttggtcagatattagtgcggatttatggtgaaaattcagagcttttaccttcagtattattatcattgagtggcgagaaagggtacagaaataactcaattagtagttctggtggaaccttcacctttgacaacttatttcctggaagtttctatctccgaccacttctaaaggaatataaatttaatccgtcagcagtagctattgatcttaattctggagagtctagggaggctgaatttcgtgcaaccagagtggcttacagtgccatgggttctgtaacactattaactggccaaccaaaggagggtgtttttgttgaagcaagatctgaatccacaggtttttatgaggaagctaccacggattcttttggtagatttcgtcttagaggacttgtgcctggatcgacttactctataagagtggctgcaaaagataatcttcagtttgcagcagttgagcgtgcttcacctgaatatttgtcagttaatgttggtcatgaagacatgactggtattgattttgtggtttttgaacgccccgaagtaacaatcttgagtggccatgtggaaggagatggcattgatacgttacatccgcatctctctgttgaaatcagatcagcaacagactcttctagagtagaagctgtacttcctcttcctctttcatactactttgaagtccgagatttgcccaagggcaagcatcttgttcagcttcgatctggccttccatcacatacacataggtttgaatcggagttagtcgaagtagatctggaaaaggatccccaaatccatgttggtcccctcaaatataaaactgaggagcgtcatcaaaagcaggaactgaccccagcaccagtttttccgcttattgttggagtttctgtggttgcactggtgatcagtatgccaaggttaaatgacttataccagagcgctgtagggatgacttctctgggttcagggatggcaccgaccaaaaaggagccacgcaagaatatattaagaaagagagtgtaaatggcagattagcttagccttaggggtcgagaaatgagacatgacaaattgagcaatttcaagagtggaatagcttctggtttccccctcggttttagactataaagaaagagttgctgcatcatgaatgaactttctcaccagtcagcatgcacgatcgaataggttaatctgagcggtccaggactaagtagaatagacaagtttgttgtggcacgttgtttgcccctctttttgattgtacaacgaccaagtaaagcgtgcgcaatgacttctctatgacttacggatctggttcgccctttagcatatgtggtctagcgtggagcgtttataatataaatttaaata

SEQ ID NO: 199833 - DNA, 3003 bp, Zea Mays
atgacctttgccatgggtcttatcctcacgtcacctccatcacttcttgggacgtgcatataccttgctgacagaagtgtccacatcaccattcaaatgggaaagggttcataattgtgttttagccatcacttgctccctcaaattcaacaaaaaaccaaggttacatccaagaagtatactataactgccgagaaggatcattataagttcaaccgtttggaggattttatgattttaccaaatttggcaagtattgatgatatcagatcagttagatatgatgtatgtggtattgttcgaacagttactctgaattcaaaagcaatggttactttaacacatggaccagaaaatgtaaagccacagcggaaattagtgggtgaaaatggacatttttgctttgaggttcctgctggtgaataccagttatctgcattacctgtagattccgaacgctcttctagtcttatgttttcaccgggatctattagcgtcaatgtaaatagcccgttgcttgatctggaattctctcagtcacaagtcaatgttcatggtaaagtctcatgcaaacagcaatgcagccagaacattctggtctcacttgttagattggctggcggagttgaacaggaaaagaagacaactacattggaacaagataatgttaattttgtgtttaagaaagtatttcctggaaaatatcgtgtagaggtgaagaattctttacccgagggcttagctaaggatgattggtgctgggaccagagtatcttgaatatagatgttggtactgatgatgtgagagacattgtgtttgtacaaaaaggctattggattgagctagtttcaactcatgatactaatgcttatattcagcagccagattcttctagacttgatttgttgataaagaaaggatcacaaagaatttgtgttgaaacttcagggcaacatgagattcatttaactaatccttgtatttcctttgggacctcgtctgttttgtttgatacagctaatttaatgccgatccatatcaatgcaaagaagtatcttgtaaaaggtgaaatccatgtggacatgagctccattcaggaaaacattgattccaaggacatagtcgtggatatcttgaagagtgatggcagtttcatagaaaagatatccacatcacttgttcttggaaaggacaatcaaaatgacttcactgcctttgagtactctatttgggctgaccttggggaggacttcatctttgtcccccatgattctagcattggaaggaacaaagtcctattttatccagcaagacagcagtattcagtttctatgaatggatgccaagatactgttcctctaatcactgcaagaactggtctatatcttgaaggatcagtgttacctgcaacttctgatgttgacatcaagattctagcagctggaaagagcaactatgcccatctgaacaaaggggatgtagcaacagaggcaaagacagattctgaaggatcattttttgcaggtcctttgtatgatgacatagtatataaagttgaagcttcaaaggatggttaccatctcaaacaaactggcccatacaccttttcttgtcagaagcttggtcagatattagtgcggatttatggtgaaaattcagagcttttaccttcagtattattatcattgagtggcgagaaagggtacagaaataactcaattagtagttctggtggaaccttcacctttgacaacttatttcctggaagtttctatctccgaccacttctaaaggaatataaatttaatccgtcagcagtagctattgatcttaattctggagagtctagggaggctgaatttcgtgcaaccagagtggcttacagtgccatgggttctgtaacactattaactggccaaccaaaggagggtgtttttgttgaagcaagatctgaatccacaggtttttatgaggaagctaccacggattcttttggtagatttcgtcttagaggacttgtgcctggatcgacttactctataagagtggctgcaaaagataatcttcagtttgcagcagttgagcgtgcttcacctgaatatttgtcagttaatgttggtcatgaagacatgactggtattgattttgtggtttttgaacgccccgaagtaacaatcttgagtggccatgtggaaggagatggcattgatacgttacatccgcatctctctgttgaaatcagatcagcaacagactcttctagagtagaagctgtacttcctcttcctctttcatactactttgaagtccgagatttgcccaagggcaagcatcttgttcagcttcgatctggccttccatcacatacacataggtttgaatcggagttagtcgaagtagatctggaaaaggatccccaaatccatgttggtcccctcaaatataaaactgaggagcgtcatcaaaagcaggaactgaccccagcaccagtttttccgcttattgttggagtttctgtggttgcactggtgatcagtatgccaaggttaaatgacttataccagagcgctgtagggatgacttctctgggttcagggatggcaccgaccaaaaaggagccacgcaagaatatattaagaaagagagtgtaaatggcagattagcttagccttaggggtcgagaaatgagacatgacaaattgagcaatttcaagagtggaatagcttctggtttccccctcggttttagactataaagaaagagttgctgcatcatgaatgaactttctcaccagtcagcatgcacgatcgaataggttaatctgagcggtccaggactaagtagaatagacaagtttgttgtggcacgttgtttgcccctctttttgattgtacaacgaccaagtaaagcgtgcgcaatgacttctctatgacttacggatctggttcgccctttagcatatgtggtctagcgtggagcgtttataatataaatttaaata

SEQ ID NO: 199834 - DNA, 4067 bp, Zea Mays
aagaataagagacaaagctgggtagtcgagggtaaaaaaaaccccctccctgctcctgtctgagcttcgccgtggcgtgcccgtttcgaccctggaaaatcacgaaatcgccccgacagcacacgaccgacctgtccccccttcaccgcatcagcaacatcccctctcctccctcgctccttcttcctcctcttcccgccgccgtcgtccgccgccgccgctggcttggcggccgcctctcgtacacccatcgcagttgcgggcgacgacgaccacatgactatgatgacgccgccccctctcgagcagcagcaggaggacgacgagatgctggtgccgcatcaggagctccctgtcgctggcccagaagcagccccacagccgatggaagttgttgcgcagacagagcctgccaccacagcggagagccagccgcctgaggacccgcagacgacgcgcttcacctggacgatcgagagcttcagccgtcttaacactaagaagcactactctgatgtatttgtcgttggaggatacaaatggcgtgtcctaattttccccaaggggaacaatgtggatcacttctcgatgtatttggatgttgcagattctgggaacctcccatacgggtggagccggtatgctcagttcagcttggctgttgtgaatcagatccatcctaagtatacgattcggaaagatactcagcaccaatttaatgcacgtgagagcgactggggtttcacatcatttatgcctttgagtgacctatatgacccaagcaggggctatcttgtgaatgacaccattattgtggaagctgaggttgctgtccgcagaatggttgattattggacttatgactcgaaaaaagaaacaggttttgtaggtcttaagaatcaaggtgctacctgttatatgaattctctccttcaaacgttataccatacaccatattttagaaaggctgtatatcatatgccaacaactgagaatgacatgccatctgggagtatccctttagccctgcagagcctgttttacaagctacagtatagtgacaacagtgtagcaacgaaagagttgactaaatcctttggatgggatacctatgattctttcatgcagcatgatgtgcaagaactcaacagagttctttgtgagaaactggaagataagatgaagggaactgttgtggaaggaacaattgaacaattattcgaaggccaccacattaattacattgagtgcattaacgtggactataaatctaacagaaaagaatcattttatgatctacaacttgatgtgaaaggttgtcgtgatgtttatgcatcatttgataagtatgtggaagtggagagtctagagggtgataacaagtaccatgcggagcgttatggcttacaggatgcaaggaaaggtgtgcttttccttgatttccctcctgttttgcagcttcaactgaagcgttttgaatatgattacatgcgagatacaatggttaagattaatgaccgctatgagttccctcttcaacttgatcttgatagagacaatggaaaatatctatctccagatgcagatcgaagtattagaaacctctatactcttcacagtgttcttgttcatagtggaggagtacatggtggtcactactatgctttcattcggccgacactctcggatcagtggtacaaattcgatgatgagcgggttacaaaagaagacactaaaaaggcacttgaagagcagtatgggggtgaggaagagttgcctcaaataaaccctggtttcaataacacaccattcaaattcacaaagtattcaaatgcctacatgcttgtctatatacgtgagaatgacaaggataaaataatgtgtaatgtcgatgagaaggatattgctgagcatttgcggataaggttgaagaaagaacaagaagagaaagagcacaagaagaaggagaagtctgaagctcatctctacactatcataaagattgctcgagacaaggatttaaaggagcaaattggtaaaaatatatattttgacctggtggaccatgaaaaagtttgcagcttccgcattcagaagcagttgccttttactgcattccaggaggaagttgcaaaggaatttggcatcccagtacagtttcagcgcttctggttgtgggctaagaggcagaaccatacataccgcccgaatcgtccattgaccccccatgaggaagcacaatcagtcgggcagcttagggaagtctcaaataaggcacacaatgctgagctgaagctgtttttggaagttgaacttggaccggagctatgtccaattcgtccacctgagaagagcaaagaagacatacttcttttcttcaagctctataatgccgagaaggaagaactttgttttgtcggtaggctttttgtgaaggctctgggaaaaccgtctgaaatattgacaaaactgaatgaaatggctggattttctccaaatgaagaaattgagctatatgaggaaattaagtttgagccaaatgtgatgtgcgaacatattgacaagaaacttactttccgttctagtcagcttgaagatggagacatcatctgtttccaaaaggctcctgttccagatggtgatccacaagtgcgctatccagatgtcccttcattcttggagtatgttcacaataggcaggttgtgcactttcggtctctggacaaaccaaaggatgatgatttttctttggaattcaacctaaaccacaacctattagatataggggagtagaacatctactggatatgcttgtgcattataaccagacttctgatatcttgtattatgaggttctggacattccactgccagaattgcagtgtttgaaaacgcttaaagttgcattccaccatgcaacaaaagatgaggtggttgttcatagcataagacttccaagaaacagcaccatcagtgacgtgatcactgatttgaaaaccaaggttgaactatcaaatcctgatactgagctccgcttgcttgaagtattttaccacaagatttataagatttttccgcctcatgagaagatagagaacataaatgatcagtactggacattacgagctgaggagattccagaggaagagaagaatcttggcccacatgaccgtttgattcatgtttatcattttatgaaagaccctaatcagaatcagcagattcagaatttcggagatccttttttgatggttatccgtgaagttgagactgctgcagaggtactggagcgcatccaaagaaaacttagagttccggatgaggacttctccaagtggaagcttgcattcatatccatgaaccggccagagtacctccaggacactgatgttgtatcagcacgttttcagaggagagatgtatatggtgcttgggaacaataccttggcttggagcacaccgatacaacatcgaaaaggtcttacacagccaatcagaatcggcacacctatgagaagcccgtgaaaatttataattgagaaaacttaaagtttcaatcgattgacggaggcctcgacaacagtatgcccaagatgatgaggcttagaacagaaaaattggcagaggaatatagttgctgcctgtgctgaggcctatacaagcccatgaatgccacgtcaaccttcagtgttgttactgctgttgtctattggttcttctcgaggctttgcttccaagcaaccaagcatgtgtgttggttttttcatcgtgtctagtatgatggcccctgctaggatagtttgcttaatttgtagagcaaagcgagtacataaaaaaagatttttggtagggggcatgtatacaggattatagccgatactgattgctgccgcttgctgctgtgggaacaatggcagagattgtataatgggtttgttattggttcctaattttcgtgatgttgagaaatgtaagaggagaaccgcgtggatagtacagttttgagttccagcctaggctgtttgttgcaacttggcatatttggtataatattctgctttccacaa

SEQ ID NO: 199835 - DNA, 1673 bp, Zea Mays
tgctgaaagcctgaaactgctcaagtagcgcgcaacgacaagagcaacgaggaacatcagttaggactacctccacaaattgagcatcggttaccccattgcatcgtcctcttcggcggcgctggcgcccacaccaccgaaccctcttccagcttccttccacccgagcacgccggtcacccatcatcgccgaagccctccccctcctgcttcagctgtgctggtattagattagatcaaagtggaccgcgtcgggttgggtccagtcctttcattgcggttgcagattcctctcctgcgaggcacgagctgagtcctatccctatccgcccttgttgcagcggtgcggaaggcaatggtggggttgggatggagagtcggctcaaaggtgcagagatggggccggagctgcctccggggtttctcttctgctgcagttccgtctcagctggagaatgtcggattcatcggacttgggaacatgggttcccatatggcaaggaacttgatcacggctggatataaagtgactgttcatgatatgtaaattcctgccaatccttatactactgttcatgatatgcgtcacagagttcattgtttttttcccttccagttcaaaactggtttcttcttatatctcagcttaatggactgttcttgtttgataaacattgaatctatctatcagaaatgaaaattctatgaagaaattctcagaggatggaatccctacaaaacagtctccacttgaagtatcagaatcgagtgatgtcataattaccatgcttccttcatctactcatgttttagaagtatacaatggacccaatggcttgctttgtcggggcgaacgcttgggcccatggttatacatagattcatcaacagttgatccacaaacatcaagaaagatatcgacagccatctcaagatgccttttaaaagaaaagaaaggtaagttccaccatataacagtaaagacatagggcctgtttgtttcagcttatagattatataatctagattataatctagattatataatctggattataatctatggagattataatctgtatgtagctgtctggtagttcagattatacgtatgcagattaatgttctgtgagacacaatgacaacaatgctcttgtttgtttagttgtcttctttttttacggtttggcattccatcgattcatacaactatttgcaaaataggaaattaaaattatgccaaatacaccattggaaagctacaaatttcgtttgtaaacatcagtcatagagactggtatacaatggcagtctttataagcatttcatcgattatgtggcgcacacataaaccatatagtgagcagcatcaatggagctagctcctatggtaaatagtccctgctgcgacatcaatggatcatcaaaagggagttgtgtttgctcgtcggggttgcgtttggtcgccggagcaacgcttgctcgcggcgaggacaccggagctgcgttcaggctgcggcgtgaaagcacgcccagaggcgacgccgccattcccaaggctgcacccgctccaccgttgccgaagcattccgcagagccattgtagatgccgcgctcgccgacgccacaatgttccccacgtgaagaggatcaacccaggagagggactcctg

SEQ ID NO: 199836 - DNA, 2192 bp, Zea Mays
cccacacgtcatcctcccctaaaccctccgccaccttttcccgaaagccctgccctttttatgccagcccgaaccatccgggtccggggcatcggcattcagcacagcagccacctcttaccacgccccacggcaccaccccaacgtgatggcggtgagcaacaacatcacggcatgcgtgacgctgctggcgctgatctgcgcggtgcccgtgatcgcgtcgggggtgtggttcgcgtcggcgcagggcgaggagtgcgcgcgcctggcgcggtggcccgtggccatcctgggcgggctgctcctgctggccgcgctggcgggcttcgtgggcgcgtactggaaccggcgcggcctgcttgccttctacctcttcgccatggcgtcgctcgtcgtgctcctcatcgcgctcctcgccttcgccttcgccgtcacccgcgggtccggcgcctaccccgtgctcggccgcgcctacgacgactaccgcctcgacggcttctccatgtggctccgcgggtacgtctccgacgaccccgggcgctgggacaaggtcagggcctgcctcgccgtctccgacacctgcaagaagctcgcgcgccaggccgccttcaccagcgcagaccagttctatcagtcgcacctctccccgctccagtccgggtgctgcaagccgccgtcggtgtgcgggttcagctacgtgagcccgacggtgtggtccgccccggcggcgcggccggcggcggacgcggactgcgggctgtggagcaacgacccggggcagctgtgctacgggtgcgagtcctgcaaggcgggcctcctggaggcgctccgggaccagtggcacaaggccaacgtcgccctcgtcgtcgccaccgtcgccctcgtcatcctctacctcgtcggctgcagcgcctacaagaacgcgcaggccgccgccatcttcggacgccgcaagtattagctagctagctgccatgttagtttttttttgcgcttttttttctttattgtcatgtgggttgtggattatggattgcgtatgtgtgtcccccctggtggagagaagcatttgtagcggtggcgtggtgtgtgtttccggacttggttcatcatggtagtgtgatacatgtgtaagattagttactttaattactaattgtgctgttttcctctttccctgttcgccgacgagtaatgtatctggtttgaagattagttactttactaatggtttgaagacgactaagggcttgttcgttttgctctcaatccatgtggattgggtgggattggatgggtttcaatcccaaacaagtcaaaatcgttcacaattttttccaatcccatccaatccatatgggataggaataaccgaacaagccctaatagattatagatgtgggttgggcctgtggaaagatcaccgatggccttggtagacggcagtagtaatacacaggggagcaggatgttatttgtttggcaatggaatggagacacgccttgccgtcagtagtgctacacccgttgctcctcgtcccgtgcgtgcttgggcggctggccgtcagcgtcaggcggcgggtggcacctgctgctgaacaccctgaaggcggagacgagtgagagcgcggcgaagcaggccagcgcggcggcgtgcagcgccagcgacaccgtggccttcccgcagaaccggccgaagtaggagcacgcctcgccccacgacacgccccggtcgccgtgccgcgccagctgcagcagctccgccgccgccgaggccgacgtcaccagcaggtatgccgacgcctgaatccggagagatcggagaacttgacctccccgtaggtgtcgtctgcctgcgcgttggtggccatctcccacagggaggccaaggagagcgggacgacgcagagcctgagcgccatctcggggaccttgaggcccgccgccatgatcctggactcagcgtgtgcgcgtgccgtgctgtggaggaaggggaataagaagaagaagaagacgacgacgaccgagagaggaccagggcttgactggtgcacgcacgcaccaactccataccactagcgtacaaagcgatgaatgcgcatgggctggcccatggaatgtattgagagagtgagatggaatgatctcaaagtttatctaacttttttcttttgactaggggcatgttcaga

SEQ ID NO: 199837 - DNA, 2612 bp, Zea Mays
cccacacgtcatcctcccctaaaccctccgccaccttttcccgaaagccctgccctttttatgccagcccgaaccatccgggtccggggcatcggcattcagcacagcagccacctcttaccacgccccacggcaccaccccaacgtgatggcggtgagcaacaacatcacggcatgcgtgacgctgctggcgctgatctgcgcggtgcccgtgatcgcgtcgggggtgtggttcgcgtcggcgcagggcgaggagtgcgcgcgcctggcgcggtggcccgtggccatcctgggcgggctgctcctgctggccgcgctggcgggcttcgtgggcgcgtactggaaccggcgcggcctgcttgccttctacctcttcgccatggcgtcgctcgtcgtgctcctcatcgcgctcctcgccttcgccttcgccgtcacccgcgggtccggcgcctaccccgtgctcggccgcgcctacgacgactaccgcctcgacggcttctccatgtggctccgcgggtacgtctccgacgaccccgggcgctgggacaaggtcagggcctgcctcgccgtctccgacacctgcaagaagctcgcgcgccaggccgccttcaccagcgcagaccagttctatcagtcgcacctctccccgctccagtccgggtgctgcaagccgccgtcggtgtgcgggttcagctacgtgagcccgacggtgtggtccgccccggcggcgcggccggcggcggacgcggactgcgggctgtggagcaacgacccggggcagctgtgctacgggtgcgagtcctgcaaggcgggcctcctggaggcgctccgggaccagtggcacaaggccaacgtcgccctcgtcgtcgccaccgtcgccctcgtcatcctctacctcgtcggctgcagcgcctacaagaacgcgcaggccgccgccatcttcggacgccgcaagtattagctagctagctgccatgttagtttttttttgcgcttttttttctttattgtcatgtgggttgtggattatggattgcgtatgtgtgtcccccctggtggagagaagcatttgtagcggtggcgtggtgtgtgtttccggacttggttcatcatggtagtgtgatacatgtgtaagattagttactttaattactaattgtgctgttttcctctttccctgttcgccgacgagtaatgtatctggtttgaagattagttactttactaatggtttgaagacgactaagggcttgttcgttttgctctcaatccatgtggattgggtgggattggatgggtttcaatcccaaacaagtcaaaatcgttcacaattttttccaatcccatccaatccatatgggataggaataaccgaacaagccctaatagattatagatgtgggttgggcctgtggaaagatcaccgatggccttggtagacggcagtagtaatacacaggggagcaggatgttatttgtttggcaatggaatggagacacgccttgccgtcagtagtgctacacccgttgctcctcgtcccgtgcgtgcttgggcggctggccgtcagcgtcaggcggcgggtggcacctgctgctgaacaccctgaaggcggagacgagtgagagcgcggcgaagcaggccagcgcggcggcgtgcagcgccagcgacaccgtggccttcccgcagaaccggccgaagtaggagcacgcctcgccccacgacacgccccggtcgccgtgccgcgccagctgcagcagctccgccgccgccgaggccgacgtcaccagcagagaggaagaggagaagctaagatggtgtgctgggcgggcgagacagagcgacctgatccatgacgagaaccacccagtcgtagcgcgcggcgaggggccgcttgaaggacgacgccaagacggaggctacagcgtaggcggctgtgacggcgttgacgccaaccaaatagctagcaaaacgacatcgatttcttttttttagctgctagcatcatgcatgacgatgcgctctctctcaaggagagaactaataatccaacacaaaaaaaaaattatgctacagattcgagcagggtggagaggaaatcaaacgagagtgctagcagtccaataatgaagggttcagttgtaatgcttactactggaaggccggtctaaataaactacacaccaattgatgccggcggcggcggatcgatgctttgtacagacctgaatccggagagatcggagaacttgacctccccgtaggtgtcgtctgcctgcgcgttggtggccatctcccacagggaggccaaggagagcgggacgacgcagagcctgagcgccatctcggggaccttgaggcccgccgccatgatcctggactcagcgtgtgcgcgtgccgtgctgtggaggaaggggaataagaagaagaagaagacgacgacgaccgagagaggaccagggcttgactggtgcacgcacgcaccaactccataccactagcgtacaaagcgatgaatgcgcatgggctggcccatggaatgtattgagagagtgagatggaatgatctcaaagtttatctaacttttttcttttgactaggggcatgttcaga

SEQ ID NO: 199838 - DNA, 3349 bp, Zea Mays
cccacacgtcatcctcccctaaaccctccgccaccttttcccgaaagccctgccctttttatgccagcccgaaccatccgggtccggggcatcggcattcagcacagcagccacctcttaccacgccccacggcaccaccccaacgtgatggcggtgagcaacaacatcacggcatgcgtgacgctgctggcgctgatctgcgcggtgcccgtgatcgcgtcgggggtgtggttcgcgtcggcgcagggcgaggagtgcgcgcgcctggcgcggtggcccgtggccatcctgggcgggctgctcctgctggccgcgctggcgggcttcgtgggcgcgtactggaaccggcgcggcctgcttgccttctacctcttcgccatggcgtcgctcgtcgtgctcctcatcgcgctcctcgccttcgccttcgccgtcacccgcgggtccggcgcctaccccgtgctcggccgcgcctacgacgactaccgcctcgacggcttctccatgtggctccgcgggtacgtctccgacgaccccgggcgctgggacaaggtcagggcctgcctcgccgtctccgacacctgcaagaagctcgcgcgccaggccgccttcaccagcgcagaccagttctatcagtcgcacctctccccgctccaggtcttacttatcgatgaccgacaaaagtgtggcaagatttacttatacgtgacaaactgtggcgcagaatttgaatgtttaatcttaggcaacttagacaagtgtgatataaaattatatggcaatttttgatactataggtatagaaccgaagtctagttctctctggggacgcgcgaggaccctggtcggaggcaggcaggggtctcatgggacggtgcattgggagtgatacagatactgtttttttttccttctagttttcttaactgcggctctctatgcaatttccgtttccttaaactcgatttgggggtagattgtcgctgcgagtacagacatctagcgtgggcaggcacacacagcgataggatggatagtagtactggtgtgtcctcctcctcctctacgcagagtttgtctgtcagacagacagattagcaaattacacactggcacactgcactgcactatctctcagggaaaggaaaaaaaaagaagtacatctgacgaccgacgctctgcattatattattactgtgcaaaaaactaactcattcgtggacgtggtgcacgcacgtacagtccgggtgctgcaagccgccgtcggtgtgcgggttcagctacgtgagcccgacggtgtggtccgccccggcggcgcggccggcggcggacgcggactgcgggctgtggagcaacgacccggggcagctgtgctacgggtgcgagtcctgcaaggcgggcctcctggaggcgctccgggaccagtggcacaaggccaacgtcgccctcgtcgtcgccaccgtcgccctcgtcatcctctacctcgtcggctgcagcgcctacaagaacgcgcaggccgccgccatcttcggacgccgcaagtattagctagctagctgccatgttagtttttttttgcgcttttttttctttattgtcatgtgggttgtggattatggattgcgtatgtgtgtcccccctggtggagagaagcatttgtagcggtggcgtggtgtgtgtttccggacttggttcatcatggtagtgtgatacatgtgtaagattagttactttaattactaattgtgctgttttcctctttccctgttcgccgacgagtaatgtatctggtttgaagattagttactttactaatggtttgaagacgactaagggcttgttcgttttgctctcaatccatgtggattgggtgggattggatgggtttcaatcccaaacaagtcaaaatcgttcacaattttttccaatcccatccaatccatatgggataggaataaccgaacaagccctaatagattatagatgtgggttgggcctgtggaaagatcaccgatggccttggtagacggcagtagtaatacacaggggagcaggatgttatttgtttggcaatggaatggagacacgccttgccgtcagtagtgctacacccgttgctcctcgtcccgtgcgtgcttgggcggctggccgtcagcgtcaggcggcgggtggcacctgctgctgaacaccctgaaggcggagacgagtgagagcgcggcgaagcaggccagcgcggcggcgtgcagcgccagcgacaccgtggccttcccgcagaaccggccgaagtaggagcacgcctcgccccacgacacgccccggtcgccgtgccgcgccagctgcagcagctccgccgccgccgaggccgacgtcaccagcaggtatgccgacgcctgcacgcagcacaccgcgcaccagcacatgtcagtactcctgtcctgatcggtggttttgttttgtccatggaaaattgccaacgaactgaatacaggtataagtaactaataaagagcatgtactgtacgtcgaatagagaggaagaggagaagctaagatggtgtgctgggcgggcgagacagagcgacctgatccatgacgagaaccacccagtcgtagcgcgcggcgaggggccgcttgaaggacgacgccaagacggaggctacagcgtaggcggctgtgacggcgttgacgccaaccaaatagctagcaaaacgacatcgatttcttttttttagctgctagcatcatgcatgacgatgcgctctctctcaaggagagaactaataatccaacacaaaaaaaaaattatgctacagattcgagcagggtggagaggaaatcaaacgagagtgctagcagtccaataatgaagggttcagttgtaatgcttactactggaaggccggtctaaataaactacacaccaattgatgccggcggcggcggatcgatgctttgtacagacctgaatccggagagatcggagaacttgacctccccgtaggtgtcgtctgcctgcgcgttggtggccatctcccacagggaggccaaggagagcgggacgacgcagagcctgagcgccatctcggggaccttgaggcccgccgccatgatcctggactcagcgtgtgcgcgtgccgtgctgtggaggaaggggaataagaagaagaagaagacgacgacgaccgagagaggaccagggcttgactggtgcacgcacgcaccaactccataccactagcgtacaaagcgatgaatgcgcatgggctggcccatggaatgtattgagagagtgagatggaatgatctcaaagtttatctaacttttttcttttgactaggggcatgttcaga

SEQ ID NO: 199839 - DNA, 2654 bp, Zea Mays
cccacacgtcatcctcccctaaaccctccgccaccttttcccgaaagccctgccctttttatgccagcccgaaccatccgggtccggggcatcggcattcagcacagcagccacctcttaccacgccccacggcaccaccccaacgtgatggcggtgagcaacaacatcacggcatgcgtgacgctgctggcgctgatctgcgcggtgcccgtgatcgcgtcgggggtgtggttcgcgtcggcgcagggcgaggagtgcgcgcgcctggcgcggtggcccgtggccatcctgggcgggctgctcctgctggccgcgctggcgggcttcgtgggcgcgtactggaaccggcgcggcctgcttgccttctacctcttcgccatggcgtcgctcgtcgtgctcctcatcgcgctcctcgccttcgccttcgccgtcacccgcgggtccggcgcctaccccgtgctcggccgcgcctacgacgactaccgcctcgacggcttctccatgtggctccgcgggtacgtctccgacgaccccgggcgctgggacaaggtcagggcctgcctcgccgtctccgacacctgcaagaagctcgcgcgccaggccgccttcaccagcgcagaccagttctatcagtcgcacctctccccgctccagtccgggtgctgcaagccgccgtcggtgtgcgggttcagctacgtgagcccgacggtgtggtccgccccggcggcgcggccggcggcggacgcggactgcgggctgtggagcaacgacccggggcagctgtgctacgggtgcgagtcctgcaaggcgggcctcctggaggcgctccgggaccagtggcacaaggccaacgtcgccctcgtcgtcgccaccgtcgccctcgtcatcctctacctcgtcggctgcagcgcctacaagaacgcgcaggccgccgccatcttcggacgccgcaagtattagctagctagctgccatgttagtttttttttgcgcttttttttctttattgtcatgtgggttgtggattatggattgcgtatgtgtgtcccccctggtggagagaagcatttgtagcggtggcgtggtgtgtgtttccggacttggttcatcatggtagtgtgatacatgtgtaagattagttactttaattactaattgtgctgttttcctctttccctgttcgccgacgagtaatgtatctggtttgaagattagttactttactaatggtttgaagacgactaagggcttgttcgttttgctctcaatccatgtggattgggtgggattggatgggtttcaatcccaaacaagtcaaaatcgttcacaattttttccaatcccatccaatccatatgggataggaataaccgaacaagccctaatagattatagatgtgggttgggcctgtggaaagatcaccgatggccttggtagacggcagtagtaatacacaggggagcaggatgttatttgtttggcaatggaatggagacacgccttgccgtcagtagtgctacacccgttgctcctcgtcccgtgcgtgcttgggcggctggccgtcagcgtcaggcggcgggtggcacctgctgctgaacaccctgaaggcggagacgagtgagagcgcggcgaagcaggccagcgcggcggcgtgcagcgccagcgacaccgtggccttcccgcagaaccggccgaagtaggagcacgcctcgccccacgacacgccccggtcgccgtgccgcgccagctgcagcagctccgccgccgccgaggccgacgtcaccagcaggtataagtaactaataaagagcatgtactgtacgtcgaatagagaggaagaggagaagctaagatggtgtgctgggcgggcgagacagagcgacctgatccatgacgagaaccacccagtcgtagcgcgcggcgaggggccgcttgaaggacgacgccaagacggaggctacagcgtaggcggctgtgacggcgttgacgccaaccaaatagctagcaaaacgacatcgatttcttttttttagctgctagcatcatgcatgacgatgcgctctctctcaaggagagaactaataatccaacacaaaaaaaaaattatgctacagattcgagcagggtggagaggaaatcaaacgagagtgctagcagtccaataatgaagggttcagttgtaatgcttactactggaaggccggtctaaataaactacacaccaattgatgccggcggcggcggatcgatgctttgtacagacctgaatccggagagatcggagaacttgacctccccgtaggtgtcgtctgcctgcgcgttggtggccatctcccacagggaggccaaggagagcgggacgacgcagagcctgagcgccatctcggggaccttgaggcccgccgccatgatcctggactcagcgtgtgcgcgtgccgtgctgtggaggaaggggaataagaagaagaagaagacgacgacgaccgagagaggaccagggcttgactggtgcacgcacgcaccaactccataccactagcgtacaaagcgatgaatgcgcatgggctggcccatggaatgtattgagagagtgagatggaatgatctcaaagtttatctaacttttttcttttgactaggggcatgttcaga

SEQ ID NO: 199840 - DNA, 469 bp, Zea Mays
ggagtttgaatacggggatgtgaatgggtgctcaaggaccacaaatacagaaggtattagagaggctgactggacagtctactgttcctaatgttttcatcggtggaaagcatgttggtggctgtacagatactgtgaagctgtatcgcaagggggagctagctagcatgctgtccggcctggatatcaacattaacaactcatgacaagtttgaccatgttttgcaagtatagttttgatgtttgagagacttgggcagtcatgtattgagtttttttaacttatgcagattctttatgtctgcaagaaaaaaaaaagctgtgtcatttacacatttttgtttggtactctgattaaatcattgaatttgaccactgtatgcaaattgctagaaagaaaaacgaacgaactcacagattatgtgttcttggcaatttcttctcttattttttcccccaagcacataca

SEQ ID NO: 199841 - DNA, 824 bp, Zea Mays
agcctatcctacgacacaagcaaagcaaagcagctcaaaaaactttagccagctatcaagacatggctccacttgttgctgctgccacgaatcacactgcccatagaagccacatagtaggacccaacaatgagaattttccaaggcaccaaccttgttcatcacaaaacagaaacaagagactcaggcttaggtcacgagcacaaaggataagcagtcagctgcttgcaagccgaaagcttatgccatggcaaatccctaaaagggactggtttcctcctagcttcatctttggtgccgccaccgcagcataccaaattgagggcgcctggaatgaagatgggaaggggccaagcaattgggatcacttctgccacaattatccggattggatactggacggaagcaatggggacactggagccaattcctatcatatgtaccctgcggatgtcagattgctaaaggaaataggcatggacgcgtacagattctccatctcttggtccagaatactgccgaagggaacgctcgaaggaggtattaatcaggccggcatcaagtactacaaaaagctcatcaacttattgatagagaacggaatagagccatttgtaacaatttttcattgggacgtccctcaagcactggaagacaagtacggtggctttttaggcgacaggattgtgaatcggggacgttgacacaaaggacaatcctctatccatgcaagatgcgttggaggactacaagaggctagattacctccagcgccacatctcagttattaaagaatcaatagacttggggcatccatttcatgc

SEQ ID NO: 199842 - DNA, 1420 bp, Zea Mays
agcctatcctacgacacaagcaaagcaaagcagctcaaaaaactttagccagctatcaagacatggctccacttgttgctgctgccacgaatcacactgcccatagaagccacatagtaggacccaacaatgagaattttccaaggcaccaaccttgttcatcacaaaacagaaacaagagactcaggcttaggtcacgagcacaaaggataagcagtcagctgcttgcaagccgaaagcttatgccatggcaaatccctaaaagggactggtttcctcctagcttcatctttggtgccgccaccgcagcataccaaattgagggcgcctggaatgaagatgggaaggggccaagcaattgggatcacttctgccacaattatccggattggatactggacggaagcaatggggacactggagccaattcctatcatatgtaccctgcggatgtcagattgctaaaggaaataggcatggacgcgtacagattctccatctcttggtccagaatactgccgaagggaacgctcgaaggaggtattaatcaggccggcatcaagtactacaaaaagctcatcaacttattgatagagaacggaatagagccatttgtaacaatttttcattgggacgtccctcaagcactggaagacaagtacggtggctttttaggcgacaggattgtatgggaaatccatggatctacatgtaccctaaaggcctaaaggatcttcttatgatcatgaagaacaaatacggaaacccgcctatctatatcaccgagaacggaatcggggacgttgacacaaaggacaatcctctatccatgcaagatgcgttggaggactacaagaggctagattacctccagcgccacatctcagttattaaagaatcaatagacttgggggcggacgtgcgcggccacttcacatggtctctgttggacaacttcgagtggtctagtggctacaccgagcgttacggcatcatctacgtcgaccgtgacgacggctacaggcgctacctgaagcgctcagctaagtggctgagagagttcaacggagctgccaaaaaggctgaaaagaaggttcttacgccagcttagaatgtagtggtgtgtagtttcagttcagctgtgtgtctgatgtgtatggccgtgggatgaaacaagctagctagaatgtagtggtgtgtagtttcaattcagtagtgtgtgtccgacccgttttatgcaaataaataattaatggacgtgtgatccatttgtcgatatcactatcgatcggtaatgttgaattactacgtacgatgtcctgtttttttaggcaaacaccaagggttcaaccgtccataaatctgttatatcggtgatgaacaacagcacgtaaccaaggataaagggttcacccataga

SEQ ID NO: 199843 - DNA, 3135 bp, Zea Mays
cccgcacaggccacagcctctctcccctctgctcccgcggcccgcgcagcgcacagcatacagcgcaccgagctgcggccaccgcagcgaacagcaaagcacctccgactccaagtcgcgagagccttctcattcgtcttcctcctcttccacccatcctgcctgctcacttccgttccgtagtccagctagatccccgggcaaccgatccaccgagaagcttgtggttgtggcggcggcggagagggaagcgggaggtcggaggccaccgtgcgtcggaggtggacgagggagcgaggcggcgccagaccgaggttgcgtcgggctcgatttctactgggctgctgtctgctgagtttacggaagtgtttggccctagaagagttgaagataaggagtggagctaggtttaaactctggtgacttggttgttgcgtgcaacgaatcaactatgctgagtttttctgtagagtaacagaaattggatcaattcaagtagaggtctaggaggagatatgaggtactacttgcgtcaggtccagcgtttggttggagatatggaaggaggagctctcttgtttatagacgacctcaactccaagtgacaaagcgaacagctgttgaacgtttcccttctatttctgtttctttttgccggatttggagatggaggtgaattcctctggcgaggaaactgtggtaaaggtaagaaagccgtacacaataacgaagcagcgggagcggtggacagaggctgaacacaaacggttccttgaagccttgaaactttatggcagagcatggcagcgcatagaagagcatgttgggacaaagacagccgtgcagatcagaagtcacgctcaaaagttcttcactaagttggaaaaggaagctatgaacaatggtacttctccggggcaagcccatgacattgacatacctccaccacggcctaaaagaaagccaaacagtccatatcctcgaaaaagttgtctcagctccgagacacaaaccaaagaacttccaaatgacaagtcaacaaaaccaaatatgcccttgagcaatgggcatgtaaaaatggtaggcgatgcatctcttcagaattttcaaaggaaggagttgtctgaaaaaggaagtcgctcggaagttcttaatctcttccgtgatgccccatctgcatcattttcttcagttaacaaaagctcttcaaatcatggggcacccaggaggaccgaggcaagtaaaacagaaagccgagatatgtccatcatggaaaataattcttttaaccccaacacccaagaggatgtaaaggtgatcagtgatcaggaaatggaaaggcttaatggtatccagatcagatctaaatgtgaacattctcatgaggggtatttggacatctcaacgcaacaaatgaagctaatgccaaagtctgtggagacaacatatgtggatgaacaaactgcaagagcttcacacaccctagcagagagcgacgggacagctagcattccagtgactgtacctgaaggaactcatcctgatcaaacaagtgatcaagtgggaatcaatggaagcatgaacccatgcatccatccaatggtttctgctgacccaaaatttggtagtagtgccacaccacagactttccctcataattatgcggcctttgctccaatgatgcagtgcaactgtaaccaagatacgtacaggtcattcaccaacatgtcatccaccttctccagcatgcttgtttccacgttgttgtcaaaccctgccatccatgcagccgccaggctcgcagcatcatactggccagcagctgaaggtaacactcctattgatccgaatcaagaaaaccctgcagatggcgtccaaggaaggaacataggctctcctccaagcatggtttctattgtagcagctacagttgctgcagcatctgcatggtgggcaacacaaggtcttctccctttcttcgctccacccgtggcttttccatttgtaccagctcctagtgctgcctttcccacagttgatgttccacgaccttcagagaaagacagagattgcccagctgaaaatgcacagattgaatgccaagaagctcgaaaacaggagctggcacaaatgatgcattcaggaataagaaaaagcaggatcgctcttcatgcggttctaacacaccttcaagtagtgatgtagatgcgggcaatgttcctgaggaggacaatgctaatgagaaggcgaagcaagcctcctgcagcaactcttcagctggtgacactaaccaccgcagatttagaagcaatggaagcacaagtgattcatggaaggaagtttccgaagagggtcgtctggctttcgatgcgctgttcagtagggaaaagcttccgcaaagcttttctcccccacaagcagtagactcgaaggaggttgccaaggaggaggaagatgaagtgaccacagtggcagttgacctcaacaagaatgccacaagcattgatcatgatgacctcgacacaatggatgagcccagggcttcctttcccaatgaattgtcgcacctgaagctgaaatcgcgccgtacaggcttcaaaccatacaagagatgttctgtggaagcgaaggaaaaccgggtgccggctagcgacatggttggtaccaagaggattcgtcttgatagcgaagcatccacataattgatttcttcaaagttatatttacatctaagctactataggacttcagatcttgcaatgcagtgcttcattaaaactcaatctgttgtgtgctgtattttaatgcttgtcaagcagcccgctagactgctttaaaaccttatctcgtagagtctgatttaagcatcatgcaactatcaaacttttttttttggtcaaaatgtattttccttatgttttatatttttggaaaggaaaataattgaaatattatttattttgaaggctcatgcaaaggtttatttgatcaaggtgtaggataggctgagcgagagggtgaacattatgactaatatagggcagaaaatatttgaacattgtcatgtttgctgttgctagaagattgtgtagagaaagtactcacataaatgtttcacttctattttaacttgtg

SEQ ID NO: 199844 - DNA, 3322 bp, Zea Mays
cgcacaggccacagcctctctcccctctgctcccgcggcccgcgcagcgcacagcatacagcgcaccgagctgcggccaccgcagcgaacagcaaagcacctccgactccaagtcgcgagagccttctcattcgtcttcctcctcttccacccatcctgcctgctcacttccgttccgtagtccagctagatccccgggcaaccgatccaccgagaagcttgtggttgtggcggcggcggagagggaagcgggaggtcggaggtaggcgcggatgccactgttgtgccggcgccggcggggccggtgatgcccgcttgagctgggccaccgtgcgtcggaggtggacgagggagcgaggcggcgccagaccgaggttgcgtcgggctcgatttctactgggctgctgtctgctgagtttacggaagtgtttggccctagaagagttgaagataaggagtggagctaggtttaaactctggtgacttggttgttgcgtgcaacgaatcaactatgctgagtttttctgtagagtaacagaaattggatcaattcaagtagaggtctaggaggagatatgaggtactacttgcgtcaggtccagcgtttggttggagatatggaaggaggagctctcttgtttatagacgacctcaactccaagtgacaaagcgaacagctgttgaacgtttcccttctatttctgtttctttttgccggatttggagatggaggtgaattcctctggcgaggaaactgtggtaaaggtaagaaagccgtacacaataacgaagcagcgggagcggtggacagaggctgaacacaaacggttccttgaagccttgaaactttatggcagagcatggcagcgcatagaagagcatgttgggacaaagacagccgtgcagatcagaagtcacgctcaaaagttcttcactaagttggaaaaggaagctatgaacaatggtacttctccggggcaagcccatgacattgacatacctccaccacggcctaaaagaaagccaaacagtccatatcctcgaaaaagttgtctcagctccgagacacaaaccaaagaacttccaaatgacaagtcaacaaaaccaaatatgcccttgagcaatgggcatgtaaaaatggtaggcgatgcatctcttcagaattttcaaaggaaggagttgtctgaaaaaggaagtcgctcggaagttcttaatctcttccgtgatgccccatctgcatcattttcttcagttaacaaaagctcttcaaatcatggggcacccaggaggaccgaggcaagtaaaacagaaagccgagatatgtccatcatggaaaataattcttttaaccccaacacccaagaggatgtaaaggtgatcagtgatcaggaaatggaaaggcttaatggtatccagatcagatctaaatgtgaacattctcatgaggggtatttggacatctcaacgcaacaaatgaagctaatgccaaagtctgtggagacaacatatgtggatgaacaaactgcaagagcttcacacaccctagcagagagcgacgggacagctagcattccagtgactgtacctgaaggaactcatcctgatcaaacaagtgatcaagtgggaatcaatggaagcatgaacccatgcatccatccaatggtttctgctgacccaaaatttggtagtagtgccacaccacagactttccctcataattatgcggcctttgctccaatgatgcagtgcaactgtaaccaagatacgtacaggtcattcaccaacatgtcatccaccttctccagcatgcttgtttccacgttgttgtcaaaccctgccatccatgcagccgccaggctcgcagcatcatactggccagcagctgaaggtaacactcctattgatccgaatcaagaaaaccctgcagatggcgtccaaggaaggaacataggctctcctccaagcatggtttctattgtagcagctacagttgctgcagcatctgcatggtgggcaacacaaggtcttctccctttcttcgctccacccgtggcttttccatttgtaccagctcctagtgctgcctttcccacagttgatgttccacgaccttcagagaaagacagagattgcccagctgaaaatgcacagattgaatgccaagaagctcgaaaacaggtacagttcgaaggtttaagaattgctgcttcttcagagtctgatgggagtggaaaaggcgaggtgtctctccatacggagttaaagctatctcctgcccagaatgctgatgccacacctaccacaggagctggcacaaatgatgcattcaggaataagaaaaagcaggatcgctcttcatgcggttctaacacaccttcaagtagtgatgtagatgcgggcaatgttcctgaggaggacaatgctaatgagaaggcgaagcaagcctcctgcagcaactcttcagctggtgacactaaccaccgcagatttagaagcaatggaagcacaagtgattcatggaaggaagtttccgaagagggtcgtctggctttcgatgcgctgttcagtagggaaaagcttccgcaaagcttttctcccccacaagcagtagactcgaaggaggttgccaaggaggaggaagatgaagtgaccacagtggcagttgacctcaacaagaatgccacaagcattgatcatgatgacctcgacacaatggatgagcccagggcttcctttcccaatgaattgtcgcacctgaagctgaaatcgcgccgtacaggcttcaaaccatacaagagatgttctgtggaagcgaaggaaaaccgggtgccggctagcgacatggttggtaccaagaggattcgtcttgatagcgaagcatccacataattgatttcttcaaagttatatttacatctaagctactataggacttcagatcttgcaatgcagtgcttcattaaaactcaatctgttgtgtgctgtattttaatgcttgtcaagcagcccgctagactgctttaaaaccttatctcgtagagtctgatttaagcatcatgcaactatcaaacttttttttttggtcaaaatgtattttccttatgttttatatttttggaaaggaaaataattgaaatattatttattttgaaggctcatgcaaaggtttatttgatcaaggtgtaggataggctgagcgagagggtgaacattatgactaatatagggcagaaaatatttgaacattgtcatgtttgctgttgctagaagattgtgtagagaaagtactcacataaatgtttcacttctattttaacttgtg

SEQ ID NO: 199845 - DNA, 3134 bp, Zea Mays
agcctctctcccctctgctcccgcggcccgcgcagcgcacagcatacagcgcaccgagctgcggccaccgcagcgaacagcaaagcacctccgactccaagtcgcgagagccttctcattcgtcttcctcctcttccacccatcctgcctgctcacttccgttccgtagtccagctagatccccgggcaaccgatccaccgagaagcttgtggttgtggcggcggcggagagggaagcgggaggtcggaggccaccgtgcgtcggaggtggacgagggagcgaggcggcgccagaccgaggttgcgtcgggctcgatttctactgggctgctgtctgctgagagtaacagaaattggatcaattcaagtagaggtctaggaggagatatgaggtactacttgcgtcaggtccagcgtttggttggagatatggaaggaggagctctcttgtttatagacgacctcaactccaagtgacaaagcgaacagctgttgaacgtttcccttctatttctgtttctttttgccggatttggagatggaggtgaattcctctggcgaggaaactgtggtaaaggtaagaaagccgtacacaataacgaagcagcgggagcggtggacagaggctgaacacaaacggttccttgaagccttgaaactttatggcagagcatggcagcgcatagaagagcatgttgggacaaagacagccgtgcagatcagaagtcacgctcaaaagttcttcactaagttggaaaaggaagctatgaacaatggtacttctccggggcaagcccatgacattgacatacctccaccacggcctaaaagaaagccaaacagtccatatcctcgaaaaagttgtctcagctccgagacacaaaccaaagaacttccaaatgacaagtcaacaaaaccaaatatgcccttgagcaatgggcatgtaaaaatggtaggcgatgcatctcttcagaattttcaaaggaaggagttgtctgaaaaaggaagtcgctcggaagttcttaatctcttccgtgatgccccatctgcatcattttcttcagttaacaaaagctcttcaaatcatggggcacccaggaggaccgaggcaagtaaaacagaaagccgagatatgtccatcatggaaaataattcttttaaccccaacacccaagaggatgtaaaggtgatcagtgatcaggaaatggaaaggcttaatggtatccagatcagatctaaatgtgaacattctcatgaggggtatttggacatctcaacgcaacaaatgaagctaatgccaaagtctgtggagacaacatatgtggatgaacaaactgcaagagcttcacacaccctagcagagagcgacgggacagctagcattccagtgactgtacctgaaggaactcatcctgatcaaacaagtgatcaagtgggaatcaatggaagcatgaacccatgcatccatccaatggtttctgctgacccaaaatttggtagtagtgccacaccacagactttccctcataattatgcggcctttgctccaatgatgcagtgcaactgtaaccaagatacgtacaggtcattcaccaacatgtcatccaccttctccagcatgcttgtttccacgttgttgtcaaaccctgccatccatgcagccgccaggctcgcagcatcatactggccagcagctgaaggtaacactcctattgatccgaatcaagaaaaccctgcagatggcgtccaaggaaggaacataggctctcctccaagcatggtttctattgtagcagctacagttgctgcagcatctgcatggtgggcaacacaaggtcttctccctttcttcgctccacccgtggcttttccatttgtaccagctcctagtgctgcctttcccacagttgatgttccacgaccttcagagaaagacagagattgcccagctgaaaatgcacagattgaatgccaagaagctcgaaaacaggtacagttcgaaggtttaagaattgctgcttcttcagagtctgatgggagtggaaaaggcgaggtgtctctccatacggagttaaagctatctcctgcccagaatgctgatgccacacctaccacaggagctggcacaaatgatgcattcaggaataagaaaaagcaggatcgctcttcatgcggttctaacacaccttcaagtagtgatgtagatgcgggcaatgttcctgaggaggacaatgctaatgagaaggcgaagcaagcctcctgcagcaactcttcagctggtgacactaaccaccgcagatttagaagcaatggaagcacaagtgattcatggaaggaagtttccgaagagggtcgtctggctttcgatgcgctgttcagtagggaaaagcttccgcaaagcttttctcccccacaagcagtagactcgaaggaggttgccaaggaggaggaagatgaagtgaccacagtggcagttgacctcaacaagaatgccacaagcattgatcatgatgacctcgacacaatggatgagcccagggcttcctttcccaatgaattgtcgcacctgaagctgaaatcgcgccgtacaggcttcaaaccatacaagagatgttctgtggaagcgaaggaaaaccgggtgccggctagcgacatggttggtaccaagaggattcgtcttgatagcgaagcatccacataattgatttcttcaaagttatatttacatctaagctactataggacttcagatcttgcaatgcagtgcttcattaaaactcaatctgttgtgtgctgtattttaatgcttgtcaagcagcccgctagactgctttaaaaccttatctcgtagagtctgatttaagcatcatgcaactatcaaacttttttttttggtcaaaatgtattttccttatgttttatatttttggaaaggaaaataattgaaatattatttattttgaaggctcatgcaaaggtttatttgatcaaggtgtaggataggctgagcgagagggtgaacattatgactaatatagggcagaaaatatttgaacattgtcatgtttgctgttgctagaagattgtgtagagaaagtactcacataaatgtttcacttctattttaacttgtg

SEQ ID NO: 199846 - DNA, 3188 bp, Zea Mays
gcgcacagcatacagcgcaccgagctgcggccaccgcagcgaacagcaaagcacctccgactccaagtcgcgagagccttctcattcgtcttcctcctcttccacccatcctgcctgctcacttccgttccgtagtccagctagatccccgggcaaccgatccaccgagaagcttgtggttgtggcggcggcggagagggaagcgggaggtcggaggccaccgtgcgtcggaggtggacgagggagcgaggcggcgccagaccgaggttgcgtcgggctcgatttctactgggctgctgtctgctgagagttgaagataaggagtggagctaggtttaaactctggtgacttggttgttgcgtgcaacgaatcaactatgctgagtttttctgtagagtaacagaaattggatcaattcaagtagaggtctaggaggagatatgaggtactacttgcgtcaggtccagcgtttggttggagatatggaaggaggagctctcttgtttatagacgacctcaactccaagtgacaaagcgaacagctgttgaacgtttcccttctatttctgtttctttttgccggatttggagatggaggtgaattcctctggcgaggaaactgtggtaaaggtaagaaagccgtacacaataacgaagcagcgggagcggtggacagaggctgaacacaaacggttccttgaagccttgaaactttatggcagagcatggcagcgcatagaagagcatgttgggacaaagacagccgtgcagatcagaagtcacgctcaaaagttcttcactaagttggaaaaggaagctatgaacaatggtacttctccggggcaagcccatgacattgacatacctccaccacggcctaaaagaaagccaaacagtccatatcctcgaaaaagttgtctcagctccgagacacaaaccaaagaacttccaaatgacaagtcaacaaaaccaaatatgcccttgagcaatgggcatgtaaaaatggtaggcgatgcatctcttcagaattttcaaaggaaggagttgtctgaaaaaggaagtcgctcggaagttcttaatctcttccgtgatgccccatctgcatcattttcttcagttaacaaaagctcttcaaatcatggggcacccaggaggaccgaggcaagtaaaacagaaagccgagatatgtccatcatggaaaataattcttttaaccccaacacccaagaggatgtaaaggtgatcagtgatcaggaaatggaaaggcttaatggtatccagatcagatctaaatgtgaacattctcatgaggggtatttggacatctcaacgcaacaaatgaagctaatgccaaagtctgtggagacaacatatgtggatgaacaaactgcaagagcttcacacaccctagcagagagcgacgggacagctagcattccagtgactgtacctgaaggaactcatcctgatcaaacaagtgatcaagtgggaatcaatggaagcatgaacccatgcatccatccaatggtttctgctgacccaaaatttggtagtagtgccacaccacagactttccctcataattatgcggcctttgctccaatgatgcagtgcaactgtaaccaagatacgtacaggtcattcaccaacatgtcatccaccttctccagcatgcttgtttccacgttgttgtcaaaccctgccatccatgcagccgccaggctcgcagcatcatactggccagcagctgaaggtaacactcctattgatccgaatcaagaaaaccctgcagatggcgtccaaggaaggaacataggctctcctccaagcatggtttctattgtagcagctacagttgctgcagcatctgcatggtgggcaacacaaggtcttctccctttcttcgctccacccgtggcttttccatttgtaccagctcctagtgctgcctttcccacagttgatgttccacgaccttcagagaaagacagagattgcccagctgaaaatgcacagattgaatgccaagaagctcgaaaacaggtacagttcgaaggtttaagaattgctgcttcttcagagtctgatgggagtggaaaaggcgaggtgtctctccatacggagttaaagctatctcctgcccagaatgctgatgccacacctaccacaggagctggcacaaatgatgcattcaggaataagaaaaagcaggatcgctcttcatgcggttctaacacaccttcaagtagtgatgtagatgcgggcaatgttcctgaggaggacaatgctaatgagaaggcgaagcaagcctcctgcagcaactcttcagctggtgacactaaccaccgcagatttagaagcaatggaagcacaagtgattcatggaaggaagtttccgaagagggtcgtctggctttcgatgcgctgttcagtagggaaaagcttccgcaaagcttttctcccccacaagcagtagactcgaaggaggttgccaaggaggaggaagatgaagtgaccacagtggcagttgacctcaacaagaatgccacaagcattgatcatgatgacctcgacacaatggatgagcccagggcttcctttcccaatgaattgtcgcacctgaagctgaaatcgcgccgtacaggcttcaaaccatacaagagatgttctgtggaagcgaaggaaaaccgggtgccggctagcgacatggttggtaccaagaggattcgtcttgatagcgaagcatccacataattgatttcttcaaagttatatttacatctaagctactataggacttcagatcttgcaatgcagtgcttcattaaaactcaatctgttgtgtgctgtattttaatgcttgtcaagcagcccgctagactgctttaaaaccttatctcgtagagtctgatttaagcatcatgcaactatcaaacttttttttttggtcaaaatgtattttccttatgttttatatttttggaaaggaaaataattgaaatattatttattttgaaggctcatgcaaaggtttatttgatcaaggtgtaggataggctgagcgagagggtgaacattatgactaatatagggcagaaaatatttgaacattgtcatgtttgctgttgctagaagattgtgtagagaaagtactcacataaatgtttcacttctattttaacttgtg

SEQ ID NO: 199847 - DNA, 986 bp, Zea Mays
gtgggatcagattctagcttgggaaggttgccccgtgaactttgagttccaaaactacacaatcatcacaagcaagtgcaaagggccaaagtttccagccggcccatgctgtgccgcactcaaggagttcgcgtgcccttactatacgtacctcaatgacgagagcaacgactgtgcatcgacaatgttcagctacatcaacctgtatggtaagtatccaccgggcctgttctccagcgagtgcaaagaaggcaagcaggggctctcttgcgcagatgtcctcgagagagacagtgccactgcaagcagtggtcatcacgctcaaatcagcttgcttgcgttgattactgtcttgagtgtggtagtagcgttgttccactgaactatatatgcattctccccaaatatggtgtgttacaactaatgaggtttgaattgcaccttttggtgctcatggtgggtgggattctaggttcttcctttttgtgtgtaaagtctcacataatgttattcatggcctattgcatacttttttaattcaatttaatatcgcagcgggtctgattaaggctatgactagtagatcgtccgtatgactgtacaaaatattgtttacattatagactattgttttacattgtgtactttgaaatgagagataattgtttacattatagactattgttttacattgtgtactttgaaatgagagataaagacgaggatgagtaaactgttggagtggagatagcttaagaggtgggtaaagcatttactcatatgtcccatgacaattcatccttctctatcaactagtacaatatttgtgtgtgcgatgtcatatcaatcatattggacggtatagtggtacaatggttgtatgacgtgatggtctagtggtaagacaatgtgatgtacccttttcacaaaaaataaatttaaaattaacaatatgatggactctttcaaaaaaataaatttaaaat

SEQ ID NO: 199848 - DNA, 2079 bp, Zea Mays
ccgcgttttcggtcactccgctactgtagtactgtcttaaaccctcgtctttccgccgcccgtcgcttcgttcctcgcttccccccacaggcccacactctcgccgtctcgcgcgcatcacggcggcggcgaagcaccgcgtggccctccacctaagtcctagcccaagcgtaagcgatcgctctccccatcagccactatggcgccacgcccccgcaagcgggcctcgcgccccaagccccgcccgggctcccgacgtggcggcggcggaggggacgacgatcccttcttcgagtccgagcccaagcgccgccgtggaggccgtgacgaggacgagtcgggagggagacgggtggcggagatcctgcagagaaagcagcttgaggagagcggcaggaagcggagggagattgctgcgagggtattaccaccgggccctcaggatggctttaaggttcttgtgaagcaccggcaacctgttactgctgttgctctatccaaggatagtgataagggattttcagcatcaaaaagatggaattattatgcattgggatgttgaaactgggaaatgtgagaagtatatatggccaagtgaaaatgtgttggtttcacatcacgcaaaaccaccaatatcagctaaaagaagcaagcaagtgctggctttagctgccagttctgatggtcgttacttggcaagcggtggcttggaccgtcatatccatctatgggatgttaggtcacgggagcacatacaggcatttagcggccatcggggaccaatatcttgtcttgcttttgctccggactcttcagagctgttctctggttcttttgatcgatcaataatgcagtggaatgctgaggataggacatacatgaactgtctatatgggcatcagaatgaaatcttgacaatggatgcacttagtaaagacaggattctaactgtagcacgggaccgtacgatgcatctttggaagattccagaagagtcgcagttagtgttccgtgctcctgctgccgcatctttagagtgctgctgcttcattgatgacaaggagtttttgtctggatctgatgatggaagcattgagctttggagcataatgaggaaaaagcctatccttataataaaaaatgctcatccagtattgtgtactaaccttaattcagttgacaatgatgacgagtcacctaaagaaaatggaatgcataaaccggaaaatgtgccatccgcagcccagtcatgggttggtactgttgctgcaagaagaggttctgaccttgttgcatcaggagcaggaaatggtttagttcgtctctgggctatcaaacctgattctaagggagccgagccattattcgatttgaaactggatggatttgttaattctcttgccatagcaaaatctggacgttttattgttgctggtgttggccaggagcctcgccttggaagatggggacgagttcgatcggctcaaaatggagtcgcaattcacccaatccgactaaaagatgtgaaagaggacttgtagagtagattgatgtcttgcattacagtggaacgtccatccatccagcctgcacttctgcagccacggcacaaaagaaaatttgttgaggctaactgggatacatgcaagcaatacaaatttggagggcactacagatgatttttgagctccggttatgtgtgacacggggaatttgtgaggcaattttgtaacttctacagccttctggagcggacaatgaggatttgaagatccatattttttgttccccatgtctggttaactgcattcttttttctgatagctagttctcgccattcgcttttgtacggggtttctccttgcttcgtgtcttgagcgcacgaatagtttgatttggctgcatgacctttatagggtagttccaacaatgacttacgagctagttgtaagcattttattttattctatattataattgaagagaagtaatttttgatcaatagttagtctcaaaatcatgtggtgaaggaagagaagcaattttatacagtattatgaggtactgctaaaagttttt

SEQ ID NO: 199849 - DNA, 863 bp, Zea Mays
ccttatcccaaaccccataccactcagctccactgccaccatggtgccgctccactgctcagctagcgtccacctccacttcctatcgccatctctccccctttcgtcatccttctctctcctctgccatcgcgtccgccgccccaccgccatccgcgccgaagctgaagtgcggcctccgctacctgtctccgcggcggagtcagagccccctgacgccggcgctgtggaagccgaaggtcagggacccgtggagctccgcgctccgacgctcttctcgactgatgacaatcccaccccgctccagactgccaccagtctcctcctcaccggcgccatctcggtcttcctcttccgcgccctccgccgccgcgcccgccgcgccaaggagctcagagtgcggtcgagcgggttgaagaagcccaacaatctcaccgaggaggccctggagaggctgagattgatgagcgcctcaccgatcgagaccgagaaggcaacttcgcccatccaggctctgctcggcgggattgcggcgggggtcatcgcactcatcctctacaagttcagcaccacagtcgaggctgcgctcaaccgtcagaccatctccgacagcttctcggttcgtcagattacaatcacaataagaacaattgtcactgggctgtgctacctagcaacttctgtctttggaatcaatgcgggaagattagtgaacaatctaatacactggcatcatctgatagctccacaagtagcagggaatcagacagtagtgacatgcaagtcactgacaaaagtaaaaactcagcagagaagcagagctagacatgtaatccagacagccaaaatctgagatctgaggg

SEQ ID NO: 199850 - DNA, 548 bp, Zea Mays
acacacacatgacacaccctctcaaaactataaaaaaaaaaacccgaaaaaacaccgagatccgcgcgttcctcggcgtccgcacggcccgcgcacgcacccacgcacccatccggttgccaacccatcccccgaccgacgccaccccacatacatgccgccgcccagcctcaccgccgccggcaccaccaccaccacaacccgccgccgcaacgaccgagccgcgaaggtccaccaggtactgggcgaaggcgcggggacggaggagatgggcgcggtggcggacgggtggacgcggcccgagtggtgctcggcggcgggcgtcgcgggcgtgctgcggcggcacccggcgcccgcgctcttcgggtgcggcctcctgctcttcatggccgtcgagtacaccatccccatggtcaagccggacgcgccgccgctcgacctaggcttcctcgccaccgcgggcatgcacgccgccatcgccgcgaggccctggcttaactcgctcctcgccgcgctcaacacgctaccagcctaccactcgtagtcgt

SEQ ID NO: 199851 - DNA, 4526 bp, Zea Mays
cttccttttcctctctcgctgggtcatggtcatggggctctttccggtctcacgcacgcacaccaccaccaccaccaccaccccgaacccgaatatgctgcccccagccgcgccggccgcgccctgatcccctcacccgatgcgccatccccgccgcctccccctcctccgctgccacgccgccgccggatccgttcccgcccggccaccctgcgctctcggcggcgacgggtcccgctgaccgccctgggcccggcccgctgcccccatcgtgcttgccccacccacctccgcctcgcgccggcgcggggtgcggcgacggccgctagggtttccggggctgtcgcctcgcggtcccctccccccgcggattcgcgcccttcccctacgggcgcgcgtcgcgcttagggtgtgcgtgggtttggacttctcctcagcttggcttgcggtcgcgcggtcccgaggagctccacggaagcttgatttgtcaggtgggggggtttcgaggcagagacgccgatctgcggctgccggcgccgcggcattgcgccgcttcctaagtccccgagtgtccggagcctccgattcggctggtctgggagctgggctgcgacgggtgctgccttcagctcctcttcggcatcactgtaagcgtttcagggttctcgcttctggctggggctacctgatattggagggaaacatgtcggagaacattgatctggtgctcgagttcctgcggaagaaccggttcgccaaggcagaggcagctctccgtggggagctcaccggacgcgctgattcgaacgacatggccacgcagaggcgcgttgctgagctgaaagaaggcgaggagcagcaggagggcttggtgggttccaatgtagggcccaagggtgctgcggcagcgaggagtgcggactcgtcgagggagttcatcgtgaaggagattgatgttggagccctgccgaatggttcggatgggaagaaggggtccgggattggccagcctcaggataacgtgggggatctgtatccttggaccttcagcattgcaaacagcactgcagaacagctagctgagctgctggtgtcggaggaggtgccaagacataggcgtggtgcggtgctggcagagaagagggatcgaggtgttgggaccgagcaacctggcccggtgctggagcaaaaagtctcttttggaagagggaaaggaaaagttgatgctgctgggaggactgagaacagtgaacagtgccattttagggataaaagtctagtaccagaaaaagaggagatgctgaatggttgcacagttaagacggtgcttccattccccacggaaaacccgtcatctagctacaatagcacacaccatgaaaatgagaggaaagaagtaaagaggagcagtaatgcagatggtgttggaaaaggagcaaaaggacatcttgatgaggggaacaggcaatactactttgaaaaatccctagatacagatctggtgtctgaccgatgcttcgatttacagcttgttggagatagtcagcgtgaggagcttccgaagttacctccagtgaggctcaagtccgaagataagctagtcaacatgaactgggaggaaaagatcaatcaccatggatctggggccaagcaatctagtgctgatcatgcttttatgattgggtcttatctcgatgttcccattgggcaagagataacatcttcaggtggaagacgtacaatcggcagtagttggttgtctgtcagtcaaggtattgcagaagatacctccgatctggtatctggttttgcaacacttgctgacgattcacttgaatatccaattggtgaatactgggattctgatgagtatgacgacgacgacgatgttggctacacccggcaaccaattgaggatgaaacctggtttttagcacatgagattgattatcctagcgacaatgagaaggcgactggccacacaagagggaacgatcgtcatgatcgccctacaaaggatgaagatgatgaccagtcatttgttgaggaagattcctacatatctggtgagcaatattttcatggaaagaatattgcacaaataggtacttctgagggcccaatggtccatgggattcctgataatgatatgatagctcagtatgatggccaacttttagattctgaagagcttaatttgatgcattctgaaccagcctggcagggctttgtatcacagaacagtgagctaggtatgctaggcaatgggaaattccttaatgattccgaacgacctcatcctgatgacctttttgtggaggatgatcagcatggctctgttaggtcaattggtgttgggataagcagtgatgctgctgacattggcagtgaggtgcgagaaagtctgattggaggtagcagtgaaggggatattgaatacttcaatgagagcagcttgagcgttagtggaaaaagacatcctcatcaggatactgaaaagaagagagtaggtgctaaaggagtaaaacatgaccaaatcatttacgctgctgatatccagaagggcaatctaccaccaggagcggctgatgtaggattttcttttcctccacctttgcattctgggaaaaatcatgagtctgatgctaaatctttgtggtcaaagaaggatgaaatgtattgcattaatgatcctgatgactgtcaaaatggcatggtatcagatgatatgcttgccacatggaggaaaaagaacagtgagtcttctctaaggagctctagagatgaaatgacgtctgatgttgttagatcaagaaattcaagtgcatcctatgacgaaacagaggacacatcgaatgctcggcaccacaaactagatgacgcacaagaagaagacactggaaccaacttggatgatgaggaagcagcagcgttgcaagagcaagtcaggcagataaaggcgcaggaggaagagtttgaaacgttcaatcttaagattgtgcatagaaaaaacagaactggctttgaagaagacaaaaacttccatgttgttctcaattctgtcattgctgggcgttatcatgtatcagagtatttgggttcagctgcattcagcaaagccatccaagcacatgatttacatacaggaatggatgtatgcgttaaaattataaaaaataacaaagattttttcgatcaaagtcttgatgagatcaagcttctgaagtatgttaacaagcatgatccagctgacaaataccaccttttgcgtctgtatgattacttctactatcgggcaaatctgtatgagtttcagaaattcaacagagaatcagggggtgaggtttacttcacaatgccaagactccagtcaatagctattcagtgtctggaggcgctgcagtttctgcatggtctcggtctaatccactgtgatttaaagccagaaaacatattggtaaagagctacagcagatgtgaaataaaagtaattgatcttgggagcagctgctttgagacagatcatctatgttcatatgtgcaatcacgatcttaccgtgcacctgaggttatactgggcttgccttatgacaaaaagatagatgtatggtcacttggttgtatattagcagagctttgcaccggaaatgtccttttccaaaatgattctcctgcaacattacttgctcgcgtgatgggcatcattggctccatagaacaagctatgcttgcacagggacgcgacacctacaaatatttcacaaagaaccacatgttgtacgaaagaaatcaggaaagtaacaggcttgagtacttgattccgaaaaagacatccttgcggcaccgattgcccatggctgatcaagggtttatcgagtttgttgcgtaccttctggaggtgaacccaaagaagcgcccaagcgcctcagaagcattgaaacatccatggctttcttttccttacgagccaatatcttcatgaggctaactgctattggatcctgtgtggctttagcatttgtctcaacacctaagcaccatgaaattttgatagatcaagacggaagattttctaccacgactgagccatggcatcagccgaaatcccaaacgcaaatgcagattcggttcgatcatgtcttggtgccacaatcagctggtcttaggcgccatgtaaaatcaatgcatgccatgtgttgtgcttgtaatataacttgttttttttacccttcatttccagccccgatgtaacaggccattttggttttctaggtacttggtgactcatttctagcaatagggctgtcatgttgtacatggtgtgatcattgttgagcggccccgtgccatgctgtgcacctgttacgcttctaacccaagtcatgaatgccgttcgtcgtgcttgtctttgaaggagcttaatggtcttgcatgccttttaggactgccaacgagtcgtatagagactgtatatgatgatgtataatcatgtatctagggaattctcaaaaaaaactagaaaaggt

SEQ ID NO: 199852 - DNA, 1807 bp, Zea Mays
acactctgcccgaagagattgggcctggctactgctttagtcaaggttgacttctcaaacaattgccttactgagcttccacctaacctcgccacatgcccggacttgtccgaactcaaggcatcaaacaacaacatatccagagtaccagatgtacttgctggctgttccaagttaagtaaattggatctagagggtaacaagcttgtggcactttctgaaaacatgtttgtgtcatggacaatgctcacagaattgaatctcgcaaagaatctacttacagccatcccaggtagcattggagcacttccaaaactaatccgcttggacatgcatcagaataaaataacttattgtcttcaataccagctgatattggcacgttatcaaagttaggcatacttgatctccattctaatcagctaaaggagtatccagttggagcctgcaacctcaaattatctttccttgatctatcaaataactcattatctggtctaccagctgaactagatcatagatctgattcttgcatgcgtgataagtgtatgctttggcctttaagaacctcatatagtttgtggtactgccttactgaaaattctgacaatccatgcgccactcaaggtaaaatgactaccctaagaaagcttctgcttactggaaatcctatgaggacacttaggagttcattggtttctggaccaacaacaacattgctgaagtatctgcgcagccggctttcatccgatgaggaaggatccagaagcaccccaactaaagatgaccaaattgctgcagcaaggcgcttgtccttatcttcaaaggaactggacttgagtggccttggagtgaccagtgtaccagctgccgcgtgggagacaagtgatgtggtgaaactggatctttctaaaaattcaatagaagatctaccaaatgagttgtcattatgctcatcacttcaatccttagttttgtctaataacaagataaaaaggtggcctcacacagtggtttcctcccttccctgtctgtcttccttaaagctggacaataaccccttggtagagatatcatccactgatcttgtgcctctgtccaaacttgaagtacttgatctaagtggcaatgcttcagcacttcctgaaccttctgcagtttctgcattaccacagctgcaagagctttacctaagacgaatgaaactccatgaatttcctaatggtttgctgggcctaaaactgcttaggattcttgacctgagtcagaatcaccttacaactgtgccggagggcatcaagaatttcactgcactcattgagcttgatctgtctgacaacaatataacagcactcccagcggagctgggattgcttgaagctaacctgcaagtgctgaaactggatggaaatccgctaagaagcataagacgaactctgttggagcgaggaacgaaagcagttctcaagtacctcaaagaaaaattgccgtctgaataatatttatagaacaaactattgttggagtaatggaataaaatgtttttttgccactgtatctcagttttctggactgaattttgtgcaaaagtatctggaccttgtgtgagaagagagctttgtgagtgtgttgttggatatactggttatagtccacatgttttattggaacaaaaatattttctctgttcaatctttacatggacacaacctggaaagatgttatccaccgttgtatcgttcatagatcgtcaacgactacaccagccagcggaatttggaaaaaaggtttcacgtcggaatcatct

SEQ ID NO: 199853 - DNA, 2011 bp, Zea Mays
ctctctaacaatactaatactactgcatcaatgtttgtatgtatagagagagcgcaccttatattataggtatagaataaaaagtggttacgccttatattatgggacagagggagtatctagctagctagttagttattgtgtgtgttgctcacctcagtacttctgcctgttcctttgccgccttgctctgcagggagatacccaaggaggtttacaacaacttggacactggcagccaggatgagaaatggtgggagggagtggacctccaaaagctcattctggctcacaataatcttgaggtgttaagagaagaccttaggaacttgtcttcgcttgttgttctaaatataagtcacaacaagatatcttcccttccagcagctatcggagaggttgacttctcaaacaattgccttactgagcttccacctaacctcgccacatgcccggacttgtccgaactcaaggcatcaaacaacaacatatccagagtaccagatgtacttgctggctgttccaagttaagtaaattggatctagagggtaacaagcttgtggcactttctgaaaacatgtttgtgtcatggacaatgctcacagaattgaatctcgctcgttacagcaaagaatctacttacagccatcccagaaataacttattgtcttcaataccagctgatattggcacgttatcaaagttaggcatacttgatctccattctaatcagctaaaggagtatccagttggagcctgcaacctcaaattatctttccttgatctatcaaataactcattatctggtctaccagctgaactaggtaaaatgactaccctaagaaagcttctgcttactggaaatcctatgaggacacttaggagttcattggtttctggaccaacaacaacattgctgaagtatctgcgcagccggctttcatccgatgaggaagcatcaggatccagaagcaccccaactaaagatgaccaaattgctgcagcaaggcgcttgtccttatcttcaaaggaactggacttgagtggccttggagtgaccagtgtaccagctgccgcgtgggagacaagtgatgtggtgaaactggatctttctaaaaattcaatagaagatctaccaaatgagttgtcattatgctcatcacttcaatccttagttttgtctaataacaagataaaaaggtggcctcacacagtggtttcctcccttccctgtctgtcttccttaaagctggacaataaccccttggtagagatatcatccactgatcttgtgcctctgtccaaacttgaagtacttgatctaagtggcaatgcttcagcacttcctgaaccttctgcagtttctgcattaccacagctgcaagagctttacctaagacgaatgaaactccatgaatttcctaatggtttgctgggcctaaaactgcttaggattcttgacctgagtcagaatcaccttacaactgtgccggagggcatcaagaatttcactgcactcattgagcttgatctgtctgacaacaatataacagcactcccagcggagctgggattgcttgaagctaacctgcaagtgctgaaactggatggaaatccgctaagaagcataagacgaactctgttggagcgaggaacgaaagcagttctcaagtacctcaaagaaaaattgccgtctgaataatatttatagaacaaactattgttggagtaatggaataaaatgtttttttgccactgtatctcagttttctggactgaattttgtgcaaaagtatctggaccttgtgtgagaagagagctttgtgagtgtgttgttggatatactggttatagtccacatgttttattggaacaaaaatattttctctgttcaatctttacatggacacaacctggaaagatgttatccaccgttgtatcgttcatagatcgtcaacgactacaccagccagcggaatttggaaaaaaggtttcacgtcggaatcatct

SEQ ID NO: 199854 - DNA, 2001 bp, Zea Mays
ctctctaacaatactaatactactgcatcaatgtttgtatgtatagagagagcgcaccttatattataggtatagaataaaaagtggttacgccttatattatgggacagagggagtatctagctagctagttagttattgtgtgtgttgctcacctcagtacttctgcctgttcctttgccgccttgctctgcagggagatacccaaggaggtttacaacaacttggacactggcagccaggatgagaaatggtgggagggagtggacctccaaaagctcattctggctcacaataatcttgaggtgttaagagaagaccttaggaacttgtcttcgcttgttgttctaaatataagtcacaacaagatatcttcccttccagcagctatcggagaggttgacttctcaaacaattgccttactgagcttccacctaacctcgccacatgcccggacttgtccgaactcaaggcatcaaacaacaacatatccagagtaccagatgtacttgctggctgttccaagttaagtaaattggatctagagggtaacaagcttgtggcactttctgaaaacatgtttgtgtcatggacaatgctcacagaattgaatctcgcaaagaatctacttacagccatcccagaaataacttattgtcttcaataccagctgatattggcacgttatcaaagttaggcatacttgatctccattctaatcagctaaaggagtatccagttggagcctgcaacctcaaattatctttccttgatctatcaaataactcattatctggtctaccagctgaactaggtaaaatgactaccctaagaaagcttctgcttactggaaatcctatgaggacacttaggagttcattggtttctggaccaacaacaacattgctgaagtatctgcgcagccggctttcatccgatgaggaagcatcaggatccagaagcaccccaactaaagatgaccaaattgctgcagcaaggcgcttgtccttatcttcaaaggaactggacttgagtggccttggagtgaccagtgtaccagctgccgcgtgggagacaagtgatgtggtgaaactggatctttctaaaaattcaatagaagatctaccaaatgagttgtcattatgctcatcacttcaatccttagttttgtctaataacaagataaaaaggtggcctcacacagtggtttcctcccttccctgtctgtcttccttaaagctggacaataaccccttggtagagatatcatccactgatcttgtgcctctgtccaaacttgaagtacttgatctaagtggcaatgcttcagcacttcctgaaccttctgcagtttctgcattaccacagctgcaagagctttacctaagacgaatgaaactccatgaatttcctaatggtttgctgggcctaaaactgcttaggattcttgacctgagtcagaatcaccttacaactgtgccggagggcatcaagaatttcactgcactcattgagcttgatctgtctgacaacaatataacagcactcccagcggagctgggattgcttgaagctaacctgcaagtgctgaaactggatggaaatccgctaagaagcataagacgaactctgttggagcgaggaacgaaagcagttctcaagtacctcaaagaaaaattgccgtctgaataatatttatagaacaaactattgttggagtaatggaataaaatgtttttttgccactgtatctcagttttctggactgaattttgtgcaaaagtatctggaccttgtgtgagaagagagctttgtgagtgtgttgttggatatactggttatagtccacatgttttattggaacaaaaatattttctctgttcaatctttacatggacacaacctggaaagatgttatccaccgttgtatcgttcatagatcgtcaacgactacaccagccagcggaatttggaaaaaaggtttcacgtcggaatcatct

SEQ ID NO: 199855 - DNA, 758 bp, Zea Mays
atccctctctagtctctaccctttccgcctcggcacctccccacccctctcgccttcgcttcgtcgccacggcgagccccacgccgccgatcggggcgccgccagcggcggcggcgcccgatccgatggaagcggaggtggggccgccgaatccgccgcggccggagccagccggatcggagcccgacgacgcgcgcctctccccgcctcctcctgctcctgctccgccgcctccgcccccgcctcctcccgccgccgaggctgccgccgcgcccaccgcctccgcggccttctcgctgcaggctccagctccggcgccggcggaggcgaacggcagctccgacaggaagaggaggaggaaggcggaggacggggacgggtgcaagacctgcagctgcaagaagtccaggtgcctcaagctttactgtgtgtgctttgcttctgggttacattgtactgaatcatgtggatgtgaaccttgtcataacaagccacaattgcaaggtactctgcggatggcaacagttttacctctgaaacctgtccaaacattcgaagctggccaagatatagtggaacaagtcataaggtctcctatggatcttattagaagaaaatgcacatgcaagaagtcaggctgccttaagaagtactgcgactgctaccagggaggggcaggatgctccatcaactgtaaatgcgatgattgtagaaacccatttgggagaaaaggcaaaacttgactatggagccattct

SEQ ID NO: 199856 - DNA, 2277 bp, Zea Mays
aaatgcaccagtggagtttgagggaaaagactcttcaatctgaagcaaaatgtaccgggaatgttgaagagcgggactcttaagcagtagtgagatgcggcggtggtggtcgccggcgttggcggctgtggagccgcggtccgtgcagctcctgctcctgggcgtcgctctcgtcgcagcttctttctacgccggcaccctcttcggctcctccgcgtcccctgcgctcgtactgcccccttcgcgcccccgatcgcccgattccttcagggccaaagttacagatgttccagtgtttaccaacagagtttctcgtacgtaccgggcaaaatcagtgacagttccagatcacggagttgatgtgtgtcctttggaatacaatgagtatgtcccctgccatgatggagcctatataagcagcttgaagagcctggatacatctaggcatgtggatcttgaaagtatttgtcctccatgggagaagcggttgttttgtttggtgccccctccaaatgactacaagataccaataagatggccaacaagccgagactacgtatggcgtagtaatgtcaaccattcacatcttgctgaggtcaaaggaggacagaactgggtgcatgagaagggcaaactttggtggtttcctggaggtggcactcacttcaaacatggtgcatcagaatacatagagaggctaggaaatatgatgacaaatagtactggtgatcttcgttctgccggagtagttcaagttttggatgttggatgtggtgttgctagcttttctgcatatcttcttccgctagacattcgaaccatgtcatttgctccaaaagatggccatgagaatcaaatccagtttgctttagaacgtgggattggtgcaatgatctctgtgttggccacaaaacaattaccttatcctgaaaattcatttgaaatggttcactgttcaagatgtcgtgttgattggcatgaaaatgatggaatattactcaaagaggtagaccgtcttttgcgacctaatgggtattttgtatactctgctccaccagcttatagaaaagataaggactttcctgttatttgggagaagctagttaatattacaacaacaatgtgttggaagcttattgctaagcatgttcaaacagctatttgggttaaacctgaagatgagtcctgcagacagaaaaatgttgatatgaatctactgagtatttgtgaatccaatgacaacatttcaccatcatggaaaattccgttaatgaattgtgtgaagctcaacaaggacaaatccaatattcagaaattgccttccagatctgatcgcctatcattttattccaagagtttggagataataggagttgcaccagagaggtttgagaagaataaccagttctggaagaaccagcactaagcagtgaccctgtctggattatgaatatagtaccctataccatgatgaacacattgcctgttatctatgaccgtgggttactcggttcttaccatgactggtgtgagccattctcaacatatcctagatcctatgacttgttgcatgctttccacctcttttctcattataaacgccgcaaggaagattgtttgttggaggatatcatgttagaaatggatcgcatcattcgaccacagggttttatcattattagagacgagaatgacactctctcaagaatcatcaatctagcaccgaagttcctttgggatgttaccacgcacatgttggaaaatgaggaaagcgggacagatcaagttctgttttgcaggaagaaattctgggctattgtttgagttatacttgggtggaaattgggaagctgccatattttatcctacttttggttgccctttgtatcagtgacagagcagagcgtaaggagagctgtttggcatgatagatgttccaatgaaacataatatttcattgcacgttctctgcagttgacagtagtgcattgttgagaaggcatatggtacggtggtgcggttgacagggttatccagaaactagctcggataatttttgcttttgagctgtactatttgtctacgaaggacatgggtgagccggtttaggttctcaagttctcaacaacatgttggtagtgctgtttctgttgttccatctggggagcatctgtagtactataaaccttatgtaaggtactgtttccagccaatgccgaggtgcatttgttacattatttgttttttgttttgcttatacgttactctctttgttct

SEQ ID NO: 199857 - DNA, 3697 bp, Zea Mays
cttcccgcgaaatctaatagtcggcggcgcgaagcaggagttctggggaaatttcgccggccgggtgcgagcagagccgccgccgccttcttgcgtgggagatggtgaaggagcgggaggagcaagtggccattgtgcgcatggtgcttggcgagggtacaccggagatggacatcatccgtgctctccacatggccggcgacgaccccaccaaggccattaacatcctcctcgacctcaacaaggctgcgccacctctcccgccgtcgccgtctccctttccctgtccatcgccctccccttcgccggggaaacccgccaaagccctcgtcgactcaaccccaccatgcaaagcccctacccggcccatgcccacggcagagaaacctaagtccactacaagcaacggtggcagcgaggagcactggtggctggtggggagcgccgagatggtggggctgtccacctgcaagggaaggcgaattacctcaggggacgtggtcaccttcagcttccccaatgccacaaccgccgtgggcaagagccgtccgagccgtcccgccctagcttcctgctcctccgagatcatgcgcttctccaccccgagccacggggaggtgggtcgcatccccaatgagtgggcaaggtgcctccttccccttctcaaagagaacaagttaaaagtcaagggctcgtgcaaatcagctcccgaggtgcttaccattatggacactgtcctcttgtcagtgagtatatatatcaacagctcaatgtttcatgatcaaaagcaatcgtcacccaaagcagctcgatttgctccatatgactccacatttcaccccctacctgcacttttcaaattgataggacttgctccttttattaaggccgcttttactccagaagatctttattccaggaagcggccaactgaaacaaagagcagtatagggtctcctgctgcaaagctgacatccggcagattgaggttgtcttctgatggaaacgaagatgatcatggtgaagaaactgtttcagattcagatttggatgatataattgggatctcagacagctgtgcactagaggaaagggctccccctgattctctgatgtgtgatctacgctcttatcaaaagcaggcacttcattggatgctgcagcttgagaaaggtagttcttcccaggatgccgctacaacccttcacccttgttgggaagcatacaaacttgaggataagagggaactcgttttgtacttgaacgtgttttcaggcgatgctacaactgaatttcctagtacattacaactttctagaggaggacaaaggatgcatcacaactcagaatgctgctcagacccctagagaagctagtgggttgggtgaatcgcatgatgctgtgaagaagcttgctaaccctttctcttttagcaaacacaagaaacctaaggccccacttattggaggaagcaatctaattatctgtccaatgacactaattagtcagtggaaggcagagattgaagctcatactaagccaggcactgcgaatatatatgttcactatggacaaaacaggccaaaagatgcaagcatcattggtcagagtgatattgtcctgactacatatggtgttgtgtcatcagagttttcaatcgatggttcaacagaaaatggggctttgtactctgtacattggttcagagttgtgcttgacgaagcacacatgataaaatcttctaaaagtttgatatccctagctgcggctgctctgactgcagatcggcgctggtgtctcactggtacaccaattcagaacaatttggaggatttatacagccttttccggtttctgaaagttgaaccatggaggaactgggctttgtggaataaacttgtacagaaaccatatgaagaaggtgatgaaaggggcttaaagctactgcagtccattttgaagccaataatgctgagaaggactaaaaattgcacagacaaggagggcaggccaatccttaatttaccccctgcaaacattgaagtaaaatactgtgttttatctgaggctgagaaggatttctatgaagctctatttcgaagatctaaggtaaaatttgatcaatttgttgagcaaggaagggttctgcacaactatgcttcaattttggagttacttttgcgcctaaggcaatgctgtgatcatccattccttattatgagtcgtggggatacaaaagagtatgcagacctaaacaagcttgcaaagcgttttctgcgtggtggtaatggtgctgttaatggtgattcttgcatcccctctagagcttatatcaaacaggttgtccaagaattgcaaaaggatgaaggggagtgccctatttgtcttgaagcctttgaggatgcagtattaactccctgtgctcatcgtttatgccgagagtgtctcttatctagttggcggagtgcgacagcaggcctttgtcctgtctgtagaatgtcaatgagcaagcaggaccttataactgctcctactgataaccgctttcaaatcgatgtcgaaaaaaattgggttgaatcttccaagatatctgctctcctgcaggagttggaagctcttcgcagttcaggcgccaagagtatcgtgtttagccagtggactgcttttttagatctgttgcaaattccactttctaggaataatttctcatttgctaggctggatgggacgttgaatcttcagcaaagggagaaagttataaaggagttctcagaggacaaaggcattttggttctgcttatgtctctgaaggctggaggtgttggaatcaatcttactgccgcttctaatgcatttgtcatggacccttggtggaatcctgctgtggaagaacaagctgtcatgcgcatccatcgaattggtcaaacgaagactgtttctatcagaagattcatcgtgaagggcactgtcgaagaacgaatggaggctgtgcaggctcgaaagcagcgaatgatttctggagctttgactgaccaagaagtccgcactgcacgtatagaagaactgaagatgcttttctcctgagactacaaaagggctgttgtgcatcggatggtcggcaattcggcatggctaaaacaagatggctggtagccagaatgttggaaggtaagacgagggtaggaaattgcacgcccaaatatcttggcgtttagctgctgttgtgcgcacgatttgtacatcatgaatggttaatggctgacaagagtccaagacgcttcattgagtgaaaatcgaaagcatcatctcaaaattgaatatttctgtttgggttttgtataagtagataaactgaacatttgcagtaatacgaaggcagctacctgctcgatcattaatttaacaataaataaatttggtaaggtggtcaagtataaatgtgtgtataattcatgaatcgtgagacatgtgtcgtttgcgttgtaaggatgtggccagattgtgtatatggtcgtgcaaaacactattttatattgtaaaaaatgtattgtttacaggatagagaatgaaataggagatacaggctataagctccatgagcttttcccctccaagcctggttgattacagaacagccatgtctgtggagagaataagtgcaggtgcatgacgagcgttgtaacacattgaatttgag

SEQ ID NO: 199858 - DNA, 3765 bp, Zea Mays
gccctcccaccttcccgcgaaatctaatagtcggcggcgcgaagcaggagttctggggaaatttcgccggccgggtgcgagcagagccgccgccgccttcttgcgtgggagatggtgaaggagcgggaggagcaagtggccattgtgcgcatggtgcttggcgagggtacaccggagatggacatcatccgtgctctccacatggccggcgacgaccccaccaaggccattaacatcctcctcgacctcaacaaggctgcgccacctctcccgccgtcgccgtctccctttccctgtccatcgccctccccttcgccggggaaacccgccaaagccctcgtcgactcaaccccaccatgcaaagcccctacccggcccatgcccacggcagagaaacctaagtccactacaagcaacggtggcagcgaggagcactggtggctggtggggagcgccgagatggtggggctgtccacctgcaagggaaggcgaattacctcaggggacgtggtcaccttcagcttccccaatgccacaaccgccgtgggcaagagccgtccgagccgtcccgccctagcttcctgctcctccgagatcatgcgcttctccaccccgagccacggggaggtgggtcgcatccccaatgagtgggcaaggtgcctccttccccttctcaaagagaacaagttaaaagtcaagggctcgtgcaaatcagctcccgaggtgcttaccattatggacactgtcctcttgtcagtgagtatatatatcaacagctcaatgtttcatgatcaaaagcaatcgtcacccaaagcagctcgatttgctccatatgactccacatttcaccccctacctgcacttttcaaattgataggacttgctccttttattaaggccgcttttactccagaagatctttattccaggaagcggccaactgaaacaaagagcagtatagggtctcctgctgcaaagctgacatccggcagattgaggttgtcttctgatggaaacgaagatgatcatggtgaagaaactgtttcagattcagatttggatgatataattgggatctcagacagctgtgcactagaggaaagggctccccctgattctctgatgtgtgatctacgctcttatcaaaagcaggcacttcattggatgctgcagcttgagaaaggtagttcttcccaggatgccgctacaacccttcacccttgttgggaagcatacaaacttgaggataagagggaactcgttttgtacttgaacgtgttttcaggcgatgctacaactgaatttcctagtacattacaactttctagaggaggaatgcaatgggactggggaagactattatgacgatagctcttcttctttctgattctagcaaaggatgcatcacaactcagaatgctgctcagacccctagagaagctagtgggttgggtgaatcgcatgatgctgtgaagaagcttgctaaccctttctcttttagcaaacacaagaaacctaaggccccacttattggaggaagcaatctaattatctgtccaatgacactaattagtcagtggaaggcagagattgaagctcatactaagccaggcactgcgaatatatatgttcactatggacaaaacaggccaaaagatgcaagcatcattggtcagagtgatattgtcctgactacatatggtgttgtgtcatcagagttttcaatcgatggttcaacagaaaatggggctttgtactctgtacattggttcagagttgtgcttgacgaagcacacatgataaaatcttctaaaagtttgatatccctagctgcggctgctctgactgcagatcggcgctggtgtctcactggtacaccaattcagaacaatttggaggatttatacagccttttccggtttctgaaagttgaaccatggaggaactgggctttgtggaataaacttgtacagaaaccatatgaagaaggtgatgaaaggggcttaaagctactgcagtccattttgaagccaataatgctgagaaggactaaaaattgcacagacaaggagggcaggccaatccttaatttaccccctgcaaacattgaagtaaaatactgtgttttatctgaggctgagaaggatttctatgaagctctatttcgaagatctaaggtaaaatttgatcaatttgttgagcaaggaagggttctgcacaactatgcttcaattttggagttacttttgcgcctaaggcaatgctgtgatcatccattccttattatgagtcgtggggatacaaaagagtatgcagacctaaacaagcttgcaaagcgttttctgcgtggtggtaatggtgctgttaatggtgattcttgcatcccctctagagcttatatcaaacaggttgtccaagaattgcaaaaggatgaaggggagtgccctatttgtcttgaagcctttgaggatgcagtattaactccctgtgctcatcgtttatgccgagagtgtctcttatctagttggcggagtgcgacagcaggcctttgtcctgtctgtagaatgtcaatgagcaagcaggaccttataactgctcctactgataaccgctttcaaatcgatgtcgaaaaaaattgggttgaatcttccaagatatctgctctcctgcaggagttggaagctcttcgcagttcaggcgccaagagtatcgtgtttagccagtggactgcttttttagatctgttgcaaattccactttctaggaataatttctcatttgctaggctggatgggacgttgaatcttcagcaaagggagaaagttataaaggagttctcagaggacaaaggcattttggttctgcttatgtctctgaaggctggaggtgttggaatcaatcttactgccgcttctaatgcatttgtcatggacccttggtggaatcctgctgtggaagaacaagctgtcatgcgcatccatcgaattggtcaaacgaagactgtttctatcagaagattcatcgtgaagggcactgtcgaagaacgaatggaggctgtgcaggctcgaaagcagcgaatgatttctggagctttgactgaccaagaagtccgcactgcacgtatagaagaactgaagatgcttttctcctgagactacaaaagggctgttgtgcatcggatggtcggcaattcggcatggctaaaacaagatggctggtagccagaatgttggaaggtaagacgagggtaggaaattgcacgcccaaatatcttggcgtttagctgctgttgtgcgcacgatttgtacatcatgaatggttaatggctgacaagagtccaagacgcttcattgagtgaaaatcgaaagcatcatctcaaaattgaatatttctgtttgggttttgtataagtagataaactgaacatttgcagtaatacgaaggcagctacctgctcgatcattaatttaacaataaataaatttggtaaggtggtcaagtataaatgtgtgtataattcatgaatcgtgagacatgtgtcgtttgcgttgtaaggatgtggccagattgtgtatatggtcgtgcaaaacactattttatattgtaaaaaatgtattgtttacaggatagagaatgaaataggagatacaggctataagctccatgagcttttcccctccaagcctggttgattacagaacagccatgtctgtggagagaataagtgcaggtgcatgacgagcgttgtaacacattgaatttgag

SEQ ID NO: 199859 - DNA, 1907 bp, Zea Mays
atttcgccggccgggtgcgagcagagccgccgccgccttcttgcgtgggagatggtgaaggagcgggaggagcaagtggccattgtgcgcatggtgcttggcgagggtacaccggagatggacatcatccgtgctctccacatggccggcgacgaccccaccaaggccattaacatcctcctcgacctcaacaaggctgcgccacctctcccgccgtcgccgtctccctttccctgtccatcgccctccccttcgccggggaaacccgccaaagccctcgtcgactcaaccccaccatgcaaagcccctacccggcccatgcccacggcagagaaacctaagtccactacaagcaacggtggcagcgaggagcactggtggctggtggggagcgccgagatggtggggctgtccacctgcaagggaaggcgaattacctcaggggacgtggtcaccttcagcttccccaatgccacaaccgccgtgggcaagagccgtccgagccgtcccgccctagcttcctgctcctccgagatcatgcgcttctccaccccgagccacggggaggtgggtcgcatccccaatgagtgggcaaggtgcctccttccccttctcaaagagaacaagttaaaagtcaagggctcgtgcaaatcagctcccgaggtgcttaccattatggacactgtcctcttgtcagtgagtatatatatcaacagctcaatgtttcatgatcaaaagcaatcgtcacccaaagcagctcgatttgctccatatgactccacatttcaccccctacctgcacttttcaaattgataggacttgctccttttattaaggccgcttttactccagaagatctttattccaggaagcggccaactgaaacaaagagcagtatagggtctcctgctgcaaagctgacatccggcagattgaggttgtcttctgatggaaacgaagatgatcatggtgaagaaactgtttcagattcagatttggatgatataattgggatctcagacagctgtgcactagaggaaagggctccccctgattctctgatgtgtgatctacgctcttatcaaaagcaggcacttcattggatgctgcagcttgagaaaggtagttcttcccaggatgccgctacaacccttcacccttgttgggaagcatacaaacttgaggataagagggaactcgttttgtacttgaacgtgttttcaggcgatgctacaactgaatttcctagtacattacaactttctagaggaggaattctggcagatgcaatgggactggggaagactattatgacgatagctcttcttctttctgattctagcaaaggatgcatcacaactcagaatgctgctcagacccctagagaagctagtgggttgggtgaatcgcatgatgctgtgaagaagcttgctaaccctttctcttttagcaaacacaagaaacctaaggccccacttattggaggaagcaatctaattatctgtccaatgacactaattagtcagtggaaggcagagattgaagctcatactaagccaggcactgcgaatatatatgttcactatggacaaaacaggccaaaagatgcaagcatcattggtcagagtgatattgtcctgactacatatggtgttgtgtcatcagagttttcaatcgatggttcaacagaaaatggggctttgtactctgtacattggttcagagttgtgcttgacgaagcacacatgataaaatcttctaaaagtttgatatccctagctgcggctgctctgactgcagatcggcgctggtgtctcactggtacaccaattcaaacaatttggaggatttatacagccttttccggtttctgaaagttgaaccatggaggaactgggctttgtaa

SEQ ID NO: 199860 - DNA, 1817 bp, Zea Mays
cgcgaaatctaatagtcggcggcgcgaagcaggagttctggggaaatttcgccggccgggtgcgagcagagccgccgccgccttcttgcgtgggagatggtgaaggagcgggaggagcaagtggccattgtgcgcatggtgcttggcgagggtacaccggagatggacatcatccgtgctctccacatggccggcgacgaccccaccaaggccattaacatcctcctcgacctcaacaaggctgcgccacctctcccgccgtcgccgtctccctttccctgtccatcgccctccccttcgccggggaaacccgccaaagccctcgtcgactcaaccccaccatgcaaagcccctacccggcccatgcccacggcagagaaacctaagtccactacaagcaacggtggcagcgaggagcactggtggctggtggggagcgccgagatggtggggctgtccacctgcaagggaaggcgaattacctcaggggacgtggtcaccttcagcttccccaatgccacaaccgccgtgggcaagagccgtccgagccgtcccgccctagcttcctgctcctccgagatcatgcgcttctccaccccgagccacggggaggtgggtcgcatccccaatgagtgggcaaggtgcctccttccccttctcaaagagaacaagttaaaagtcaagggctcgtgcaaatcagctcccgaggtgcttaccattatggacactgtcctcttgtcagtgaggccgcttttactccagaagatctttattccaggaagcggccaactgaaacaaagagcagtatagggtctcctgctgcaaagctgacatccggcagattgaggttgtcttctgatggaaacgaagatgatcatggtgaagaaactgtttcagattcagatttggatgatataattgggatctcagacagctgtgcactagaggaaagggctccccctgattctctgatgtgtgatctacgctcttatcaaaagcaggcacttcattggatgctgcagcttgagaaaggtagttcttcccaggatgccgctacaacccttcacccttgttgggaagcatacaaacttgaggataagagggaactcgttttgtacttgaacgtgttttcaggcgatgctacaactgaatttcctagtacattacaactttctagaggaggaattctggcagatgcaatgggactggggaagactattatgacgatagctcttcttctttctgattctagcaaaggatgcatcacaactcagaatgctgctcagacccctagagaagctagtgggttgggtgaatcgcatgatgctgtgaagaagcttgctaaccctttctcttttagcaaacacaagaaacctaaggccccacttattggaggaagcaatctaattatctgtccaatgacactaattagtcagtggaaggcagagattgaagctcatactaagccaggcactgcgaatatatatgttcactatggacaaaacaggccaaaagatgcaagcatcattggtcagagtgatattgtcctgactacatatggtgttgtgtcatcagagttttcaatcgatggttcaacagaaaatggggctttgtactctgtacattggttcagagttgtgcttgacgaagcacacatgataaaatcttctaaaagtttgatatccctagctgcggctgctctgactgcagatcggcgctggtgtctcactggtacaccaattcagaacaatttggaggatttatacagccttttccggtttctgaaagttgaaccatggaggaactgggctttgtaa

SEQ ID NO: 199861 - DNA, 1346 bp, Zea Mays
ggaacactttagattgaacactggtcgaggcgtcaatggatcctttcctttagctctctagtggacaactgcagaagttcgttgtcactgaaggagatactacggaacaaaatcatctcagaggtaaagcagtcagtggttctacaagaagatggatctgagaggatgaaattaaaagacctatctgatgcaatttttcaagatattgggagcaaaataatgggtcaaatctcagatgaggtatggaatgtcatccagtcaaatgaaactgatatacagggaactgtgaaagccgtctacaataggatactgaaccctgaaaaggtctctgagccttctcccaagaagctgaagcagagaggcaaagaggaacaagttctgcccacaaagacagcaactagcgttgcagtcgaggcggaagatgatgatccagaggagccaccaggatttggtttcaacaatacacagcgtaatgatattggagcaacaaagccacagatgagtttggaaaatggtaatgaagggaagccaaatggaggcgagccagctactatcagcaatccaggggatgaggaggaagatcctgaagtgccccctggatttggttaatggaattcactaacttcagtggaatgcagctgtttctttcttagcaatatatacaagaagggaaatgtttaatcttctgttgacaggaagagtaatgcaagctcatgtctgcgacagttgaaacccgtgtaatgatggttacttctatccagccccaggataccctttctgtgatagtggcaaatatgttgggtgctaacagtctgacaacgagttccaggcacgaagttttcgaagaagctggacatattatgagaggtcctctaaattatggagatgtttagttctttattccaagaggcacgtatgaaaaacatatgctatataaaatcccttgtgagttgggagttgggacagtttcttaccaagggtctgtttggatggaggtcctccaggctccagtgcttttgcaaagctcttgagatgcacagctctcccagtatttttttgcacgtttatttatatacgtaaaataagtatttatacgacaagttttcttgagttgggacagtttcttaccaagggtctggacatatttgcatgtttttgtatttattcatagaccttacgtggactggaacatttatcaccaaaccgtggtcggtctcatttttttttctggactgcgtgactcttgctattttttaaggctgacttcctttctattgcacttcatatctcgcatcttattttaaacttcactctatgtctttgtctatgtcttcagtagctttacc

SEQ ID NO: 199862 - DNA, 995 bp, Zea Mays
gaaaaatagaatacactttattacctgatttagcaccgcataagatacatgcaaagattcaagtacatgtatctagaaagtgtcttttccgaggtgctactgacagtggaccactacaacatgttgatatggttttgtctgatcgagagggtaatgttatttatgctgaaatccctggaaatttagctgaacaaaaagcaacaaacattgaaaaaggaggagtttatgacatcaacagatttagagtgtgcgcaacaaaaactgtgttcaaaatagtggatggggacaaaatgatccagttcacatttcataccatagtaaaacgtgccacaagccctccaacaacatttccattatatgtttatcggctaacatcgttttatcaaattgagcctcatgttcaaaccacgaatatctttgttgatgttcttggtgtcataactgaaattcatgaactgacacatgtgcatgtccggagtcaactaacaccaacagtgacaaggaccattatcataaaagatctcaccaacaaaacaatgaagatcactttatgggcagatcaggcaataatgttcactcttcatgacgtctacgatgcaaatacaaataaaccaattcttgtgctcttcgtcgagtgcttaccaaaattttacaaaggtgtctacctaagtggtggtcctgcctgtagatggtacttcaatccagcaattccagaggcagaaccttatcttaccagtgcaaacaagagtaatatcaatagcccagaaaaagatgatggcgataaggataccgcacagacattacctattttcgacttctttacaaagaacttcgatatgtgcagcttgacacagtacctaataacaaaggaaaaggtccaacagatacaattgaatcgccatctaaaaggttacgctccgtatcataccctcctacatgaattattttccttcctgttacgatatcgtagttccattaccaatcttagttactaa

SEQ ID NO: 199863 - DNA, 2682 bp, Zea Mays
ggagattgtacggcgcgcccgaatcctgctctgcactgctgtttcctgaagtgcaaagagccctgcagtctacctggttctattgtgccccgacagaagatcctgagagctagagctgtttttttccctacatatagttaagttaaattatctgcacagccgaagatgtccgcgatcatgttatgtacctgcagcggggaccagtccaagtttgaagatcttcctagatcgccagaatctcttgcaacacgtgacttttcagcgaattgctcttcttcaaagatggcaagtcgagaaacaactcctgatgacagccaagtaaatgaagtagaatcagacctaaaagaaaccctttcactaaattatgaggaggctcgagcattgttaggtagactggaacatcagagagggaactttgatgcagcattgcaagttcttcaggggattgatataagaagcctgagaccacgaatgaccactgctattgctgaaagtgtcaagcctagaatgcccccacgctcttcaagacgaaaatcttcacaagtgaacggaatgcttatgcatatgtccatgcattctgtaagcttgcttctagaggccatactgcttaaagcaaaatctctggacacccttggtagagcagcagatgctgcagaagaatgcagaaccatcatagacattatagagtctgcatggccatatggtgttccggatggtacttctgaagagtgtaagctaatagacatattccattcggctctagaatatcttcctaaactgtggatgaggagtggttgttttgatgaagccatcatcgcataccgcagagctcttgcaaagccatggaatctaggttctcaaaggtccgccaaattgcaaaaagagttggcagtgagtctgttgtactgtggcgttgaagtgaagttccctcaagaattttctcaggaaaggaatctggtaacccctgggaacaacttagaggaagcaattttgttattactcatgctaacaagaaagctatttctccgagaaatacaatgggatcctgaccttgtgaatcatttggtgtatgcactctcattatctgggcactatgaagttttggccagccatcttgaaatgctgttgcctggaacctataccagatcagagagatggtatatccttgcactttgctacagtgcagctggcatggatgacagtgcgttaaacatcataaggaatggtttttctgtactggagagaaagggaaagcctcatgttccatctcttcttttaggagcaaaactatgttgtaagaacccaaagcatgcttccgaagggataaagtttgcaaataaagccatgaagtctttcagaagtcgtgatctgcatttcatcagcactacaaaacactttcttggtgtttgttatggacctttttctaggtcctccacctcatacttggacaaatcgagactgcaagataatgcactgaggctgttgcaggatgctgccacaacagcgaagtataatcctgaaataatgtatagcctagcttgggaaaatgcgatgcagcgcaaactcaatgcagctgttgaaagtgcaacagaatgtcttgagatggtgatgggtggttctgttagtgcctggaagttactaattcttgtattatctgcacagcagaatttgcaagaagctgaagcagtagcagattttgcaatggacgaggctgagaaaaatgatcagttggatattttgagactgaaagcacaaattcaagcttcccgtggacagttcaagtctgcagttgaaacttttcgggttttgcttgctgctatccaagtaaagaaggaagtctggaaattgaccacttgtaatgaggttaaatgcctacaaaagttggagatggacgcatggttagatttggcatcaatctattcaaagcttgaggcatggcatgactcaaacatctgccttgacaaagctatatccattgatttctattatcccaagtgttggcatgtcagaggtcttctattggaggctcaattcttgcacaaggaagccctgatggcattctctttcgcgctatcaattgacccagattacgtcccgggcatggtttgtatggcaggaattctccgaaatattggaggggattcattatcaattgcaagaacttacttgcgcaatgccctccgtttagagcctacaaaccaccgtgcctggttgagtcttgggcttgtcctgaaagctgaaggatcgctgcaggaggccgcggattgcttccaggcagcatatgagcttagagaattatcaccaattcaggatttctctgagcaactcccgatcatgctgcattaggaatctatagcaaaggagttcacattttttgtggattttccccatagttgtcttagttattaacttatcccttgcaaaggtaggaaacatatgtttttgtgaatgtaaattagtccacttttgttcgtgaggaaatttactcgctcttgaaaacatcaaagttatataacttactagtacaattgatacgaatcaattgtcattaacgaaacatctcaagccctcagacatatcggcaatgcaacaataatgtaatctacgaataaaaaacaataattaatgtacttagtcgctacatggtataatatctgtaatcttgtgaaaggacaatccgat

SEQ ID NO: 199864 - DNA, 2749 bp, Zea Mays
taatgacttgtttgttttcgggggtatggttgccatggttgattgcgatatatggaaatggagggtggaatttatctctctactatctgctgtgtagtgggccattgctgctgttgacactcgacggccctgcagtctacctggttctattgtgccccgacagaagatcctgagagctagagctgtttttttccctacatatagttaagttaaattatctgcacagccgaagatgtccgcgatcatgttatgtacctgcagcggggaccagtccaagtttgaagatcttcctagatcgccagaatctcttgcaacacgtgacttttcagcgaattgctcttcttcaaagatggcaagtcgagaaacaactcctgatgacagccaagtaaatgaagtagaatcagacctaaaagaaaccctttcactaaattatgaggaggctcgagcattgttaggtagactggaacatcagagagggaactttgatgcagcattgcaagttcttcaggggattgatataagaagcctgagaccacgaatgaccactgctattgctgaaagtgtcaagcctagaatgcccccacgctcttcaagacgaaaatcttcacaagtgaacggaatgcttatgcatatgtccatgcattctgtaagcttgcttctagaggccatactgcttaaagcaaaatctctggacacccttggtagagcagcagatgctgcagaagaatgcagaaccatcatagacattatagagtctgcatggccatatggtgttccggatggtacttctgaagagtgtaagctaatagacatattccattcggctctagaatatcttcctaaactgtggatgaggagtggttgttttgatgaagccatcatcgcataccgcagagctcttgcaaagccatggaatctaggttctcaaaggtccgccaaattgcaaaaagagttggcagtgagtctgttgtactgtggcgttgaagtgaagttccctcaagaattttctcaggaaaggaatctggtaacccctgggaacaacttagaggaagcaattttgttattactcatgctaacaagaaagctatttctccgagaaatacaatgggatcctgaccttgtgaatcatttggtgtatgcactctcattatctgggcactatgaagttttggccagccatcttgaaatgctgttgcctggaacctataccagatcagagagatggtatatccttgcactttgctacagtgcagctggcatggatgacagtgcgttaaacatcataaggaatggtttttctgtactggagagaaagggaaagcctcatgttccatctcttcttttaggagcaaaactatgttgtaagaacccaaagcatgcttccgaagggataaagtttgcaaataaagccatgaagtctttcagaagtcgtgatctgcatttcatcagcactacaaaacactttcttggtgtttgttatggacctttttctaggtcctccacctcatacttggacaaatcgagactgcaagataatgcactgaggctgttgcaggatgctgccacaacagcgaagtataatcctgaaataatgtatagcctagcttgggaaaatgcgatgcagcgcaaactcaatgcagctgttgaaagtgcaacagaatgtcttgagatggtgatgggtggttctgttagtgcctggaagttactaattcttgtattatctgcacagcagaatttgcaagaagctgaagcagtagcagattttgcaatggacgaggctgagaaaaatgatcagttggatattttgagactgaaagcacaaattcaagcttcccgtggacagttcaagtctgcagttgaaacttttcgggttttgcttgctgctatccaagtaaagaaggaagtctggaaattgaccacttgtaatgaggttaaatgcctacaaaagttggagatggacgcatggttagatttggcatcaatctattcaaagcttgaggcatggcatgactcaaacatctgccttgacaaagctatatccattgatttctattatcccaagtgttggcatgtcagaggtcttctattggaggctcaattcttgcacaaggaagccctgatggcattctctttcgcgctatcaattgacccagattacgtcccgggcatggtttgtatggcaggaattctccgaaatattggaggggattcattatcaattgcaagaacttacttgcgcaatgccctccgtttagagcctacaaaccaccgtgcctggttgagtcttgggcttgtcctgaaagctgaaggatcgctgcaggaggccgcggattgcttccaggcagcatatgagcttagagaattatcaccaattcaggatttctctgagcaactcccgatcatgctgcattaggaatctatagcaaaggagttcacattttttgtggattttccccatagttgtcttagttattaacttatcccttgcaaaggtaggaaacatatgtttttgtgaatgtaaattagtccacttttgttcgtgaggaaatttactcgctcttgaaaacatcaaagttatataacttactagtacaattgatacgaatcaattgtcattaacgaaacatctcaagccctcagacatatcggcaatgcaacaataatgtaatctacgaataaaaaacaataattaatgtacttagtcgctacatggtataatatctgtaatcttgtgaaaggacaatccgat

SEQ ID NO: 199865 - DNA, 1975 bp, Zea Mays
gataaaggacagccaaagtcaattcaaaggaggggaagtggatgctggaactgagacaaacatcaatcttaatcatcagatatattaccatgttttgggatctgatcagtcagaggatatattgtgctggaaagatcccgaacacccaaagtattcctttggtgcctcagtcactgaagatggaaagtacatcatattgggcatctatgaaggttgtgaccctgtcaacaaattatactattgtgaaatttcttctcttcctcaaggaatagagggctttagagggacacaggatttgcttccgtttgtcaagcttattgacaattttgatgctcaatatcaagttgtggccaatgatggtgatgaatttacatttttgaccaataaaagtgcccctaagaataagctggtaagggtaaatatcaaaaatccagagctgtggactgatgttctctcagagcatgaaaaagatgtgctcgaatcagccgacgccgttaacaataaccaacttttggtgaattatatgtcagatgttaagcatattctgcagataagagaccttagaactggaaactttattcatcagttgcctttggagatcggttctgtttcagagatctcgtgcagacgagaagacaaggaagtatttattggcttcacaagctttctttctccaggcattattttcaggtgtaacttagcatctacaatccctgaaatgaagatgtttcgagaaatttcagttcctggatttgatcgcacaagttttcaagttaagcaggtttttgttcctagcaaggatggaaccaaaattcccatgttcataatgtcgaagaaagatatcgatcttaatggatcgcatccaactttgctatatggttatggaggattcaacataagcataacaccttcatttagtgttggtcgcgttgtgctatgcaagaacatgggctttgttgtctgtgtagcaaacattcggggtggtggagagtacggggaggagtggcacaaagctggagcacttgcaatgaaacaaaattgttttgatgactttgctgcctgtgctgaattcctcatttctaatggttacaccagttccagacgtttatgtattgaaggcggaagcaatggtggtcttctggttgctgcttccattaatcagaggcctgatctctttggatgtgctctcgctcatgttggcgtcatggacatgctccgttttcacaagtttacaattggtcatgcatggactacagactatggttgttcagataaggaagaagagttccagtggctcattaaatattctccccttcataatgtacggagaccttgggagcaaagctctggtaataactgccagtatccagcaaccatgttgttgacagctgatcatgacgatcgtgttgtgccattgcattcactgaagttattagcaactttgcagcatgtcctgtgtaccagcactgaggacagtccgcagacgaatccaataattggtcgcattgatcggaagtcagggcatggagctggcaggccaactcaaaaaatgattgacgaagctgcagacagatatagctttatggcaaaaatgttaggggcttcgtggactgaatagtgaattttgtccagcttagtgtggagatggtgagcaagattactctatgcagtcaaagtaaagtggctgtaaaagttatattgcttatgttttgctcttgcttggatgatcatccaccaaatagtatagtgtttatgcttcggtttgagataagggttcagggagcattgtcatgcttggcgttggtgcaccatttctttcatatatatcttttgattgttaaattttatacgttactacttcattgattctaaattataagatgttttggttttttcagatatattgtttttgttatgctatattgctatgtatactatatgtctaaaagaaaggtgaattgagattttttctttc

SEQ ID NO: 199866 - DNA, 1359 bp, Zea Mays
attatgggaaatcgtggatacatcctcagtgacctaaaattttctggtcagggtcaagttttcgaacagaagctactggatatggtctggtaaagtgctaccttaattttcgtttggctggagatagtgtgttctgtgggtgctatagttgtttcacaagtaatatttctgttgcatgtgttgactggaccattgtccttgttcaaagtgaaacactatatgaaatcattctatctatgcaggtgttttttgcacgtcttttacttgctgaaatgaataaagagcttaaaggattaagatgtgtgatcagcggttctgggaagatagcaatgcatgttttggaaaagcttttgccttgtggagccattcctattactgtctcagattcaaagggatatttgttagatgaagatgggtttgattatatgaaatattcacttctaagggatattaaggctcagcaaaagagcctcaaggagtacttgaaatcatatccacatgctaagtatattgatgatgcaaaaccatggagccagcggtgtgatgttgcatttccttgtgcatcacataatgagattgaccaaggggaggctgttgcaatcagcaactctggttgtcgtgttcttgtcgaatgttcaaatatgtcgtgcactgttcaagctgttgatatcctaagaaaggcaaaagttattgttgctccagcaaaggcaactgctgctggtggggtagcacttggggagattgaattgaatccagagtttaatttgatgcaattgtcagtggaggattttgagaatagaattcaagatgcaataaagcaaacatatgaaaggtcggtcaaagctgctcaagattacgggatcatgaaagaaagccccgagtttttggtccatggcgcgaacatttgtgctttccttaatatcgcgcaagccatgactgaccagggatgtgtttagttaggcctggattctgtcaagaagcttcaactggagctttctgcaaccgcgagggaaaaaactttctgacaactagaggtgctttgatgcttaaactttgagtagttctgcacaaatcttgaagccctacaaaacagggagtaactaggatccatttacccctgtttatgctagaaatgtgtacagctaaggtgtaggaaaggcaactaggatccatttatgctagaaatgtgtacagctaaatgtaaatggaaagttctacattgtatgcaaagcctatatccgcaccatctgttacaccaatttgatttcattgttatgaacgacatattattctagtgcaaccacgctaattggtgcaacagtgcaatcaagataagacacgacaatggagttgagaggg

SEQ ID NO: 199867 - DNA, 1243 bp, Zea Mays
ctgaagtccatatccagaatttagattatgggaaatcgtggatacatcctcagtggaaattttacaggacctaaaattttctggtcagggtcaagttttcgaacagaagctactggatatggtctggtgttttttgcacgtcttttacttgctgaaatgaataaagagcttaaaggattaagatgtgtgatcagcggttctgggaagatagcaatgcatgttttggaaaagcttttgccttgtggagccattcctattactgtctcagattcaaagggatatttgttagatgaagatgggtttgattatatgaaatattcacttctaagggatattaaggctcagcaaaagagcctcaaggagtacttgaaatcatatccacatgctaagtatattgatgatgcaaaaccatggagccagcggtgtgatgttgcatttccttgtgcatcacataatgagattgaccaaggggaggctgttgcaatcagcaactctggttgtcgtgttcttgtcgaatgttcaaatatgtcgtgcactgttcaagctgttgatatcctaagaaaggcaaaagttattgttgctccagcaaaggcaactgctgctggtggggtagcacttggggagattgaattgaatccagagtttaatttgatgcaattgtcagtggaggattttgagaatagaattcaagatgcaataaagcaaacatatgaaaggtcggtcaaagctgctcaagattacgggatcatgaaagaaagccccgagtttttggtccatggcgcgaacatttgtgctttccttaatatcgcgcaagccatgactgaccagggatgtgtttagttaggcctggattctgtcaagaagcttcaactggagctttctgcaaccgcgagggaaaaaactttctgacaactagaggtgctttgatgcttaaactttgagtagttctgcacaaatcttgaagccctacaaaacagggagtaactaggatccatttacccctgtttatgctagaaatgtgtacagctaaggtgtaggaaaggcaactaggatccatttatgctagaaatgtgtacagctaaatgtaaatggaaagttctacattgtatgcaaagcctatatccgcaccatctgttacaccaatttgatttcattgttatgaacgacatattattctagtgcaaccacgctaattggtgcaacagtgcaatcaagataagacacgacaatggagttgagaggg

SEQ ID NO: 199868 - DNA, 2565 bp, Zea Mays
gctgtttctgcttgctgtcgccggccgcagtctccgccgcggctcacggatgccctgcatcctccttcccgcggccgcgcttaatcgaagccttcttctgcaccaaccttatcctgtcagctggaaacgccaaattctccaaaccctagcgccaaaatccccattctgatcgctgcaaccggagccggattctcttggtttacgcctggcgctcgtatcgtgtctccgcatgatgcaacgagcacgcgcatgaactcgatggatgaaatcaacctgctgcggcaggcgcagcggcagcatcagcatcatctcatggtgcgcggcatcggcgaggagatcgacctcgagatcggccctgtcgacgatccctctttttccggagcttccttagtggccgttacgtccacgcacgacactgtcgttcacgccgacgaccacaagagcctcctcatcccgtgttcgcagcccggcgcggcggacgggctggcgccgcagcagcacctgtcgcagggggaagagcatgacgggatgctcaggtcgccgtcggggcacaccaagaagaagaagaaggtggtcaagaaatggcgggaggagtgggcggacacctacaagtgggcctacgtcgccgtgcacgacaccaccaccaggatcttctgctcggtgtgcaaggagtacggccggaagcaccgccggaatccatatggtaacgagggaagcaggaatatgcagatgagtgcgcttgaggagcacaacaatagcttgttgcataaggaggcgctccggttacagatggcctccaaggagaagttgcagcctcccgagattgaggggccggtctatgtcaaagctttatcgaaaacagcagcatcaatacttgaatgtgtcctaaggagggatccccatgaagctgaatatatacagtcgatccaggaggtggttcattccttagaacctgttttggtgaagaatgcccaatatattcaaattttggagcgtttgttggaacctgagagatgctttatcttcagagtgccatggattgatgacagaggtgaagcacacgtcaatagaggtttccgtgtgcaattcagtcaggcgttaggtccatgcaggggtggtcttcggtttcacccatccatgagcttaagtgtggcaaagtttctggcctttgaacatactttaaagaatgctttgtcactatataaacttggaggtgctgctggaggaagtgattttgatccaaagggaaaaagtgataatgagataatgcgcttttgccaaagtttcatggatgagctgtatagatatttgggccctgatcaggattttcccgctgaagatattggtgttggtccaagggaaatgggttacctttttgggcagtatagacgtctttctggtcattttcagggtcaagttttcgaacagaagctactggatatggtctggtgttttttgcacgtcttttacttgctgaaatgaataaagagcttaaaggattaagatgtgtgatcagcggttctgggaagatagcaatgcatgttttggaaaagcttttgccttgtggagccattcctattactgtctcagattcaaagggatatttgttagatgaagatgggtttgattatatgaaatattcacttctaagggatattaaggctcagcaaaagagcctcaaggagtacttgaaatcatatccacatgctaagtatattgatgatgcaaaaccatggagccagcggtgtgatgttgcatttccttgtgcatcacataatgagattgaccaaggggaggctgttgcaatcagcaactctggttgtcgtgttcttgtcgaatgttcaaatatgtcgtgcactgttcaagctgttgatatcctaagaaaggcaaaagttattgttgctccagcaaaggcaactgctgctggtggggtagcacttggggagattgaattgaatccagagtttaatttgatgcaattgtcagtggaggattttgagaatagaattcaagatgcaataaagcaaacatatgaaaggtcggtcaaagctgctcaagattacgggatcatgaaagaaagccccgagtttttggtccatggcgcgaacatttgtgctttccttaatatcgcgcaagccatgactgaccagggatgtgtttagttaggcctggattctgtcaagaagcttcaactggagctttctgcaaccgcgagggaaaaaactttctgacaactagaggtgctttgatgcttaaactttgagtagttctgcacaaatcttgaagccctacaaaacagggagtaactaggatccatttacccctgtttatgctagaaatgtgtacagctaaggtgtaggaaaggcaactaggatccatttatgctagaaatgtgtacagctaaatgtaaatggaaagttctacattgtatgcaaagcctatatccgcaccatctgttacaccaatttgatttcattgttatgaacgacatattattctagtgcaaccacgctaattggtgcaacagtgcaatcaagataagacacgacaatggagttgagaggg

SEQ ID NO: 199869 - DNA, 2673 bp, Zea Mays
cgcggctgtttctgcttgctgtcgccggccgcagtctccgccgcggctcacggatgccctgcatcctccttcccgcggccgcgcttaatcgaagccttcttctgcaccaaccttatcctgtcagctggaaacgccaaattctccaaaccctagcgccaaaatccccattctgatcgctgcaaccggagccggattctcttggtttacgcctggcgctcgtatcgtgtctccgcatgatgcaacgagcacgcgcatgaactcgatggatgaaatcaacctgctgcggcaggcgcagcggcagcatcagcatcatctcatggtgcgcggcatcggcgaggagatcgacctcgagatcggccctgtcgacgatccctctttttccggagcttccttagtggccgttacgtccacgcacgacactgtcgttcacgccgacgaccacaagagcctcctcatcccgtgttcgcagcccggcgcggcggacgggctggcgccgcagcagcacctgtcgcagggggaagagcatgacgggatgctcaggtcgccgtcggggcacaccaagaagaagaagaaggtggtcaagaaatggcgggaggagtgggcggacacctacaagtgggcctacgtcgccgtgcacgacaccaccaccaggatcttctgctcggtgtgcaaggagtacggccggaagcaccgccggaatccatatggtaacgagggaagcaggaatatgcagatgagtgcgcttgaggagcacaacaatagcttgttgcataaggaggcgctccggttacagatggcctccaaggagaagttgcagcctcccgagattgaggggccggtctatgtcaaagctttatcgaaaacagcagcatcaatacttgaatgtgtcctaaggagggatccccatgaagctgaatatatacagtcgatccaggaggtggttcattccttagaacctgttttggtgaagaatgcccaatatattcaaattttggagcgtttgttggaacctgagagatgctttatcttcagagtgccatggattgatgacagaggtgaagcacacgtcaatagaggtttccgtgtgcaattcagtcaggcgttaggtccatgcaggggtggtcttcggtttcacccatccatgagcttaagtgtggcaaagtttctggcctttgaacatactttaaagaatgctttgtcactatataaacttggaggtgctgctggaggaagtgattttgatccaaagggaaaaagtgataatgagataatgcgcttttgccaaagtttcatggatgagctgtatagatatttgggccctgatcaggattttcccgctgaagatattggtgttggtccaagggaaatgggttacctttttgggcagtatagacgtctttctggtcattttcagggaaattttacaggacctaaaattttctggtcagggtcaagttttcgaacagaagctactggatatggtctggtaaagtgctaccttaattttcgtttggctggagatagtgtgttctgtgggtgctatagttgtttcacaagtgttttttgcacgtcttttacttgctgaaatgaataaagagcttaaaggattaagatgtgtgatcagcggttctgggaagatagcaatgcatgttttggaaaagcttttgccttgtggagccattcctattactgtctcagattcaaagggatatttgttagatgaagatgggtttgattatatgaaatattcacttctaagggatattaaggctcagcaaaagagcctcaaggagtacttgaaatcatatccacatgctaagtatattgatgatgcaaaaccatggagccagcggtgtgatgttgcatttccttgtgcatcacataatgagattgaccaaggggaggctgttgcaatcagcaactctggttgtcgtgttcttgtcgaatgttcaaatatgtcgtgcactgttcaagctgttgatatcctaagaaaggcaaaagttattgttgctccagcaaaggcaactgctgctggtggggtagcacttggggagattgaattgaatccagagtttaatttgatgcaattgtcagtggaggattttgagaatagaattcaagatgcaataaagcaaacatatgaaaggtcggtcaaagctgctcaagattacgggatcatgaaagaaagccccgagtttttggtccatggcgcgaacatttgtgctttccttaatatcgcgcaagccatgactgaccagggatgtgtttagttaggcctggattctgtcaagaagcttcaactggagctttctgcaaccgcgagggaaaaaactttctgacaactagaggtgctttgatgcttaaactttgagtagttctgcacaaatcttgaagccctacaaaacagggagtaactaggatccatttacccctgtttatgctagaaatgtgtacagctaaggtgtaggaaaggcaactaggatccatttatgctagaaatgtgtacagctaaatgtaaatggaaagttctacattgtatgcaaagcctatatccgcaccatctgttacaccaatttgatttcattgttatgaacgacatattattctagtgcaaccacgctaattggtgcaacagtgcaatcaagataagacacgacaatggagttgagaggg

SEQ ID NO: 199870 - DNA, 2362 bp, Zea Mays
gcggttgccgcggctgtttctgcttgctgtcgccggccgcagtctccgccgcggctcacggatgccctgcatcctccttcccgcggccgcgcttaatcgaagccttcttctgcaccaaccttatcctgtcagctggaaacgccaaattctccaaaccctagcgccaaaatccccattctgatcgctgcaaccggagccggattctcttggtttacgcctggcgctcgtatcgtgtctccgcatgatgcaacgagcacgcgcatgaactcgatggatgaaatcaacctgctgcggcaggcgcagcggcagcatcagcatcatctcatggtgcgcggcatcggcgaggagatcgacctcgagatcggccctgtcgacgatccctctttttccggagcttccttagtggccgttacgtccacgcacgacactgtcgttcacgccgacgaccacaagagcctcctcatcccgtgttcgcagcccggcgcggcggacgggctggcgccgcagcagcacctgtcgcagggggaagagcatgacgggatgctcaggtcgccgtcggggcacaccaagaagaagaagaaggtggtcaagaaatggcgggaggagtgggcggacacctacaagtgggcctacgtcgccgtgcacgacaccaccaccaggatcttctgctcggtgtgcaaggagtacggccggaagcaccgccggaatccatatggtaacgagggaagcaggaatatgcagatgagtgcgcttgaggagcacaacaatagcttgttgcataaggaggcgctccggttacagatggcctccaaggagaagttgcagcctcccgagattgaggggccggtctatgtcaaagctttatcgaaaacagcagcatcaatacttgaatgtgtcctaaggagggatccccatgaagctgaatatatacagtcgatccaggaggtggttcattccttagaacctgttttggtgaagaatgcccaatatattcaaattttggagcgtttgttggaacctgagagatgctttatcttcagagtgccatggattgatgacagaggtgaagcacacgtcaatagaggtttccgtgtgcaattcagtcaggcgttaggtccatgcaggggtggtcttcggtttcacccatccatgagcttaagtgtggcaaagtttctggcctttgaacatactttaaagaatgctttgtcactatataaacttggaggtgctgctggaggaagtgattttgatccaaagggaaaaagtgataatgagataatgcgcttttgccaaagtttcatggatgagctgtatagatatttgggccctgatcaggattttcccgctgaagatattggtgttggtccaagggaaatgggttacctttttgggcagtatagacgtctttctggtcattttcagggaaattttacaggacctaaaattttctggtcagggtcaagttttcgaacagaagctactggatatggtctggtgttttttgcacgtcttttacttgctgaaatgaataaagagcttaaaggattaagatgtgtgatcagcggttctgggaagatagcaatgcatgttttggaaaagcttttgccttgtggagccattcctattactgtctcaggttcaaatatgtcgtgcactgttcaagctgttgatatcctaagaaaggcaaaagttattgttgctccagcaaaggcaactgctgctggtggggtagcacttggggagattgaattgaatccagagtttaatttgatgcaattgtcagtggaggattttgagaatagaattcaagatgcaataaagcaaacatatgaaaggtcggtcaaagctgctcaagattacgggatcatgaaagaaagccccgagtttttggtccatggcgcgaacatttgtgctttccttaatatcgcgcaagccatgactgaccagggatgtgtttagttaggcctggattctgtcaagaagcttcaactggagctttctgcaaccgcgagggaaaaaactttctgacaactagaggtgctttgatgcttaaactttgagtagttctgcacaaatcttgaagccctacaaaacagggagtaactaggatccatttacccctgtttatgctagaaatgtgtacagctaaggtgtaggaaaggcaactaggatccatttatgctagaaatgtgtacagctaaatgtaaatggaaagttctacattgtatgcaaagcctatatccgcaccatctgttacaccaatttgatttcattgttatgaacgacatattattctagtgcaaccacgctaattggtgcaacagtgcaatcaagataagacacgacaatggagttgagaggg

SEQ ID NO: 199871 - DNA, 2650 bp, Zea Mays
cagcgcagcggttgccgcggctgtttctgcttgctgtcgccggccgcagtctccgccgcggctcacggatgccctgcatcctccttcccgcggccgcgcttaatcgaagccttcttctgcaccaaccttatcctgtcagctggaaacgccaaattctccaaaccctagcgccaaaatccccattctgatcgctgcaaccggagccggattctcttggtttacgcctggcgctcgtatcgtgtctccgcatgatgcaacgagcacgcgcatgaactcgatggatgaaatcaacctgctgcggcaggcgcagcggcagcatcagcatcatctcatggtgcgcggcatcggcgaggagatcgacctcgagatcggccctgtcgacgatccctctttttccggagcttccttagtggccgttacgtccacgcacgacactgtcgttcacgccgacgaccacaagagcctcctcatcccgtgttcgcagcccggcgcggcggacgggctggcgccgcagcagcacctgtcgcagggggaagagcatgacgggatgctcaggtcgccgtcggggcacaccaagaagaagaagaaggtggtcaagaaatggcgggaggagtgggcggacacctacaagtgggcctacgtcgccgtgcacgacaccaccaccaggatcttctgctcggtgtgcaaggagtacggccggaagcaccgccggaatccatatggtaacgagggaagcaggaatatgcagatgagtgcgcttgaggagcacaacaatagcttgttgcataaggaggcgctccggttacagatggcctccaaggagaagttgcagcctcccgagattgaggggccggtctatgtcaaagctttatcgaaaacagcagcatcaatacttgaatgtgtcctaaggagggatccccatgaagctgaatatatacagtcgatccaggaggtggttcattccttagaacctgttttggtgaagaatgcccaatatattcaaattttggagcgtttgttggaacctgagagatgctttatcttcagagtgccatggattgatgacagagactttaaagaatgctttgtcactatataaacttggaggtgctgctggaggaagtgattttgatccaaagggaaaaagtgataatgagataatgcgcttttgccaaagtttcatggatgagctgtatagatatttgggccctgatcaggattttcccgctgaagatattggtgttggtccaagggaaatgggttacctttttgggcagtatagacgtctttctggtcattttcagggaaattttacaggacctaaaattttctggtcagggtcaagttttcgaacagaagctactggatatggtctggtaaagtgctaccttaattttcgtttggctggagatagtgtgttctgtgggtgctatagttgtttcacaagtaatatttctgttgcatgtgttgactggaccattgtccttgttcaaagtgaaacactatatgaaatcattctatctatgcaggtgttttttgcacgtcttttacttgctgaaatgaataaagagcttaaaggattaagatgtgtgatcagcggttctgggaagatagcaatgcatgttttggaaaagcttttgccttgtggagccattcctattactgtctcagattcaaagggatatttgttagatgaagatgggtttgattatatgaaatattcacttctaagggatattaaggctcagcaaaagagcctcaagtggggagtacttgaaatcatatccacatgctaagtatattgatgatgcaaaaccatggagccagcggtgtgatgttgcatttccttgtgcatcacataatgagattgaccaaggggaggctgttgcaatcagcaactctggttgtcgtgttcttgtcgaatgttcaaatatgtcgtgcactgttcaagctgttgatatcctaagaaaggcaaaagttattgttgctccagcaaaggcaactgctgctggtggggtagcacttggggagattgaattgaatccagagtttaatttgatgcaattgtcagtggaggattttgagaatagaattcaagatgcaataaagcaaacatatgaaaggtcggtcaaagctgctcaagattacgggatcatgaaagaaagccccgagtttttggtccatggcgcgaacatttgtgctttccttaatatcgcgcaagccatgactgaccagggatgtgtttagttaggcctggattctgtcaagaagcttcaactggagctttctgcaaccgcgagggaaaaaactttctgacaactagaggtgctttgatgcttaaactttgagtagttctgcacaaatcttgaagccctacaaaacagggagtaactaggatccatttacccctgtttatgctagaaatgtgtacagctaaggtgtaggaaaggcaactaggatccatttatgctagaaatgtgtacagctaaatgtaaatggaaagttctacattgtatgcaaagcctatatccgcaccatctgttacaccaatttgatttcattgttatgaacgacatattattctagtgcaaccacgctaattggtgcaacagtgcaatcaagataagacacgacaatggagttgagaggg

SEQ ID NO: 199872 - DNA, 2629 bp, Zea Mays
ctctgtcgggactagcctcagcgcagcggttgccgcggctgtttctgcttgctgtcgccggccgcagtctccgccgcggctcacggatgccctgcatcctccttcccgcggccgcgcttaatcgaagccttcttctgcaccaaccttatcctgtcagctggaaacgccaaattctccaaaccctagcgccaaaatccccattctgatcgctgcaaccggagccggattctcttggtttacgcctggcgctcgtatcgtgtctccgcatgatgcaacgagcacgcgcatgaactcgatggatgaaatcaacctgctgcggcaggcgcagcggcagcatcagcatcatctcatggtgcgcggcatcggcgaggagatcgacctcgagatcggccctgtcgacgatccctctttttccggagcttccttagtggccgttacgtccacgcacgacactgtcgttcacgccgacgaccacaagagcctcctcatcccgtgttcgcagcccggcgcggcggacgggctggcgccgcagcagcacctgtcgcagggggaagagcatgacgggatgctcaggtcgccgtcggggcacaccaagaagaagaagaaggtggtcaagaaatggcgggaggagtgggcggacacctacaagtgggcctacgtcgccgtgcacgacaccaccaccaggatcttctgctcggtgtgcaaggagtacggccggaagcaccgccggaatccatatggtaacgagggaagcaggaatatgcagatgagtgcgcttgaggagcacaacaatagcttgttgcataaggaggcgctccggttacagatggcctccaaggagaagttgcagcctcccgagattgaggggccggtctatgtcaaagctttatcgaaaacagcagcatcaatacttgaatgtgtcctaaggagggatccccatgaagctgaatatatacagtcgatccaggaggtggttcattccttagaacctgttttggtgaagaatgcccaatatattcaaattttggagcgtttgttggaacctgagagatgctttatcttcagagtgccatggattgatgacagaggtgaagcacacgtcaatagaggtttccgtgtgcaattcagtcaggcgttaggtccatgcaggggtggtcttcggtttcacccatccatgagcttaagtgtggcaaagtttctggcctttgaacatactttaaagaatgctttgtcactatataaacttggaggtgctgctggaggaagtgattttgatccaaagggaaaaagtgataatgagataatgcgcttttgccaaagtttcatggatgagctgtatagatatttgggccctgatcaggattttcccgctgaagatattggtgttggtccaagggaaatgggttacctttttgggcagtatagacgtctttctggtcattttcagggaaattttacaggacctaaaattttctggtcagggtcaagttttcgaacagaagctactggatatggtctggtgttttttgcacgtcttttacttgctgaaatgaataaagagcttaaaggattaagatgtgtgatcagcggttctgggaagatagcaatgcatgttttggaaaagcttttgccttgtggagccattcctattactgtctcagattcaaagggatatttgttagatgaagatgggtttgattatatgaaatattcacttctaagggatattaaggctcagcaaaagagcctcaaggagtacttgaaatcatatccacatgctaagtatattgatgatgcaaaaccatggagccagcggtgtgatgttgcatttccttgtgcatcacataatgagattgaccaaggggaggctgttgcaatcagcaactctggttgtcgtgttcttgtcgaatgttcaaatatgtcgtgcactgttcaagctgttgatatcctaagaaaggcaaaagttattgttgctccagcaaaggcaactgctgctggtggggtagcacttggggagattgaattgaatccagagtttaatttgatgcaattgtcagtggaggattttgagaatagaattcaagtaaactctgctgctcctgaccacctggcagtcatttttcgcttctgcttcccaattgtgattccttgtttttggtccatggcgcgaacatttgtgctttccttaatatcgcgcaagccatgactgaccagggatgtgtttagttaggcctggattctgtcaagaagcttcaactggagctttctgcaaccgcgagggaaaaaactttctgacaactagaggtgctttgatgcttaaactttgagtagttctgcacaaatcttgaagccctacaaaacagggagtaactaggatccatttacccctgtttatgctagaaatgtgtacagctaaggtgtaggaaaggcaactaggatccatttatgctagaaatgtgtacagctaaatgtaaatggaaagttctacattgtatgcaaagcctatatccgcaccatctgttacaccaatttgatttcattgttatgaacgacatattattctagtgcaaccacgctaattggtgcaacagtgcaatcaagataagacacgacaatggagttgagaggg

SEQ ID NO: 199873 - DNA, 2651 bp, Zea Mays
gaaaactctgtcgggactagcctcagcgcagcggttgccgcggctgtttctgcttgctgtcgccggccgcagtctccgccgcggctcacggatgccctgcatcctccttcccgcggccgcgcttaatcgaagccttcttctgcaccaaccttatcctgtcagctggaaacgccaaattctccaaaccctagcgccaaaatccccattctgatcgctgcaaccggagccggattctcttggtttacgcctggcgctcgtatcgtgtctccgcatgatgcaacgagcacgcgcatgaactcgatggatgaaatcaacctgctgcggcaggcgcagcggcagcatcagcatcatctcatggtgcgcggcatcggcgaggagatcgacctcgagatcggccctgtcgacgatccctctttttccggagcttccttagtggccgttacgtccacgcacgacactgtcgttcacgccgacgaccacaagagcctcctcatcccgtgttcgcagcccggcgcggcggacgggctggcgccgcagcagcacctgtcgcagggggaagagcatgacgggatgctcaggtcgccgtcggggcacaccaagaagaagaagaaggtggtcaagaaatggcgggaggagtgggcggacacctacaagtgggcctacgtcgccgtgcacgacaccaccaccaggatcttctgctcggtgtgcaaggagtacggccggaagcaccgccggaatccatatggtaacgagggaagcaggaatatgcagatgagtgcgcttgaggagcacaacaatagcttgttgcataaggaggcgctccggttacagatggcctccaaggagaagttgcagcctcccgagattgaggggccggtctatgtcaaagctttatcgaaaacagcagcatcaatacttgaatgtgtcctaaggagggatccccatgaagctgaatatatacagtcgatccaggaggtggttcattccttagaacctgttttggtgaagaatgcccaatatattcaaattttggagcgtttgttggaacctgagagatgctttatcttcagagtgccatggattgatgacagagactttaaagaatgctttgtcactatataaacttggaggtgctgctggaggaagtgattttgatccaaagggaaaaagtgataatgagataatgcgcttttgccaaagtttcatggatgagctgtatagatatttgggccctgatcaggattttcccgctgaagatattggtgttggtccaagggaaatgggttacctttttgggcagtatagacgtctttctggtcattttcaggacctaaaattttctggtcagggtcaagttttcgaacagaagctactggatatggtctggtaaagtgctaccttaattttcgtttggctggagatagtgtgttctgtgggtgctatagttgtttcacaagtgttttttgcacgtcttttacttgctgaaatgaataaagagcttaaaggattaagatgtgtgatcagcggttctgggaagatagcaatgcatgttttggaaaagcttttgccttgtggagccattcctattactgtctcagattcaaagggatatttgttagatgaagatgggtttgattatatgaaatattcacttctaagggatattaaggctcagcaaaagagcctcaagtgggtacatgcctttcccttatttttggcttgtacatgtggagttttttagatatctttctccatttattcaaacagggagtacttgaaatcatatccacatgctaagtatattgatgatgcaaaaccatggagccagcggtgtgatgttgcatttccttgtgcatcacataatgagattgaccaaggggaggctgttgcaatcagcaactctggttgtcgtgttcttgtcgaatgttcaaatatgtcgtgcactgttcaagctgttgatatcctaagaaaggcaaaagttattgttgctccagcaaaggcaactgctgctggtggggtagcacttggggagattgaattgaatccagagtttaatttgatgcaattgtcagtggaggattttgagaatagaattcaagatgcaataaagcaaacatatgaaaggtcggtcaaagctgctcaagattacgggatcatgaaagaaagccccgagtttttggtccatggcgcgaacatttgtgctttccttaatatcgcgcaagccatgactgaccagggatgtgtttagttaggcctggattctgtcaagaagcttcaactggagctttctgcaaccgcgagggaaaaaactttctgacaactagaggtgctttgatgcttaaactttgagtagttctgcacaaatcttgaagccctacaaaacagggagtaactaggatccatttacccctgtttatgctagaaatgtgtacagctaaggtgtaggaaaggcaactaggatccatttatgctagaaatgtgtacagctaaatgtaaatggaaagttctacattgtatgcaaagcctatatccgcaccatctgttacaccaatttgatttcattgttatgaacgacatattattctagtgcaaccacgctaattggtgcaacagtgcaatcaagataagacacgacaatggagttgagaggg

SEQ ID NO: 199874 - DNA, 2718 bp, Zea Mays
gaaaactctgtcgggactagcctcagcgcagcggttgccgcggctgtttctgcttgctgtcgccggccgcagtctccgccgcggctcacggatgccctgcatcctccttcccgcggccgcgcttaatcgaagccttcttctgcaccaaccttatcctgtcagctggaaacgccaaattctccaaaccctagcgccaaaatccccattctgatcgctgcaaccggagccggattctcttggtttacgcctggcgctcgtatcgtgtctccgcatgatgcaacgagcacgcgcatgaactcgatggatgaaatcaacctgctgcggcaggcgcagcggcagcatcagcatcatctcatggtgcgcggcatcggcgaggagatcgacctcgagatcggccctgtcgacgatccctctttttccggagcttccttagtggccgttacgtccacgcacgacactgtcgttcacgccgacgaccacaagagcctcctcatcccgtgttcgcagcccggcgcggcggacgggctggcgccgcagcagcacctgtcgcagggggaagagcatgacgggatgctcaggtcgccgtcggggcacaccaagaagaagaagaaggtggtcaagaaatggcgggaggagtgggcggacacctacaagtgggcctacgtcgccgtgcacgacaccaccaccaggatcttctgctcggtgtgcaaggagtacggccggaagcaccgccggaatccatatggtaacgagggaagcaggaatatgcagatgagtgcgcttgaggagcacaacaatagcttgttgcataaggaggcgctccggttacagatggcctccaaggagaagttgcagcctcccgagattgaggggccggtctatgtcaaagctttatcgaaaacagcagcatcaatacttgaatgtgtcctaaggagggatccccatgaagctgaatatatacagtcgatccaggaggtggttcattccttagaacctgttttggtgaagaatgcccaatatattcaaattttggagcgtttgttggaacctgagagatgctttatcttcagagtgccatggattgatgacagaggtgaagcacacgtcaatagaggtttccgtgtgcaattcagtcaggcgttaggtccatgcaggggtggtcttcggtttcacccatccatgagcttaagtgtggcaaagtttctggcctttgaacatactttaaagaatgctttgtcactatataaacttggaggtgctgctggaggaagtgattttgatccaaagggaaaaagtgataatgagataatgcgcttttgccaaagtttcatggatgagctgtatagatatttgggccctgatcaggattttcccgctgaagatattggtgttggtccaagggaaatgggttacctttttgggcagtatagacgtctttctggtcattttcagggaaattttacaggacctaaaattttctggtcagggtcaagttttcgaacagaagctactggatatggtctggtgttttttgcacgtcttttacttgctgaaatgaataaagagcttaaaggattaaggtttcttacattgatccactaaatgtttctttgttataatttagccttttgttactttaatactatgcaaagttttctgcagatgtgtgatcagcggttctgggaagatagcaatgcatgttttggaaaagcttttgccttgtggagccattcctattactgtctcagattcaaagggatatttgttagatgaagatgggtttgattatatgaaatattcacttctaagggatattaaggctcagcaaaagagcctcaaggagtacttgaaatcatatccacatgctaagtatattgatgatgcaaaaccatggagccagcggtgtgatgttgcatttccttgtgcatcacataatgagattgaccaaggggaggctgttgcaatcagcaactctggttgtcgtgttcttgtcgaatgttcaaatatgtcgtgcactgttcaagctgttgatatcctaagaaaggcaaaagttattgttgctccagcaaaggcaactgctgctggtagcacttggggagattgaattgaatccagagtttaatttgatgcaattgtcagtggaggattttgagaatagaattcaagatgcaataaagcaaacatatgaaaggtcggtcaaagctgctcaagattacgggatcatgaaagaaagccccgagtttttggtccatggcgcgaacatttgtgctttccttaatatcgcgcaagccatgactgaccagggatgtgtttagttaggcctggattctgtcaagaagcttcaactggagctttctgcaaccgcgagggaaaaaactttctgacaactagaggtgctttgatgcttaaactttgagtagttctgcacaaatcttgaagccctacaaaacagggagtaactaggatccatttacccctgtttatgctagaaatgtgtacagctaaggtgtaggaaaggcaactaggatccatttatgctagaaatgtgtacagctaaatgtaaatggaaagttctacattgtatgcaaagcctatatccgcaccatctgttacaccaatttgatttcattgttatgaacgacatattattctagtgcaaccacgctaattggtgcaacagtgcaatcaagataagacacgacaatggagttgagaggg

SEQ ID NO: 199875 - DNA, 2516 bp, Zea Mays
gaaaactctgtcgggactagcctcagcgcagcggttgccgcggctgtttctgcttgctgtcgccggccgcagtctccgccgcggctcacggatgccctgcatcctccttcccgcggccgcgcttaatcgaagccttcttctgcaccaaccttatcctgtcagctggaaacgccaaattctccaaaccctagcgccaaaatccccattctgatcgctgcaaccggagccggattctcttggtttacgcctggcgctcgtatcgtgtctccgcatgatgcaacgagcacgcgcatgaactcgatggatgaaatcaacctgctgcggcaggcgcagcggcagcatcagcatcatctcatggtgcgcggcatcggcgaggagatcgacctcgagatcggccctgtcgacgatccctctttttccggagcttccttagtggccgttacgtccacgcacgacactgtcgttcacgccgacgaccacaagagcctcctcatcccgtgttcgcagcccggcgcggcggacgggctggcgccgcagcagcacctgtcgcagggggaagagcatgacgggatgctcaggtcgccgtcggggcacaccaagaagaagaagaaggtggtcaagaaatggcgggaggagtgggcggacacctacaagtgggcctacgtcgccgtgcacgacaccaccaccaggatcttctgctcggtgtgcaaggagtacggccggaagcaccgccggaatccatatggtaacgagggaagcaggaatatgcagatgagtgcgcttgaggagcacaacaatagcttgttgcataaggaggcgctccggttacagatggcctccaaggagaagttgcagcctcccgagattgaggggccggtctatgtcaaagctttatcgaaaacagcagcatcaatacttgaatgtgtcctaaggagggatccccatgaagctgaatatatacagtcgatccaggaggtggttcattccttagaacctgttttggtgaagaatgcccaatatattcaaattttggagcgtttgttggaacctgagagatgctttatcttcagagtgccatggattgatgacagagactttaaagaatgctttgtcactatataaacttggaggtgctgctggaggaagtgattttgatccaaagggaaaaagtgataatgagataatgcgcttttgccaaagtttcatggatgagctgtatagatatttgggccctgatcaggattttcccgctgaagatattggtgttggtccaagggaaatgggttacctttttgggcagtatagacgtctttctggtcattttcagggaaattttacaggacctaaaattttctggtcagggtcaagttttcgaacagaagctactggatatggtctggtgttttttgcacgtcttttacttgctgaaatgaataaagagcttaaaggattaagatgtgtgatcagcggttctgggaagatagcaatgcatgttttggaaaagcttttgccttgtggagccattcctattactgtctcagattcaaagggatatttgttagatgaagatgggtttgattatatgaaatattcacttctaagggatattaaggctcagcaaaagagcctcaaggagtacttgaaatcatatccacatgctaagtatattgatgatgcaaaaccatggagccagcggtgtgatgttgcatttccttgtgcatcacataatgagattgaccaaggggaggctgttgcaatcagcaactctggttgtcgtgttcttgtcgaatgttcaaatatgtcgtgcactgttcaagctgttgatatcctaagaaaggcaaaagttattgttgctccagcaaaggcaactgctgctggtggggtagcacttggggagattgaattgaatccagagtttaatttgatgcaattgtcagtggaggattttgagaatagaattcaagatgcaataaagcaaacatatgaaaggtcggtcaaagctgctcaagattacgggatcatgaaagaaagccccgagtttttggtccatggcgcgaacatttgtgctttccttaatatcgcgcaagccatgactgaccagggatgtgtttagttaggcctggattctgtcaagaagcttcaactggagctttctgcaaccgcgagggaaaaaactttctgacaactagaggtgctttgatgcttaaactttgagtagttctgcacaaatcttgaagccctacaaaacagggagtaactaggatccatttacccctgtttatgctagaaatgtgtacagctaaggtgtaggaaaggcaactaggatccatttatgctagaaatgtgtacagctaaatgtaaatggaaagttctacattgtatgcaaagcctatatccgcaccatctgttacaccaatttgatttcattgttatgaacgacatattattctagtgcaaccacgctaattggtgcaacagtgcaatcaagataagacacgacaatggagttgagaggg

SEQ ID NO: 199876 - DNA, 2588 bp, Zea Mays
agaaaactctgtcgggactagcctcagcgcagcggttgccgcggctgtttctgcttgctgtcgccggccgcagtctccgccgcggctcacggatgccctgcatcctccttcccgcggccgcgcttaatcgaagccttcttctgcaccaaccttatcctgtcagctggaaacgccaaattctccaaaccctagcgccaaaatccccattctgatcgctgcaaccggagccggattctcttggtttacgcctggcgctcgtatcgtgtctccgcatgatgcaacgagcacgcgcatgaactcgatggatgaaatcaacctgctgcggcaggcgcagcggcagcatcagcatcatctcatggtgcgcggcatcggcgaggagatcgacctcgagatcggccctgtcgacgatccctctttttccggagcttccttagtggccgttacgtccacgcacgacactgtcgttcacgccgacgaccacaagagcctcctcatcccgtgttcgcagcccggcgcggcggacgggctggcgccgcagcagcacctgtcgcagggggaagagcatgacgggatgctcaggtcgccgtcggggcacaccaagaagaagaagaaggtggtcaagaaatggcgggaggagtgggcggacacctacaagtgggcctacgtcgccgtgcacgacaccaccaccaggatcttctgctcggtgtgcaaggagtacggccggaagcaccgccggaatccatatggtaacgagggaagcaggaatatgcagatgagtgcgcttgaggagcacaacaatagcttgttgcataaggaggcgctccggttacagatggcctccaaggagaagttgcagcctcccgagattgaggggccggtctatgtcaaagctttatcgaaaacagcagcatcaatacttgaatgtgtcctaaggagggatccccatgaagctgaatatatacagtcgatccaggaggtggttcattccttagaacctgttttggtgaagaatgcccaagtgccatggattgatgacagaggtgaagcacacgtcaatagaggtttccgtgtgcaattcagtcaggcgttaggtccatgcaggggtggtcttcggtttcacccatccatgagcttaagtgtggcaaagtttctggcctttgaacatactttaaagaatgctttgtcactatataaacttggaggtgctgctggaggaagtgattttgatccaaagggaaaaagtgataatgagataatgcgcttttgccaaagtttcatggatgagctgtatagatatttgggccctgatcaggattttcccgctgaagatattggtgttggtccaagggaaatgggttacctttttgggcagtatagacgtctttctggtcattttcagggaaattttacaggacctaaaattttctggtcagggtcaagttttcgaacagaagctactggatatggtctggtgttttttgcacgtcttttacttgctgaaatgaataaagagcttaaaggattaagatgtgtgatcagcggttctgggaagatagcaatgcatgttttggaaaagcttttgccttgtggagccattcctattactgtctcagattcaaagggatatttgttagatgaagatgggtttgattatatgaaatattcacttctaagggatattaaggctcagcaaaagagcctcaaggagtacttgaaatcatatccacatgctaagtatattgatgatgcaaaaccatggagccagcggtgtgatgttgcatttccttgtgcatcacataatgagattgaccaaggggaggctgttgcaatcagcaactctggttgtcgtgttcttgtcgaatgttcaaatatgtcgtgcactgttcaagctgttgatatcctaagaaaggcaaaagttattgttgctccagcaaaggcaactgctgctggtggggtagcacttggggagattgaattgaatccagagtttaatttgatgcaattgtcagtggaggattttgagaatagaattcaagatgcaataaagcaaacatatgaaaggtcggtcaaagctgctcaagattacgggatcatgaaagaaagccccgagtttttggtccatggcgcgaacatttgtgctttccttaatatcgcgcaagccatgactgaccagggatgtgtttagttaggcctggattctgtcaagaagcttcaactggagctttctgcaaccgcgagggaaaaaactttctgacaactagaggtgctttgatgcttaaactttgagtagttctgcacaaatcttgaagccctacaaaacagggagtaactaggatccatttacccctgtttatgctagaaatgtgtacagctaaggtgtaggaaaggcaactaggatccatttatgctagaaatgtgtacagctaaatgtaaatggaaagttctacattgtatgcaaagcctatatccgcaccatctgttacaccaatttgatttcattgttatgaacgacatattattctagtgcaaccacgctaattggtgcaacagtgcaatcaagataagacacgacaatggagttgagaggg

SEQ ID NO: 199877 - DNA, 2641 bp, Zea Mays
gtaataatagaaagaaaactctgtcgggactagcctcagcgcagcggttgccgcggctgtttctgcttgctgtcgccggccgcagtctccgccgcggctcacggatgccctgcatcctccttcccgcggccgcgcttaatcgaagccttcttctgcaccaaccttatcctgtcagctggaaacgccaaattctccaaaccctagcgccaaaatccccattctgatcgctgcaaccggagccggattctcttggtttacgcctggcgctcgtatcgtgtctccgcatgatgcaacgagcacgcgcatgaactcgatggatgaaatcaacctgctgcggcaggcgcagcggcagcatcagcatcatctcatggtgcgcggcatcggcgaggagatcgacctcgagatcggccctgtcgacgatccctctttttccggagcttccttagtggccgttacgtccacgcacgacactgtcgttcacgccgacgaccacaagagcctcctcatcccgtgttcgcagcccggcgcggcggacgggctggcgccgcagcagcacctgtcgcagggggaagagcatgacgggatgctcaggtcgccgtcggggcacaccaagaagaagaagaaggtggtcaagaaatggcgggaggagtgggcggacacctacaagtgggcctacgtcgccgtgcacgacaccaccaccaggatcttctgctcggtgtgcaaggagtacggccggaagcaccgccggaatccatatggtaacgagggaagcaggaatatgcagatgagtgcgcttgaggagcacaacaatagcttgttgcataaggaggcgctccggttacagatggcctccaaggagaagttgcagcctcccgagattgaggggccggtctatgtcaaagctttatcgaaaacagcagcatcaatacttgaatgtgtcctaaggagggatccccatgaagctgaatatatacagtcgatccaggaggtggttcattccttagaacctgttttggtgaagaatgcccaatatattcaaattttggagcgtttgttggaacctgagagatgctttatcttcagagtgccatggattgatgacagaggtgaagcacacgtcaatagaggtttccgtgtgcaattcagtcaggcgttaggtccatgcaggggtggtcttcggtttcacccatccatgagcttaagtgtggcaaagtttctggcctttgaacatactttaaagaatgctttgtcactatataaacttggaggtgctgctggaggaagtgattttgatccaaagggaaaaagtgataatgagataatgcgcttttgccaaagtttcatggatgagctgtatagatatttgggccctgatcaggattttcccgctgaagatattggtgttggtccaagggaaatgggttacctttttgggcagtatagacgtctttctggtcattttcaggacctaaaattttctggtcagggtcaagttttcgaacagaagctactggatatggtctggtgttttttgcacgtcttttacttgctgaaatgaataaagagcttaaaggattaagatgtgtgatcagcggttctgggaagatagcaatgcatgttttggaaaagcttttgccttgtggagccattcctattactgtctcagattcaaagggatatttgttagatgaagatgggtttgattatatgaaatattcacttctaagggatattaaggctcagcaaaagagcctcaaggagtacttgaaatcatatccacatgctaagtatattgatgatgcaaaaccatggagccagcggtgtgatgttgcatttccttgtgcatcacataatgagattgaccaaggggaggctgttgcaatcagcaactctggttgtcgtgttcttgtcgaatgttcaaatatgtcgtgcactgttcaagctgttgatatcctaagaaaggcaaaagttattgttgctccagcaaaggcaactgctgctggtggggtagcacttggggagattgaattgaatccagagtttaatttgatgcaattgtcagtggaggattttgagaatagaattcaagatgcaataaagcaaacatatgaaaggtcggtcaaagctgctcaagattacgggatcatgaaagaaagccccgagtttttggtccatggcgcgaacatttgtgctttccttaatatcgcgcaagccatgactgaccagggatgtgtttagttaggcctggattctgtcaagaagcttcaactggagctttctgcaaccgcgagggaaaaaactttctgacaactagaggtgctttgatgcttaaactttgagtagttctgcacaaatcttgaagccctacaaaacagggagtaactaggatccatttacccctgtttatgctagaaatgtgtacagctaaggtgtaggaaaggcaactaggatccatttatgctagaaatgtgtacagctaaatgtaaatggaaagttctacattgtatgcaaagcctatatccgcaccatctgttacaccaatttgatttcattgttatgaacgacatattattctagtgcaaccacgctaattggtgcaacagtgcaatcaagataagacacgacaatggagttgagaggg

SEQ ID NO: 199878 - DNA, 2688 bp, Zea Mays
ctgacatctatgccaaaatgaatgagtaccgtaataatagaaagaaaactctgtcgggactagcctcagcgcagcggttgccgcggctgtttctgcttgctgtcgccggccgcagtctccgccgcggctcacggatgccctgcatcctccttcccgcggccgcgcttaatcgaagccttcttctgcaccaaccttatcctgtcagctggaaacgccaaattctccaaaccctagcgccaaaatccccattctgatcgctgcaaccggagccggattctcttggtttacgcctggcgctcgtatcgtgtctccgcatgatgcaacgagcacgcgcatgaactcgatggatgaaatcaacctgctgcggcaggcgcagcggcagcatcagcatcatctcatggtgcgcggcatcggcgaggagatcgacctcgagatcggccctgtcgacgatccctctttttccggagcttccttagtggccgttacgtccacgcacgacactgtcgttcacgccgacgaccacaagagcctcctcatcccgtgttcgcagcccggcgcggcggacgggctggcgccgcagcagcacctgtcgcagggggaagagcatgacgggatgctcaggtcgccgtcggggcacaccaagaagaagaagaaggtggtcaagaaatggcgggaggagtgggcggacacctacaagtgggcctacgtcgccgtgcacgacaccaccaccaggatcttctgctcggtgtgcaaggagtacggccggaagcaccgccggaatccatatggtaacgagggaagcaggaatatgcagatgagtgcgcttgaggagcacaacaatagcttgttgcataaggaggcgctccggttacagatggcctccaaggagaagttgcagcctcccgagattgaggggccggtctatgtcaaagctttatcgaaaacagcagcatcaatacttgaatgtgtcctaaggagggatccccatgaagctgaatatatacagtcgatccaggaggtggttcattccttagaacctgttttggtgaagaatgcccaatatattcaaattttggagcgtttgttggaacctgagagatgctttatcttcagagtgccatggattgatgacagaggtgaagcacacgtcaatagaggtttccgtgtgcaattcagtcaggcgttaggtccatgcaggggtggtcttcggtttcacccatccatgagcttaagtgtggcaaagtttctggcctttgaacatactttaaagaatgctttgtcactatataaacttggaggtgctgctggaggaagtgattttgatccaaagggaaaaagtgataatgagataatgcgcttttgccaaagtttcatggatgagctgtatagatatttgggccctgatcaggattttcccgctgaagatattggtgttggtccaagggaaatgggttacctttttgggcagtatagacgtctttctggtcattttcagggaaattttacaggacctaaaattttctggtcagggtcaagttttcgaacagaagctactggatatggtctggtgttttttgcacgtcttttacttgctgaaatgaataaagagcttaaaggattaagatgtgtgatcagcggttctgggaagatagcaatgcatgttttggaaaagcttttgccttgtggagccattcctattactgtctcagattcaaagggatatttgttagatgaagatgggtttgattatatgaaatattcacttctaagggatattaaggctcagcaaaagagcctcaagtggggagtacttgaaatcatatccacatgctaagtatattgatgatgcaaaaccatggagccagcggtgtgatgttgcatttccttgtgcatcacataatgagattgaccaaggggaggctgttgcaatcagcaactctggttgtcgtgttcttgtcgaatgttcaaatatgtcgtgcactgttcaagctgttgatatcctaagaaaggcaaaagttattgttgctccagcaaaggcaactgctgctggtggggtagcacttggggagattgaattgaatccagagtttaatttgatgcaattgtcagtggaggattttgagaatagaattcaagatgcaataaagcaaacatatgaaaggtcggtcaaagctgctcaagattacgggatcatgaaagaaagccccgagtttttggtccatggcgcgaacatttgtgctttccttaatatcgcgcaagccatgactgaccagggatgtgtttagttaggcctggattctgtcaagaagcttcaactggagctttctgcaaccgcgagggaaaaaactttctgacaactagaggtgctttgatgcttaaactttgagtagttctgcacaaatcttgaagccctacaaaacagggagtaactaggatccatttacccctgtttatgctagaaatgtgtacagctaaggtgtaggaaaggcaactaggatccatttatgctagaaatgtgtacagctaaatgtaaatggaaagttctacattgtatgcaaagcctatatccgcaccatctgttacaccaatttgatttcattgttatgaacgacatattattctagtgcaaccacgctaattggtgcaacagtgcaatcaagataagacacgacaatggagttgagaggg

SEQ ID NO: 199879 - DNA, 2500 bp, Zea Mays
cgaccccagaccccctctcgcttcgcccctcctcatcctctctcctctctcccccgccccgttcgtctccggcgagctagggtttgcccccccgccttgccaccccacggttcccgccatccttggatctccagccatgtacggcggagacgaggtttcggcaatcgtcatagatgtgggctcttacagctgcaaggcgggctacgcaggcgacgacacccccaaggccgtcttcccatcggttgttggttcaattgaacaaactgaagacacagatgaccccaagccagagaaggaagctgactctgcatcagattctaagaacggtgccaagcccatggatgtggacaaagccaagacaaaacgcagactttatgtaggccaagagttagagttcaggagggatcacatggaggtgatttcatctatgaaagatggaacggtaactgactgggatattgttgataatatatggaatcatgctttcagacggaggttgttgatcaatcctgaagagcatcctatgctcattgctgaaccatctacaaacactgcacagcaaagagagaaagcagcggaacttatgtttgagaactacaaagtgccagcgctgtttctagccaaaaatgcagtgctcacatcttttgcgtctggacgagctacatctttggtggttgacaggtgatcattttcttcgcttcattccactaagaagatacttttttctcttatgaaacaatagtccgctttgcccatgttagattggtgaatgcatctttttatgctgcctgcttccattggttcctcctctttattcaatatagaatatacaaactatatttttgcttcattagtcagacacagttgcataggtactattagtccatcattcactccatgggaataaaatgatttgagaaactgaaagttgatgctcttgcccttgttttgtgacaagattctataccgttctatgcccttaccatgattgtcatattggtttaacgtgctagagcatgattgagttaatctgtgcttttgagcttttaggtgtagccatctctgttattttataattttggactgtctcaatttttaactctgccatgtgtttttgggatcacttctcgccttagcagccatttagcccatttaaacggtacacgtaggccagccatgcttgttaaccagcagtctagcctgtttagccatctaaataaggtggccaactatttgacgtttttggttgacaattgtttgggactctgttggtgtaacaaataacaatattatcactggttcagtttgttttattcccgatggcttttgggacctcttcatgagaaacatagctggaatatgataatatggctagttttggtgcagtggtggtgggtctactgtggtttctgctgtacacgatggttttgttttacagaagtctgtgtcgacttctccagttggcggtgaatttttaactgactgtatgatgaaaagcttggagagcaagggcatcgtcattaggcccagatattcatttaagaagaaggaaatcagtcctggagaatataagattgtagatcttgatcttccaaacacaactgagagttacaggttgtactgcatgagagctattgctagtgacgtcaaggagtctgtttgcagagttccagacactgcttttgatgaagtggcatatgcaaatgttcctacaacttcatatgagcttcctgatggacaaactattgaagttggtgctgatagattcaaggttcctgatattctatttaatccatctctatcccagactattcctgggattgatggatttgcagattcaataccagtccgtggccttcaacgaatggtcattgatagcgtaaataagtgcgacgttgacatacgaaaagagctattcagtaacatcttgctctctggtgggtcatcatcaattctgcagttaaaggagcgcctggagaaagaagtattggaggagtctcctcaagctgctcgtgtcaaggttatggcaagcggaaactcagtagagagacgtttcagtgtttggattggagggagcattctagcatctcttgggtcgttccagcagatgtggttctccaaagcagagtatgaagagcatggggtttcctatattcagagaaagtgcccttgaagcaggggaaggaatatgtacaaccaatattatgctttacgagccttattgttgccaaagggttccttgtgtacaacagcctggtgccttgccatgttggccaatgaatactcgagactcttttcaagtgacgtttgttgtcttcatggctagttaattttaggtgatgtaagaatgagacgggaccccatcttgttctgtaccggggctaattctttgccagcacacaaagagccaagacgattgttgtaactcgggttatttaaatcccagctgcagagcaaatacacaactttaaacgtgtagcgagcaggcagaacaacgatg

SEQ ID NO: 199880 - DNA, 3265 bp, Zea Mays
aaacagcatgcctcccctacgattttcctttttttacttttttgttttctagccaaggaaccacccgtcatcttttcttgtcccgctcggccagctccattccttctcctcctcctctttccttgcgcgaaggagaggaggaggaagcgcttcgcctgtattatcctatagctttcaccaagcccacgaaccaccgtcgtcgtcttgccggagcaagcaagcgcggagtagagcaaatggctagcgaggagcggatcttggtgtcggtgcgactgcggccggtgaacgcacgagaggcggagcgcggtgatggctccgactgggagtgcacgagcacgaccaccctcatgttccgcggcaacatccctgagcgcgccatgttccccgcctcctacacctacgacagggtgttcaacccgaagtgcagcacgcgccaggtgtacgaggaaggggctaagcaggtggccctgtcggtgctcagcggcatcaattcaagcatatttgcgtacggtcagacgagcagcgggaagacgtacacgatggtcggcatcacggagcgcagcatgtcagacatctacgactacattgacaagcatcccgagagggaattcgtcctgaaattttcggcgatggagatatacaacgaagccgtgagggatctcttaagacctgatgcaacacaactaaggctactggatgatccagagaaaggaactgtggtagagaaactcaccgaggaaactctcaaggacaaaggccatctcttggagctccttgcagtgtgtgaagctcaaagacagatcggggaaacttctatgaatgaagcgagctccagatctcatcagatactcagattgacgatcgagagttcagcaaagcagttcatgggacgaggaaactcaagcacccttctggcttgtgtgaattttgttgatttagcaggaagtgagcgtgcctctcagacacaatcagctggtatgaggcttaaggaaggcagccacattaacagaagcctgctaactttgggaaaggtcattcgccaactcagcaagggaagaaatgggcatatcccttacagagattcaaagctcactcgcatattgcagtcatctttaggcggcaacgcgagaactgctattatctgcacaatgagcccagcacactgccatatcgagcagtccaggaacacacttttgtttgcaaattgtgctaaaaatgtagttactgacgcaaaggtcaatgtggtgatgtctgacaaggtgttagtgaaacatcttcagagagaaattgcaaggctagagaatgagttgaagtttcatggatcagcctataccagcaatcatgctgatgctttgagagaaaaagatgagctgatcaaacagctcgaagaacaattgaaggaattgatggggcagaaagaaaccgttcagtctcaacttgacaattttcgtagagttgcaatagatgaaaattttgatgaccatgcaataagacaatgggatcaacgaaataggtcttcagagtcccttccacataatgtgtctgaagatgctctttcttcttttgatacttacgatgttgtttatggagaacaagatggtctaggcccaaaagcatttgatgtacatccaatatctatcttgcatcaaccaagaaaccatatttctgataacattcagatatatcaaccaaataaggaggcttcctcagaggtctctgaggagcattgcaaggaagtccagtgcatcgaaacaaatgagcttaggaggagtccattattctttcctgttgatcgatatcatgttggcacaaacattgatgaaggaaagcatgatgaaaacataacggacacatcagacagtgccatcaaattgtacacatgtgattctgagccatcttctgataccgaaaaaacaaataatgatgaatctttagccctgaagaggtgcgtgataagctctagggatagtgtactaactagaagcagaagttgcagagctagctttatggtcattccaaatagttggtttggtgattcgttggatatgagaatgacaagaccaggtgacattttcaaatattctcaaagaaggccaaagaacgttaggagtttgtatcctgaaaatggtcattgttcaaatgatcttacattcacttgtaatgaagaagatgaagacgccatcaacaatgtcgttggcataacaaaagtggaagagaagttagaagagtgttgtacatcccagctagagggcaatcaggatgacgttactgaagaaattttggacataaaacatgccaatgatgttgataaagatatatcagtgaccagtgtcgactctccttcacggtggcctattaactttgagaaaaaacagaaggaaatcattgagttgtggcatgaatgcaatgtatctatagtacacagaacatatttcttcctcctctttaagggggacaaagaagacaatatttacttggaagtggagcacagaagattatccttcattaaaagttctttcagtgttgcatctgaggctaatgctgctgctacatcaagcttgagaaatcttcggcatgaaagagacatgttgtacaggcaaatgctaaggagactcaatcttttggaaagagagagcctttacaacaaatgggggatcgatcttaattccaaacaacgaagactacagctatcacgtcgcatctggacacagactgacatggaacacgtgagggaaagtgtcgctcttgtcgcaaaactagtagaacacctggagaaggggcaggtcatcaaggagatgtttgggttgaccttcacactgaacccacaagctgaacgaagaccttttcagttgtgttagtgctcattcctaaactaagcattgcgataatgacaattatgatggttgaatgtctggatgagacaacaacaatggcataatggtaaacgatgaatacatagtaatatagatctcttgtcgggtctgaactcatcccaacattggttttcaccaatgtctgcatataattagtatcacttattatacagacgtgcatggtgatgccaaccctttgcacctaactatatgatgtgttggactatggtactatcaaaagcaaaccacatgagatgacaacccttgcacccaattgtatgatgtattgctattctgatattttctacatcaaatatatatctaatctacttgattgttttgtaaggtagagcaaatgctatgaaaatgccaacatttgttgttatgagctt

SEQ ID NO: 199881 - DNA, 1922 bp, Zea Mays
tggaaacgtccatctcctggtgcttctctcaagccaccgacgctcaggctctctacatcctttagcaggcgccaactccctggagctcgccttcctgctggccgcccccagcaccgacgccccttctttttccccatctccttccttggcgcgctcgcccaggtcacgcgtgtccctgctcgcccaggccgcgacctcgccaaaccgcgcagtccctgctctccttccccagccgcgctcagcccagcccttcctccttcgcccttgtcgagctccctcagctcgcccccaaccacaactgcacgccaacctcgccctaggccatggagcagcaacaaccatggaaccctttcgtgtcgcgccctcgatgtgctcgacgaaagttggttcgatgaacgggttggctaatcgcgatgtgtggaggagacaaatttctaggatctgagggtaagagaagccaagacctagagcgatgatcactaggtgttcggtgaaaaggatgaaccggtgatcgtggttggtcttgcaaaatccgagttctattttatgttgaaaatcgggcaggctctactacctttacctggcgatgctaaaagccaaccagcactagcaacagcgactcaatttgctgccacaaacatctgcaccagcagaggccgctaccgcagaagccaccacggaatcagatcctgcaacgtccactcctctttcaccttatacaaattacccagattgtggtgcccgacgaggtggggcgtcgtttgagagggccgatgaggcgtcggagaagaagcagtcgaacccgatgcgggagatgaaggtccagaagctcgtgctcaacatcttcgttggcgagagcggtgatcgcctcacccgcgccgccaaggtactggagcagctgagcggccagtcaccggtattctccaaggcaaggtacactgtgagatcgcatgctatgtgacggtgcggggtgagaaggcaatgcagctgctggagagtggcttgaaggtgaaggagaacgagctgctgaggaggaacttcagtgacactggttgctttggatttggtatccaagagcacattgatcttggcatcaatgacacgaccttgacagtcaagatgctctttcagctaggcagagcatgttctatttacagcaggccagcagacaccaggcagtaaggtgatgtatgaatcaattatcaggtgacaaaatggttatgtttaatcatgcatgttttcttcctgactctctatgtttctttgaggcattcaactacttgtagtatcagtgcatcactgatgtatatatgtgttgatgttcatcatccaagatcaaatacatcctgctaggtcattacttgctaatgtgcatctgagtttgctgttgccaggatggaaatgttttttggcagctttctcagtgaatcagtatcaccgcagaacctttttggacacccagatgtcgagagatgcccatttctgaggaatatcaatggagctacaaccttttccctctcttctgctttgccagtagctgctcaaggaggcaagggtccaatttttgaggaagggtcaggctttgagtcagcattcaagcttttccatggccgagatggaatagttcccctttcagaaagatcatatgtatctgatgaaaaccacaatgagagcattgacgtcaagttatatacttagttaggctcaatttagagtacacttatgtagagtacacttatttatattgaaccgtcggagttcctacatatgtatcaagttatatacttagttaggctcaatgttagcatcaacagttgatgagcaactttaaatttagagtacacttatgaatgagttatttgacaatgcttatttatgagatattgaatgttatttatctatattatattaattatagtgtt

SEQ ID NO: 199882 - DNA, 2730 bp, Zea Mays
cttgaatttaaattttgtcaggtttgagcctcagttactgcccacagtcgccacagatagacctccagtaccagtcacacacgcgaacgcgacactcgcaaagtcgcaagcgggtcgcaatcaaggctgctcccctctatctccgtgttcgcccctcggttcaccacccgccgccgccgagacctcctcctcgccggctactcctgaccccataaaggcagcgctcggaggtggccctctgtcgggtggagtggtggacacatccgcgcccatggccaaccgcggcgctgcggccggcaagctcaccgtcgccgagacattctccaacctcagggagcaaggcaagagtgcattcatcccgttcatcactgctggtgatcctgacctggcaaccacatcaaaagcattgaagattctcaattcctgcggttcggatgttatagaggttggcgtaccatactcggatccactggctgatggaccagttattcagattgacatcatttcaggcttctgcaacacgggcgcttaagaaaggcactacactcgattctgtcatagaaatgctgaagggggttacacctgagctttcttgccccattgttcttttcacatactataatccaattctgaaacgtggtgtgggaaacttcatgtcttttatcaaacaagctggcatacatggacttgtagtgcctgatcttcccttggaggagacagcgttgctgaggagcgaggccattatgcacaacatagagctggttcatacccactctcatctttgcatgcaccacttgcacaaagtttgttgcgtacttgtgttgctatctgggtgctaactaaattcttactcgagatgggacctatcaaatcttcagattgggctctgcccattccagacctgcaaatatacacagttgcaaaagatcttctgggcctttgcagcaacccagccctagaagcgggtctagctacttgggctcacacatgtcaacagggtttgtccagtccactaaattcaggataggttacatcaaggccttttttttatttcttgtaacctggtttggtaccacaccgaatagctttgcttattaatcatggtggaccaatcaacagaatagatatcttgagtgtaatgtacttggtatttttataaaagcttcctttatcgaaaaaaatcttgagtatcagccatataccatttttttttgcatgattgcttgcaggtgctgcttacaacgccaaccacgccaacagatcggatgaagggaattgcacaagcttcagaaggatttctctatcttgtgagcgctgtaggggttacaggtgcacgctcaaatgtaaacttacgtgtagaacaccttcttagggagatcaagaaggttagtaaactataacctgtttgtcgtcagtaaagagtgaacgagttttaatgcaccagcatggctagagaaatttgcgttcaagaatggttatgagaaaattcctggtatgccatcagattttatactcatcccttgtgtgccactgagtgacatataggtatattttttggtgtctatgacatgtggggccagtggcatacaaatggttatcttcctggctttacaggttacagacaaaccggtagctgttggtttcggtgtatcgactccagagcatgtgaaacagatcgtgggctggggagcggacggtgtgattgttggcagtgcgattgtgaggcagttgtgtgaggctgctactcctgaagagggtctggaaaggctcgaggagtacgccaggagtatgaaggctgctatgccgtgagctgatctcactccccgtcacaggcaaggtaaatagaacatggttttagcaatattctgggcatgggtttggcatccagaactcatcttagtgctgtacgggtcgttctcgggtggtgagaacgaagtctggctttgcctataatagaaaagggttaaactgagttagtgcgacattttgatggaaaagcgagtgattgcgagatatcagttcatgcttattggcagatcctttttttttttttttgctgaaagatggaaatgttagggatgaggttgccctggcctcttgagaggataggaataagagaggataagttcgttatgatttatatggctttccgcttgaaccccaccagctggtgtccatggggatgcgggcagagcagtgtctgattggctgcactgaaaatgacattaccttcagacaattcgccttgctctcttctggttctggagtactactttcgaggtccgtcagactgggtcacaagatgatcccaaacggccccagatgctgggtttttggacaacggaaagtcgattctgacctctgttaatgtcggccactcatgggtcatgaccaagccatgtttatggtcaaatcagtcccggatgctaacacgcttctctaatctctatctacggggactttttccggtgcttatcgtatcattatcatgcatgttactggtagttacatgttgtctgaacagattctttagctctgccatggcagcatgaagtgtatctggatgcgaagaagcagtgttggtattgaactgtccatgtacgagtagtttgttgctgtgctttggcgggtgaacagctaggattggataggctctagtgccagccgagccgccagggcccatgaaaagtcaattgtttgtaggataaacatgtgcgttttgactccggc

SEQ ID NO: 199883 - DNA, 2714 bp, Zea Mays
cttgaatttaaattttgtcaggtttgagcctcagttactgcccacagtcgccacagatagacctccagtaccagtcacacacgcgaacgcgacactcgcaaagtcgcaagcgggtcgcaatcaaggctgctcccctctatctccgtgttcgcccctcggttcaccacccgccgccgccgagacctcctcctcgccggctactcctgaccccataaaggcagcgctcggaggtggccctctgtcgggtggagtggtggacacatccgcgcccatggccaaccgcggcgctgcggccggcaagctcaccgtcgccgagacattctccaacctcagggagcaaggcaagagtgcattcatcccgttcatcactgctggtgatcctgacctggcaaccacatcaaaagcattgaagattctcaattcctgcggttcggatgttatagaggttggcgtaccatactcggatccactggctgatggaccagttattcaggcttctgcaacacgggcgcttaagaaaggcactacactcgattctgtcatagaaatgctgaagggggttacacctgagctttcttgccccattgttcttttcacatactataatccaattctgaaacgtggtgtgggaaacttcatgtcttttatcaaacaagctggcatacatggacttgtagtgcctgatcttcccttggaggagacagcgttgctgaggagcgaggccattatgcacaacatagagctggttcatacccactctcatctttgcatgcaccacttgcacaaagtttgttgcgtacttgtgttgctatctgggtgctaactaaattcttactcgagatgggacctatcaaatcttcagattgggctctgcccattccagacctgcaaatatacacagttgcaaaagatcttctgggcctttgcagcaacccagccctagaagcgggtctagctacttgggctcacacatgtcaacagggtttgtccagtccactaaattcaggataggttacatcaaggccttttttttatttcttgtaacctggtttggtaccacaccgaatagctttgcttattaatcatggtggaccaatcaacagaatagatatcttgagtgtaatgtacttggtatttttataaaagcttcctttatcgaaaaaaatcttgagtatcagccatataccatttttttttgcatgattgcttgcaggtgctgcttacaacgccaaccacgccaacagatcggatgaagggaattgcacaagcttcagaaggatttctctatcttgtgagcgctgtaggggttacaggtgcacgctcaaatgtaaacttacgtgtagaacaccttcttagggagatcaagaaggttagtaaactataacctgtttgtcgtcagtaaagagtgaacgagttttaatgcaccagcatggctagagaaatttgcgttcaagaatggttatgagaaaattcctggtatgccatcagattttatactcatcccttgtgtgccactgagtgacatataggtatattttttggtgtctatgacatgtggggccagtggcatacaaatggttatcttcctggctttacaggttacagacaaaccggtagctgttggtttcggtgtatcgactccagagcatgtgaaacagatcgtgggctggggagcggacggtgtgattgttggcagtgcgattgtgaggcagttgtgtgaggctgctactcctgaagagggtctggaaaggctcgaggagtacgccaggagtatgaaggctgctatgccgtgagctgatctcactccccgtcacaggcaaggtaaatagaacatggttttagcaatattctgggcatgggtttggcatccagaactcatcttagtgctgtacgggtcgttctcgggtggtgagaacgaagtctggctttgcctataatagaaaagggttaaactgagttagtgcgacattttgatggaaaagcgagtgattgcgagatatcagttcatgcttattggcagatcctttttttttttttttgctgaaagatggaaatgttagggatgaggttgccctggcctcttgagaggataggaataagagaggataagttcgttatgatttatatggctttccgcttgaaccccaccagctggtgtccatggggatgcgggcagagcagtgtctgattggctgcactgaaaatgacattaccttcagacaattcgccttgctctcttctggttctggagtactactttcgaggtccgtcagactgggtcacaagatgatcccaaacggccccagatgctgggtttttggacaacggaaagtcgattctgacctctgttaatgtcggccactcatgggtcatgaccaagccatgtttatggtcaaatcagtcccggatgctaacacgcttctctaatctctatctacggggactttttccggtgcttatcgtatcattatcatgcatgttactggtagttacatgttgtctgaacagattctttagctctgccatggcagcatgaagtgtatctggatgcgaagaagcagtgttggtattgaactgtccatgtacgagtagtttgttgctgtgctttggcgggtgaacagctaggattggataggctctagtgccagccgagccgccagggcccatgaaaagtcaattgtttgtaggataaacatgtgcgttttgactccggc

SEQ ID NO: 199884 - DNA, 2262 bp, Zea Mays
cttgaatttaaattttgtcaggtttgagcctcagttactgcccacagtcgccacagatagacctccagtaccagtcacacacgcgaacgcgacactcgcaaagtcgcaagcgggtcgcaatcaaggctgctcccctctatctccgtgttcgcccctcggttcaccacccgccgccgccgagacctcctcctcgccggctactcctgaccccataaaggcagcgctcggaggtggccctctgtcgggtggagtggtggacacatccgcgcccatggccaaccgcggcgctgcggccggcaagctcaccgtcgccgagacattctccaacctcagggagcaaggcaagagtgcattcatcccgttcatcactgctggtgatcctgacctggcaaccacatcaaaagcattgaagattctcaattcctgcggttcggatgttatagaggttggcgtaccatactcggatccactggctgatggaccagttattcagattgacatcatttcaggcttctgcaacacgggcgcttaagaaaggcactacactcgattctgtcatagaaatgctgaagggggttacacctgagctttcttgccccattgttcttttcacatactataatccaattctgaaacgtggtgtgggaaacttcatgtcttttatcaaacaagctggcatacatggacttgtagtgcctgatcttcccttggaggagacagcgttgctgaggagcgaggccattatgcacaacatagagctggtgctgcttacaacgccaaccacgccaacagatcggatgaagggaattgcacaagcttcagaaggatttctctatcttgtgagcgctgtaggggttacaggtgcacgctcaaatgtaaacttacgtgtagaacaccttcttagggagatcaagaaggttagtaaactataacctgtttgtcgtcagtaaagagtgaacgagttttaatgcaccagcatggctagagaaatttgcgttcaagaatggttatgagaaaattcctggtatgccatcagattttatactcatcccttgtgtgccactgagtgacatataggtatattttttggtgtctatgacatgtggggccagtggcatacaaatggttatcttcctggctttacaggttacagacaaaccggtagctgttggtttcggtgtatcgactccagagcatgtgaaacagatcgtgggctggggagcggacggtgtgattgttggcagtgcgattgtgaggcagttgtgtgaggctgctactcctgaagagggtctggaaaggctcgaggagtacgccaggagtatgaaggctgctatgccgtgagctgatctcactccccgtcacaggcaaggtaaatagaacatggttttagcaatattctgggcatgggtttggcatccagaactcatcttagtgctgtacgggtcgttctcgggtggtgagaacgaagtctggctttgcctataatagaaaagggttaaactgagttagtgcgacattttgatggaaaagcgagtgattgcgagatatcagttcatgcttattggcagatcctttttttttttttttgctgaaagatggaaatgttagggatgaggttgccctggcctcttgagaggataggaataagagaggataagttcgttatgatttatatggctttccgcttgaaccccaccagctggtgtccatggggatgcgggcagagcagtgtctgattggctgcactgaaaatgacattaccttcagacaattcgccttgctctcttctggttctggagtactactttcgaggtccgtcagactgggtcacaagatgatcccaaacggccccagatgctgggtttttggacaacggaaagtcgattctgacctctgttaatgtcggccactcatgggtcatgaccaagccatgtttatggtcaaatcagtcccggatgctaacacgcttctctaatctctatctacggggactttttccggtgcttatcgtatcattatcatgcatgttactggtagttacatgttgtctgaacagattctttagctctgccatggcagcatgaagtgtatctggatgcgaagaagcagtgttggtattgaactgtccatgtacgagtagtttgttgctgtgctttggcgggtgaacagctaggattggataggctctagtgccagccgagccgccagggcccatgaaaagtcaattgtttgtaggataaacatgtgcgttttgactccggc

SEQ ID NO: 199885 - DNA, 1653 bp, Zea Mays
gtgctcgcgagattcggccgcgcatgggctggttgtctggcaccgatgccgacgagtcggcgacctacaccacccagcgctcgcgagctcccgccccgacgccggacatgcgcaccccatgctgcgtagaccctgcacgatccgatgtgctctcctcagtagaaagtagaaaggggaggaagaaaaaggaagcggtggggtctttttcccattttccctctgatattatcatgtgcggcccatcacagagggtaactatggtttcttaattgagaagtccttgcgttgcatctggaactttcttgtaattaaacagtttcttccgtggatctgatatttaaaatttatctttctagtaatctgggtttggagagatgtgaggcagcttcggagactagctctcggagactgactttctggtagtgccgtagtggtggtagtctactttacgcgtttctttgaagtataaaaaaaatcatggcattggtggtagctccgaagtttctcggaactaacgcgtaacataagaagtcaatactacaaccttggattctcatcagttgggtacttcttctccaattggaccggcgtgacttaagtagcagtagtacctgaccacacggcgtccttctcttgagcagctggttgttgctcgttctcgcttgggggctgtgtgccgtctcacagcttgacgcctccaccgatcctccacaagggggttgaagaggactggaagggattgatgaaggggtacaagtcaaaatctgcccttaagcagttccaacagatgctcgcaggacacactgagagattttaagtgtcggaagggaaataatgatggagacaatcatggtgagtgctgcttgtggggtgatgaattccctgctgcgcaagcttgccactctactggagaaggaatacatgctactgaaagatgtgaagcacaacattaccttcttaagaaatgagcttgctagcatgaacttgctcctcttcaagctggcagacatagaagatctcgacgtgcaagtaaaggagtggaggaataagatccaagaactcagaacccgtgttgtggaggagagcgatcgccgttatagatacaagctggacgattcaaccttcaggcctgaaatgatggaaatcgaccatcgtctcaaggcgctctatgttgacacaaacaagcttgagggcattgatagcccagtggaacaaatcatacagtggcttacaggaaatgggaaacacgatcaagaactaaacataatggccatagtgggcttcggaggtttaggcaaaactacccttgcaatgcaggtatacaataaattcaaggacaaatttgattgcacagcttttgtgtcagtgtcaagaggccccaacatcaagaaagttttgatggacttacttaaagatgtgggagctgccattgacacaacagatgatgagatgcgtctcatcaacaaactcaaaggacatctcacaaaaaagaggtaaataatcaatcatcattatatgtgaaaagtttcctccaaatgttgttttgctaaaaggaactatatgagtcacgactcacgtagcctatagaggagaggtgaattggatcactttaaaaaccaatctagtgtttagaccaaaataaattggaagccc

SEQ ID NO: 199886 - DNA, 1711 bp, Zea Mays
cgagtgggcagtgtcgtcgccgaggaagccaatgccttggattcagtggcacatcgctatttggctgtgaacttatgatgtgatttggagcatacacatctggtcaagggcctgggctatgctctacttcacaaagtacggagtgaaattgaaaagaaacctgaggcagaggatgggaaggatgcaaagtcaagggcaacaaaagaagatcaggcagtctccttccgcactgcaactgcaaagtctgtctaccagtggatcataaagcctcaaagcataattaaagagaatgaattgtttcttcctggtcggatgtcatttatttacaacttggaggaggtagtaaccaatgacattccaacaactcttcataggagcaaagctgattgcccagttcaagaggagatggtaactgtaagtgtggatggttctgtacttgacaggattgctaaaattatgacgtaccttcggcttggatcatcagggaaggttttgaagaaaaagaaaaaggagagagatataaaagggaagaacaatttggcaagtggcgactgtgatgagtcagtaaaaccttccaaaattaatggttctactcagaaacatcaatcagatatgccaccaccaccagctcgaccccctcagaacaataatttcactggaaaggagaaacaaccagtccctgttgcaagagcagacgatgatgacatttttgttggagatggagttgactatacagttcctaacgaggaaatgagtcagagccctgtttctgatatggatgaatccccacataaccatcagaagcagtccaatttcattgaacccatgtatggccctgtaccaccatctgaacctgctcaagcttggcaacagccgaatgggtatgatgctgttcaagcccagatggcagctgctggatatcaaggtgactggtcaagctatgtgtatgcagaacagcagttgggttatccagagcagtacgtgcagcaaagcacacaggaatatgatgtgttagctgaccccagtatatcacaggatccgaggttcatgactcaggcagacaaggatcggggtttaggttctgttttcaaacgtgacgatcaaaggcttaatcagctgagggaaaaggacgaacgggagagagatccaaattttatttcagatagttactcagagtgttatcctggttaccaggagtataataatgagatcgcaggaagcgatgatgaagatgatttatcgaagatggatatgggtggacgggcgaagggccgtcttcacaggtgggacttcgagactgaagaggagtgggccaagtacaacgatcagaaagaagccatgccgaaggctgccttccagttcggggtgaagatgcaggacggcaggaaaaccaggaagcagaacaaggaccagaagctgacgaatgacctccacaagatcaacaagattctggctaggaagaagggcgagaaagatggggcggaagatggcggtcactacgatgatgatttacctagctcaaagaaacagcgtggctgaagcagtcatttttttgtttttgtttctcctgctcgtactgtaggcaggcgaacattctatgaagagtcacagtgtcatgtttagctggcagctgtatcctgctgcgtttgtttaaggtgtcctggtaggaaatatgttgatgctattgagccgaaaccatggaaggaatgtg

SEQ ID NO: 199887 - DNA, 1503 bp, Zea Mays
ccccgcacgcatgtcaccgaacaaccgggaccgggcaattcgtccagcagcatggacgcgcctccgccctcacagccggacgatgctgctccggcgccctcctcgaccttggcttctgctccctctccggcgccaacatccaacccacccacttccgccgccgccgccgcacccgccccggactccgccatcgccaaccctaacccgaacctagtttaggcaaccttcccctgggactcagaatattgggattgttggatcactcaatacatcccagattagtccaggcacaatatctggtccgcagaagcccagacctggtcttccatcatcaactcctattccatctggtagccaaatgccaggttcacaaagacccccatctcagtctttaatgaggccggtgactgtgagttctccttcgctggcttcacaacaaactccacaaagttcgtcttcaacatttaggccccaacagaggccacaagtttcacaaccaagaccacaacaatctcaacttgttactccacctcaacagaacacaattttaacacagcagcagcagcagcagaaacaacaacagagtgcctcacatcaaaatcaacaaattgctgcccctaaaaatcagccacagctttctcagcatccaactgctcgtactccaatatcaatgacaccaaagcctgatttgcctgctatacaaaatgttgctgttttacaatctgtggatacagctgcaactgatgcaaatgctagtgaaactggtactcgattactcaccaagagaagtatacatgaattagttgcacagattgatcctaatgaaaagctggatcctgaagttgaagatgttcttattgacatcgcagaagattttgttgagtctgtcacaacttttgcttgttctttagcaaagcataggaagtcaagcacattagaagcaaaagatgtactcctacatgcagaaagaagctggaatatcaccttgccaggcttcagtggtgatgaaatcaaactgtacaagaaacagcacataaatgatattcacagggagaggcttgctctgataaagaagtccatggcgactgacacgagaaactctgctgcccaagctgcagctaaccagaaaaatcagactccgaaaccacctgccccagcttccccgtgaaacatgtccacaggccctgcaaacacagtatcagtgtaccacgcatcacatctgtggtgttcggacagttgtcggttgtatgttggtagtgttgcaatgagtacatgtatagattattctgtcgttactcgttactaggatctggttagaatgttgtttagttaatccaatgcatggtttctgttattgtatatcacttctgttctaaactataaatcatttagggctagtctaggagccacaaaacctgagtggattgaaggggttaaaatcccctcatttaattttaaataagaagggaaaatatcatatgcaatcacttatcctggtgcaag

SEQ ID NO: 199888 - DNA, 714 bp, Zea Mays
gtttcctcaatccattttgcaaattgatcctaatgaaaagctggatcctgaagttgaagatgttcttattgacatcgcagaagattttgttgagtctgtcacaacttttgcttgttctttagcaaagcataggaagtcaagcacattagaagcaaaagatgtactcctacatgcagaaagaagctggaatatcaccttgccaggcttcagtggtgatgaaatcaaactgtacaagaaacagcacataaatgatattcacagggagaggcttgctctgataaagaagtccatggcgactgacacgagaaactctgctgcccaagctgcagctaaccagaaaaatcagactccgaaaccacctgccccagcttccccgtgaaacatgtccacaggccctgcaaacacagtatcagtgtaccacgcatcacatctgtggtgttcggacagttgtcggttgtatgttggtagtgttgcaatgagtacatgtatagattattctgtcgttactcgttactaggatctggttagaatgttgtttagttaatccaatgcatggtttctgttattgtatatcacttctgttctaaactataaatcatttagggctagtctaggagccacaaaacctgagtggattgaaggggttaaaatcccctcatttaattttaaataagaagggaaaatatcatatgcaatcacttatcctggtgcaag

SEQ ID NO: 199889 - DNA, 2878 bp, Zea Mays
ctttttctatgtggccaagcacgggcttcaaccacggcatcagccaccaggcaaccatgcggcagccgccccgcggaccacgcagattagagcagcccgcagcagcgaattaaagttacagcgggtcgtttgcgagcacacaaggatctctagctctgccatggtggtaactggtattctgggcgggctgctctaaccatcaaagcgtagcgcacaccacttgctcgacaaaaggaacatgtgcaatatggaggggaacaatatgcatgcttctagtaccagggcataacacaatgatgcctataatttttagtgtgaaaaaagttagatcaggtggcttatgaatctgtcttgtggagtagcttcatctagcaccatgtaaactgaaacctctgatgctattgtaaccgtgtagggacaacacgcatagctcacatattttggcttgagctgcctcccacactgcccatctcaatcattagaaaatgaaaaggagaatggaatatgattcttgttgtatgtagtgggcctggcacacacaaaaaaaaatgagaaaaggtccaggtttttttgttttttctaccagcttagcattttcttggaaaaataccatattttgcatagacatcagtttatatttatctttttgtatttttaatcacctcttaaaatttgcatcattgaaaaagaatcaactgctctgcatttgcaaaagcaatatgaatatttgcaaaggtgaacacctttgctggcatgcaaacctggagtttttgcagtctgtaaaaagttaatcttctgaaaatattgagagctggaaagaatcggatggtttgcatagctactttgttacaaaaccttgaattcaaaaccttaattttacaggtgttctcattatattaaaattactacatgttaaggctcttagcctcttatattggtgtactcatgtaccatcatgaagagtgtagccacgtatatgctgcaagtggacttgcatttctgcctttggttcccatatccatgctgattctgtactgaggcttgatagatatgtcttgcaatataatcatcttttctgaattctttattgtatcctgatggtatatcatttgcaatttgcagtagaatattatttcgtttttgctttctttgtgaaaatctgccaccaagtggttttctgtgggtctgtgggcaagtaatgtttccatcaaagattttttgcagtttaatcgaacagaaactgctagtggtgattcaaaagaaaaaagttcatgactagaaaataagttgactaatgcttattccttgcaagtttgttttgagtttgtcacatagggagttgcatggatttgttggcagaaggaagtgcgcattaatactccatacaccatgcagcagagagttgttcattggctgcagaacagagaaaaaggagaagacaacattatatatttggttatttctccaccgtcagagatgcggcctagtaacctgtgtgccaaatgcattttcatgaaatggcaaagtgccattgccaccctcaatatgtatatctgtgtgcaactctctgcgtgcacgattcttcacttagagggggaaaataatcttatatcctttcgtgccataagattttcagaatccgattatcctctacgacagcacaaggctttcattataaatagaggccaactgggttttgcacttcatacaaccccataccttcagagcttacaaggagtagcagagctcagaagagcattcgtattcagcacatagtgcgccttcttgaaagaactgtacaggagatcacacaatgagctattatggcagcagctcttctggtggacgaagcagtaggagagtcgactatgggaggacatatgtggtgaggccaaagggaaggcacctagccaccattgtgtggctccatggcataggtgacaatggtgctagctggtcccagctcctggattctcttcctctaccaaatatcaagtggatatgccccactgctgcaacccggcctgtcgcggcttttggtggattcccctgcacagcatggtttgacgttgaggacacatctatagatggccgagacgacattgagggactggatgcttcagctgcacacattgcaaatctgctgtcgtctgagccgtctgatgtgaagcttgggattggcggtttcagcatgggcgccgccgttgcccttcactcagcagcatgctatgctcatggcaaattcacaagtggcattccctatccaatcgcactcaacgcagtcatcagtttgagtggctggctcccttgctcaaggaccctgaggagcaagatggagggttcacatattgctgtaagaagggctggctccttgcccatcctgcttagtcatggaagaggtggatgaagttgtcgtctacagggatggcgagagatcagctgaggttctgaggaactcaggattctcatttctgactttcaagccctacaacgggttgggccattatacgatccctgaagaactggacgacctctgcaagtggcttagttcgtcgcttggcctcggccgatctcgctaaaagaatagttttttttttttggcgtatgcgcaatgggtttggtgacagcatatattttgaggggaggtttggtttgatagcttgtaaaacacttgatgctagctgctctcttcgcatgtggcttttgtttccgtcgtcctaatttacgtactctatgtctctatgtaatgcggtactttgttgtctgatgtttgctaataaaaagaaaatgccgttgaggcctctgatcaatggaaacagcatttgtactgtatccaggcagcaaaacaacatttgtactcatcactgcagaaaacaga

SEQ ID NO: 199890 - DNA, 1197 bp, Zea Mays
tcctctgcatccggcatcccgatcctgtgtgtctctactctgcactcctcgattcgattcaaccgacccagcaggcgggaaatggcgaacggtgggaccgaggcatcgccgctgcggccccggcggcgcgccggctccagggacccgttcctcatcgtgtgccgcttcttcggcgtcgtcacggccgccgccgcgctgctctgcgtcgccgccaacgtcctctccgcggtctactccttccgcggcggcgctgacatcatcggcggcgtgttccggtgctacgcggtggtgttctccgtcttcgtcgccgttctcgagaccgagtgggcacccgtcatcaggctctggaagatatttgagtacttgccggcaaggggaatgctgcagatcttgtgagtatttaattctaagtttctcgggtacaagcagcagtgcaaccaatgtagcgacaggggcagacgggcagtcctgttagttgtacatcgcatccttccacaagtgttgctatcatgaccaaggcgtacccaaatgttgagaggagcgagctgattttgatccaggagatcgctacttacatgcttcttgtgtgtggagctgtctacataatcgcaggtatactatgtcttggtgttttaaaacgttctaggcagcataaagcaacatcacaggagcaagcggccaaggatctggaggagctagagaagaggagagaggagcttgagtctctgttaactgccgagcggtcagagatggcctgatgtcgacctaccatctctcttctggtgtaaataagtgtttttttttttattctctgttgaatgttggtagcatgcatactgctttgccgtgaccatcggtttcatcgccttctctagctagtttggagcatgttgtttcagctgggttctagacattcgtgtaatgcactgtttacttatatgatgatctcctgttgtagatatatgttgcagaaatttacgaatctaagcaaagaatctgggatgattgaggaatatgtttgccctgaaaaaacatttatttttaaccaacaaagagggacctacattttggtgctaacgggcaacggcaaaggacacctatgcttgattgatcactactacagttgcaaaattcgacatttggcaccaacgaccaggcaaataaagttgagagaaacagcccttaatcaaaaagcag

SEQ ID NO: 199891 - DNA, 2153 bp, Zea Mays
cgccccggcaaggccgctggagtaggcacctgtcgcttggacgtgcttcggagaagtaggtgtccaaaagttgcttacagtggatccagatccttcgaacaacattgctcaagctcatgatatagactgtcatggaggcagctgcagatgaggagaggccactgattcagtacctggctccagaggatgatgaagcttcctcacgatacactagcgacggaacgctcgatatcaacaagcagcgtgctctgaagaagagcaccgggaactggagagcatgcttcatgattctgggtaccgagttcgccgaatgcctggcattttacgcgaccgcaaagaacctggtcacctacctcacggctgagcttggtgagaccaacatcgatgccgcgacgaacgtgtccacctggattggcagctgctacctcacgccgctcatcggcgccttcttggccgacacgtactggggaagatacaagacgatgatagtcttcctcttgctctacatcgttgggatgcttactctgacagcgtcggcgtggctccccttggccatggaggacgactcacctgacaacagcggacttcggcgtgccacagcgtacctggggctctacctcgtttccctaggcacaggaggcatcaagccctgcacggcggccctcggggccgaccagttcgacggcggcgacgcggcggagcgggtcaccaaggcctccttcttcaactggtactacttctgcaccaacatcggctccctgctgtcggggaccgtgctcgtctgggtgcaggaaaatattggatggggagtcgggtttacggtgcagacggtgttcatgctgttcggcctcgccgtgttcgtcgccggtcgcaaggtgtataggtacaagaagctgggcgggagccctctcacaagggtagcccaggtggttgtcgcagctgtgaggaactgccatctcgtgctgcctgatgatacgtcagccctgtaccacgataagcttctaccaactgaaccaaatttcaggattgagtctgccagacaattcagattctttgacaaggctgccataatcaccggcgagaagggtgcagcagcgccgacgagcccgtggagactgtgcacggtgtcccaggtggaggagctgaagatgctgctccggttgctgccggtctgggcatccatggtgctcttcttcgccgtcagtgcgcagacggtaaccacgttcattgagcaggctagggtgatggacaaccgcatcggcccgttcaccattcctccggcgtcgatagcgaccttcgacgtgatcagcgtcatggtctgcgtccccgtctacgacgccgtgctggtgcctctggcccggcgtgccactggcaacgaccgcggcctgtcgcagctgcaccggctctccatcgggatcgcgctgtccgtggtcgtcatggtgtacgcggcgctgctcgagggcaggcgcctggccctcgcgcgggccaacatgcccgccatgaacatcgcgtggcaggcacccatgttcgccgtgcacggcgcggcggcggtcttcgccaccgtcggcgtgctcgagttcttctacgaccagtcgccggacgggatgaagagcctcggcaacgcgctcgcgctgctctccatggcggccgggagctatttcaactcgcttgcgctcagcgctgtcgggtcgatcacggcgcgcggcggggaacgcgggtggctcccggacgacctgaacaagggtcatatggactatttcttctggatgatggccgctcttggaacgctcaacctgctgcacttcttgcactactgcaacagacgatacagaggcaacaacaacaacacttcttgacgtgtgctgtcatgctgtgtgcaccatgtttctcaaaatcatagtttgataatactatattttgtaattatcataataatactatagttttagccagctccaaaaatactaggttctaagaaacattgcttaaatacaacatcatggcgttaggagcttactcttgagtaagttctcgagttattgataggatctaaatctccagtgttccgaaggaataacaggtgacccaccttcgtcctaacaatatgcatgaagattaagttgaaggccacggtcttacattccaaatacaaa

SEQ ID NO: 199892 - DNA, 789 bp, Zea Mays
tcagctgctgaaaaacataaatgaatctgaatgaatacactaagtccaagaacttcacgaaagaagtattgttccatcggttgtcaaggacgacgagcaaaagtctctcttttctacgcctcttgatgtgtgggcgagctcaagtttctctgatccttttacaatcagctgtaaaattcttaaacaaaaattcgggacacctatgaatgcaatatttgacttatttgatttcaaaattattattctttctcactaatcttcaaatgcaagtcgatgcaagtgctcactgaccttgagatgcaagttgatgcagcgatgcaggcgcttattgatcttcacgtggaggacaatgcaaccgcgacgatacacaagcatttgagaagggctacccatctgttttatggaatgtcaattgcaatttattcagatgctaattttgcctttgtatgatctttacataatagggtataagaagttcaatcaacattttccctccatgagtgaatgcagatcgatcaaattgagaagatgactacttcaattgaagatgatcggaagataagtgtttgtgatatttttttattgccactttttgttcctaaatcaatcatttgctgtggttccagaaagtaactgaggagtgataaaacgacaattttgagcttcaacgctttgctaggttggcaaaaaacttaaagcaacagagggcggatttggtggcggcgactgtgaggcgggcgagcgaggtggtcattgggctcgcgccggagaacgctatgatcccgctgt

SEQ ID NO: 199893 - DNA, 1314 bp, Zea Mays
aagaagtcttcagctgctgaaaaacataaatgaatctgaatgaatacactaagtccaagaacttcacgaaagaagtattgttccatcggttgtcaaggacgacgagcaaaagtctctcttttctacgcctcttgatgtgtgggcgagctcaagtttctctgatccttttacaatcagctgtaaaattcttaaacaaaaattcgggacacctatgaatgcaatatttgacttatttgatttcaaaattattattctttctcactaatcttcaaatgcaagtcgatgcaagtgctcactgaccttgagatgcaagttgatgcagcgatgcaggcgcttattgatcttcacgtggaggacaatgcaaccgcgacgatacacaagtatattattcttcagtaccttggttttgcatgttgatgtcagttttgattaaaaaaagtctatactcgcacaggataaccacatggtccaaacatcaaaaattactttttccaggttcaaagttcaacagatcatgtaacatttaggttttacatttttcctattgtatgttaaaaaataatgaaaatttgaattaaattcttactagccggttaatttactccgttaatccctcattaatgtatgtactgttttcatgctaattaaactttgggagaatttttttccaactgatgtggaaaaatgaccattcaggcatttgagaagggctacccatctgttttatggaatgtcaattgcaatttattcagatgctaattttgcctttgtatgatctttacataataggttggtaaaaagcaaggtccatcgattattcgagacttaatgtgcaactatttttacagtttgtcagttatatataaccttttcagggtataagaagttcaatcaacattttccctccatgagtgaatgcagatcgatcaaattgagaagatgactacttcaattgaagatgatcggaagataagtgtttgtgatatttttttattgccactttttgttcctaaatcaatcatttgctgtggttccagaaagtaactgaggagtgataaaacgacaattttgagcttcaacgctttgctaggttggcaaaaaacttaaagcaacagagtcagtttagtgccagaaaaatgatcccgagcatgattttttcggactcagatcagagaagggtttcaccagattttttttagcacaagggcaaagccccccacctccttaataaggcggatttggtggcggcgactgtgaggcgggcgagcgaggtggtcattgggctcgcgccggagaacgctatgatcccgctgt

SEQ ID NO: 199894 - DNA, 719 bp, Zea Mays
caatcatagcagaaaagaagtcttcagctgctgaaaaacataaatgaatctgaatgaatacactaagtccaagaacttcacgaaagaagtattgttccatcggttgtcaaggacgacgagcaaaagtctctcttttctacgcctcttgatgtgtgggcgagctcaagtttctctgatccttttacaatcagctgtaaaattcttaaacaaaaattcgggacacctatgaatgcaatatttgacttatttgatttcaaaattattattctttctcactaatcttcaaatgcaagtcgatgcaagtgctcactgaccttgagatgcaagttgatgcagcgatgcaggcgcttattgatcttcacgtggaggacaatgcaaccgcgacgatacacaaggtataagaagttcaatcaacattttccctccatgagtgaatgcagatcgatcaaattgagaagatgactacttcaattgaagatgatcggaagataagtgtttgtgatatttttttattgccactttttgttcctaaatcaatcatttgctgtggttccagaaagtaactgaggagtgataaaacgacaattttgagcttcaacgctttgctaggttggcaaaaaacttaaagcaacagagggcggatttggtggcggcgactgtgaggcgggcgagcgaggtggtcattgggctcgcgccggagaacgctatgatcccgctgt

SEQ ID NO: 199895 - DNA, 1801 bp, Zea Mays
atcaatcatagcagaaaagaagtcttcagctgctgaaaaacataaatgaatctgaatgaatacactaagtccaagaacttcacgaaagaagtattgttccatcggttgtcaaggacgacgagcaaaagtctctcttttctacgcctcttgatgtgtgggcgagctcaagtttctctgatccttttacaatcagctgtaaaattcttaaacaaaaattcgggacacctatgaatgcaatatttgacttatttgatttcaaaattattattctttctcactaatcttcaaatgcaagtcgatgcaagtgctcactgaccttgagatgcaagttgatgcagcgatgcaggcgcttattgatcttcacgtggaggacaatgcaaccgcgacgatacacaaggtataagaagttcaatcaacattttccctccatgagtgaatgcagatcgatcaaattgagaagatgactacttcaattgaagatgatcggaagataagtgtttgtgatatttttttattgccactttttgttcctaaatcaatcatttgctgtggttccagaaagtaactgaggagtgataaaacgacaattttgagcttcaacgctttgctaggttggcaaaaaacttaaagcaacagagtgttcaagctaatgttttggtgctagaaaaggctttaatgcatcaggcttgtgttcctgtgttggataatgcttagagaagtttagcagtgataatgcttcactattcgaaaatcagtaaaaagtttagaccatttatgtgacatttttggatagttcctatgttgtgttgcaaccattaactatattaactgtatattttcacatggtgggacagatagaggacttcatagtgttcattcgaataatgttgatgtataagttaactttccacttttcttggttacttaatgaaattaacttttatagatttgtgtctacatagtgttcatgcaaatattgttgtatattatattatatttaagactcttaattagtgtcatttaacaacaataaaaaaaaattacacaatacattgttgatatgagataatcaagtccaaaaaatgtagaattatacgggcgcggcgaagcgcgcctgccatcctagtaataatgctaacaagaagagtcctctctcccttcacgttctgtatgttcttttttgttcttttggaggagcagggcgtctttgtcaatttaatgcaagtaaatcaggagaaagttttgttgattgatattgacaatgatcatattcaaaatcctattggtgatggcttttcagcatttaaatcaactagccccaaatgcatgtgattttttatctgaacagcattagtatatgacaaagtaattatacattatgttgataagcttaaaataattagttacatgttttcgtctatcggtcccgtgcatcgcacgggttttaagctagtctatgaaacaagtgattaacgtggtatgataatttgattcattcctgattctatggatcgtccgttcctatctgtgttattgggatcgattcgtttgccttttccttgaatattacacgattttttactgttattgtcattgttttgtagtcagtttagtgccagaaaaatgatcccgagcatgattttttcggactcagatcagagaagggtttcaccagattttttttagcacaagggcaaagccccccacctccttaataaggcggatttggtggcggcgactgtgaggcgggcgagcgaggtggtcattgggctcgcgccggagaacgctatgatcccgctgt

SEQ ID NO: 199896 - DNA, 2214 bp, Zea Mays
atcaatcaatcatagcagaaaagaagtcttcagctgctgaaaaacataaatgaatctgaatgaatacactaagtccaagaacttcacgaaagaagtattgttccatcggttgtcaaggacgacgagcaaaagtctctcttttctacgcctcttgatgtgtgggcgagctcaagtttctctgatccttttacaatcagctgtaaaattcttaaacaaaaattcgggacacctatgaatgcaatatttgacttatttgatttcaaaattattattctttctcactaatcttcaaatgcaagtcgatgcaagtgctcactgaccttgagatgcaagttgatgcagcgatgcaggcgcttattgatcttcacgtggaggacaatgcaaccgcgacgatacacaagtatattattcttcagtaccttggttttgcatgttgatgtcagttttgattaaaaaaagtctatactcgcacaggataaccacatggtccaaacatcaaaaattactttttccaggttcaaagttcaacagatcatgtaacatttaggttttacatttttcctattgtatgttaaaaaataatgaaaatttgaattaaattcttactagccggttaatttactccgttaatccctcattaatgtatgtactgttttcatgctaattaaactttgggagaatttttttccaactgatgtggaaaaatgaccattcaggcatttgagaagggctacccatctgttttatggaatgtcaattgcaatttattcagatgctaattttgcctttgtatgatctttacataatagggtataagaagttcaatcaacattttccctccatgagtgaatgcagatcgatcaaattgagaagatgactacttcaattgaagatgatcggaagataagtgtttgtgatatttttttattgccactttttgttcctaaatcaatcatttgctgtggttccagaaagtaactgaggagtgataaaacgacaattttgagcttcaacgctttgctaggttggcaaaaaacttaaagcaacagagtgttcaagctaatgttttggtgctagaaaaggctttaatgcatcaggcttgtgttcctgtgttggataatgcttagagaagtttagcagtgataatgcttcactattcgaaaatcagtaaaaagtttagaccatttatgtgacatttttggatagttcctatgttgtgttgcaaccattaactatattaactgtatattttcacatggtgggacagatagaggacttcatagtgttcattcgaataatgttgatgtataagttaactttccacttttcttggttacttaatgaaattaacttttatagatttgtgtctacatagtgttcatgcaaatattgttgtatattatattatatttaagactcttaattagtgtcatttaacaacaataaaaaaaaattacacaatacattgttgatatgagataatcaagtccaaaaaatgtagaattatacgggcgcggcgaagcgcgcctgccatcctagtaataatgctaacaagaagagtcctctctcccttcacgttctgtatgttcttttttgttcttttggaggagcagggcgtctttgtcaatttaatgcaagtaaatcaggagaaagttttgttgattgatattgacaatgatcatattcaaaatcctattggtgatggcttttcagcatttaaatcaactagccccaaatgcatgtgattttttatctgaacagcattagtatatgacaaagtaattatacattatgttgataagcttaaaataattagttacatgttttcgtctatcggtcccgtgcatcgcacgggttttaagctagtctatgaaacaagtgattaacgtggtatgataatttgattcattcctgattctatggatcgtccgttcctatctgtgttattgggatcgattcgtttgccttttccttgaatattacacgattttttactgttattgtcattgttttgtagtcagtttagtgccagaaaaatgatcccgagcatgattttttcggactcagatcagagaagggtttcaccagattttttttagcacaagggcaaagccccccacctccttaataaggcggatttggtggcggcgactgtgaggcgggcgagcgaggtggtcattgggctcgcgccggagaacgctatgatcccgctgt

SEQ ID NO: 199897 - DNA, 1134 bp, Zea Mays
atcaatcaatcatagcagaaaagaagtcttcagctgctgaaaaacataaatgaatctgaatgaatacactaagtccaagaacttcacgaaagaagtattgttccatcggttgtcaaggacgacgagcaaaagtctctcttttctacgcctcttgatgtgtgggcgagctcaagtttctctgatccttttacaatcagctgtaaaattcttaaacaaaaattcgggacacctatgaatgcaatatttgacttatttgatttcaaaattattattctttctcactaatcttcaaatgcaagtcgatgcaagtgctcactgaccttgagatgcaagttgatgcagcgatgcaggcgcttattgatcttcacgtggaggacaatgcaaccgcgacgatacacaagtatattattcttcagtaccttggttttgcatgttgatgtcagttttgattaaaaaaagtctatactcgcacaggataaccacatggtccaaacatcaaaaattactttttccaggttcaaagttcaacagatcatgtaacatttaggttttacatttttcctattgtatgttaaaaaataatgaaaatttgaattaaattcttactagccggttaatttactccgttaatccctcattaatgtatgtactgttttcatgctaattaaactttgggagaatttttttccaactgatgtggaaaaatgaccattcaggcatttgagaagggctacccatctgttttatggaatgtcaattgcaatttattcagatgctaattttgcctttgtatgatctttacataatagggtataagaagttcaatcaacattttccctccatgagtgaatgcagatcgatcaaattgagaagatgactacttcaattgaagatgatcggaagataagtgtttgtgatatttttttattgccactttttgttcctaaatcaatcatttgctgtggttccagaaagtaactgaggagtgataaaacgacaattttgagcttcaacgctttgctaggttggcaaaaaacttaaagcaacagagggcggatttggtggcggcgactgtgaggcgggcgagcgaggtggtcattgggctcgcgccggagaacgctatgatcccgctgt

SEQ ID NO: 199898 - DNA, 3316 bp, Zea Mays
atcaatcaatcatagcagaaaagaagtcttcagctgctgaaaaacataaatgaatctgaatgaatacactaagtccaagaacttcacgaaagaagtattgttccatcggttgtcaaggacgacgagcaaaagtctctcttttctacgcctcttgatgtgtgggcgagctcaagtttctctgatccttttacaatcagctgtaaaattcttaaacaaaaattcgggacacctatgaatgcaatatttgacttatttgatttcaaaattattattctttctcactaatcttcaaatgcaagtcgatgcaagtgctcactgaccttgagatgcaagttgatgcagcgatgcaggcgcttattgatcttcacgtggaggacaatgcaaccgcgacgatacacaagataaccacatggtccaaacatcaaaaattactttttccaggttcaaagttcaacagatcatgtaacatttaggttttacatttttcctattgtatgttaaaaaataatgaaaatttgaattaaattcttactagccggttaatttactccgttaatccctcattaatgtatgtactgttttcatgctaattaaactttgggagaatttttttccaactgatgtggaaaaatgaccattcaggcatttgagaagggctacccatctgttttatggaatgtcaattgcaatttattcagatgctaattttgcctttgtatgatctttacataatagggtataagaagttcaatcaacattttccctccatgagtgaatgcagatcgatcaaattgagaagatgactacttcaattgaagatgatcggaagataagtgtttgtgatatttttttattgccactttttgttcctaaatcaatcatttgctgtggttccagaaagtaactgaggagtgataaaacgacaattttgagcttcaacgctttgctaggttggcaaaaaacttaaagcaacagagtgttcaagctaatgttttggtgctagaaaaggctttaatgcatcaggcttgtgttcctgtgttggataatgcttagagaagtttagcagtgataatgcttcactattcgaaaatcagtaaaaagtttagaccatttatgtgacatttttggatagttcctatgttgtgttgcaaccattaactatattaactgtatattttcacatggtgggacagatagaggacttcatagtgttcattcgaataatgttgatgtataagttaactttccacttttcttggttacttaatgaaattaacttttatagatttgtgtctacatagtgttcatgcaaatattgttgtatattatattatatttaagactcttaattagtgtcatttaacaacaataaaaaaaaattacacaatacattgttgatatgagataatcaagtccaaaaaatgtagaattatacgggcgcggcgaagcgcgcctgccatcctagtaataatgctaacaagaagagtcctctctcccttcacgttctgtatgttcttttttgttcttttggaggagcagggcgtctttgtcaatttaatgcaagtaaatcaggagaaagttttgttgattgatattgacaatgatcatattcaaaatcctattggtgatggcttttcagcatttaaatcaactagccccaaatgcatgtgattttttatctgaacagcattagtatatgacaaagtaattatacattatgttgataagcttaaaataattagttacatgttttcgtctatcggtcccgtgcatcgcacgggttttaagctagtctatgaaacaagtgattaacgtggtatgataatttgattcattcctgattctatggatcgtccgttcctatctgtgttattgggatcgattcgtttgccttttccttgaatattacacgattttttactgttattgtcattgttttgtagtcagtttagtgccagaaaaatgatcccgagcatgattttttcggactcagatcagagaagggtttcaccagattttttttagcacaagggcaaagccccccacctccttaataagtgagtcaccttacaaagtataagggtttgaccagataatttcatttctttacgaatccctgaaataaacaataaaaatacaatcactattgcataaaaattgatagtgatccagtcataaagaaatgacactgcattttatgtttgaacgtcttactcatataggggtggctaaggagtgagattagttaattaaaactcatgtattttctatattttgaattaaaatttaaatttgaattcaaatataaaatatttggtgaattttctaggaatattgactaaatttaaattcgaattcagctcttagacctttgaagttctgagagcagaattcgaatttaaattttagttcaaaatacataccaaactagcaaaagtgttcaaaagtaaaattgtaatgaatagttctatcagtcaacaaggaccagatatttagttaaaaaaattgataggacccacttgtcagcctcttcacaacgccacataggatgccacctaggcgaaactgcctgcaaaatcgtctgagggatcaaaatcagacggttttgaaagttaaaaaactagtagttgtacctggttttgtgcagcagacacaaaaatagattcgcacaacacttaagaggaccaaaagagtactttttcccatagaactagttgtgagcctgtgcgttgcaacaggaaaatagatattgaacgaaaaggttcatcaaacatgtataatattagaataataagatacataattttaatattaaataatattttaacacattatgtaaatattatagtataatataatataaaatcatcattgggcaaaaataaagcaatatttcttctatattaattgcctttgaaaacataaactctttgtgtattaaaatttattcaatcataatctattagcaaattaacccacttaagtagtgtttttgttaaatacacatatctatagtgtccaacggcaaatagcgtacttgaaggacctctacgagcaaattttgccttcgtacaatattattgaccagcaataattaattaatgttgaaaattagttaacactaatttatttatattttatgaaagttaaagaaagattaagcatgtttcaacccaatgattaatgcacataattattcaattttatgctgcacaaaataattaaaaactaaaaagaaaaacaaatgaccagtgggggccgaataaacttacaaattcataccgaattttgcctggtccactaaagctgcctgccc

SEQ ID NO: 199899 - DNA, 3387 bp, Zea Mays
atcaatcaatcatagcagaaaagaagtcttcagctgctgaaaaacataaatgaatctgaatgaatacactaagtccaagaacttcacgaaagaagtattgttccatcggttgtcaaggacgacgagcaaaagtctctcttttctacgcctcttgatgtgtgggcgagctcaagtttctctgatccttttacaatcagctgtaaaattcttaaacaaaaattcgggacacctatgaatgcaatatttgacttatttgatttcaaaattattattctttctcactaatcttcaaatgcaagtcgatgcaagtgctcactgaccttgagatgcaagttgatgcagcgatgcaggcgcttattgatcttcacgtggaggacaatgcaaccgcgacgatacacaagtatattattcttcagtaccttggttttgcatgttgatgtcagttttgattaaaaaaagtctatactcgcacaggataaccacatggtccaaacatcaaaaattactttttccaggttcaaagttcaacagatcatgtaacatttaggttttacatttttcctattgtatgttaaaaaataatgaaaatttgaattaaattcttactagccggttaatttactccgttaatccctcattaatgtatgtactgttttcatgctaattaaactttgggagaatttttttccaactgatgtggaaaaatgaccattcaggcatttgagaagggctacccatctgttttatggaatgtcaattgcaatttattcagatgctaattttgcctttgtatgatctttacataatagggtataagaagttcaatcaacattttccctccatgagtgaatgatcgatcaaattgagaagatgactacttcaattgaagatgatcggaagataagtgtttgtgatatttttttattgccactttttgttcctaaatcaatcatttgctgtggttccagaaagtaactgaggagtgataaaacgacaattttgagcttcaacgctttgctaggttggcaaaaaacttaaagcaacagagtgttcaagctaatgttttggtgctagaaaaggctttaatgcatcaggcttgtgttcctgtgttggataatgcttagagaagtttagcagtgataatgcttcactattcgaaaatcagtaaaaagtttagaccatttatgtgacatttttggatagttcctatgttgtgttgcaaccattaactatattaactgtatattttcacatggtgggacagatagaggacttcatagtgttcattcgaataatgttgatgtataagttaactttccacttttcttggttacttaatgaaattaacttttatagatttgtgtctacatagtgttcatgcaaatattgttgtatattatattatatttaagactcttaattagtgtcatttaacaacaataaaaaaaaattacacaatacattgttgatatgagataatcaagtccaaaaaatgtagaattatacgggcgcggcgaagcgcgcctgccatcctagtaataatgctaacaagaagagtcctctctcccttcacgttctgtatgttcttttttgttcttttggaggagcagggcgtctttgtcaatttaatgcaagtaaatcaggagaaagttttgttgattgatattgacaatgatcatattcaaaatcctattggtgatggcttttcagcatttaaatcaactagccccaaatgcatgtgattttttatctgaacagcattagtatatgacaaagtaattatacattatgttgataagcttaaaataattagttacatgttttcgtctatcggtcccgtgcatcgcacgggttttaagctagtctatgaaacaagtgattaacgtggtatgataatttgattcattcctgattctatggatcgtccgttcctatctgtgttattgggatcgattcgtttgccttttccttgaatattacacgattttttactgttattgtcattgttttgtagtcagtttagtgccagaaaaatgatcccgagcatgattttttcggactcagatcagagaagggtttcaccagattttttttagcacaagggcaaagccccccacctccttaataagtgagtcaccttacaaagtataagggtttgaccagataatttcatttctttacgaatccctgaaataaacaataaaaatacaatcactattgcataaaaattgatagtgatccagtcataaagaaatgacactgcattttatgtttgaacgtcttactcatataggggtggctaaggagtgagattagttaattaaaactcatgtattttctatattttgaattaaaatttaaatttgaattcaaatataaaatatttggtgaattttctaggaatattgactaaatttaaattcgaattcagctcttagacctttgaagttctgagagcagaattcgaatttaaattttagttcaaaatacataccaaactagcaaaagtgttcaaaagtaaaattgtaatgaatagttctatcagtcaacaaggaccagatatttagttaaaaaaattgataggacccacttgtcagcctcttcacaacgccacataggatgccacctaggcgaaactgcctgcaaaatcgtctgagggatcaaaatcagacggttttgaaagttaaaaaactagtagttgtacctggttttgtgcagcagacacaaaaatagattcgcacaacacttaagaggaccaaaagagtactttttcccatagaactagttgtgagcctgtgcgttgcaacaggaaaatagatattgaacgaaaaggttcatcaaacatgtataatattagaataataagatacataattttaatattaaataatattttaacacattatgtaaatattatagtataatataatataaaatcatcattgggcaaaaataaagcaatatttcttctatattaattgcctttgaaaacataaactctttgtgtattaaaatttattcaatcataatctattagcaaattaacccacttaagtagtgtttttgttaaatacacatatctatagtgtccaacggcaaatagcgtacttgaaggacctctacgagcaaattttgccttcgtacaatattattgaccagcaataattaattaatgttgaaaattagttaacactaatttatttatattttatgaaagttaaagaaagattaagcatgtttcaacccaatgattaatgcacataattattcaattttatgctgcacaaaataattaaaaactaaaaagaaaaacaaatgaccagtgggggccgaataaacttacaaattcataccgaattttgcctggtccactaaagctgcctgccc

SEQ ID NO: 199900 - DNA, 934 bp, Zea Mays
atcaatcaatcatagcagaaaagaagtcttcagctgctgaaaaacataaatgaatctgaatgaatacactaagtccaagaacttcacgaaagaagtattgttccatcggttgtcaaggacgacgagcaaaagtctctcttttctacgcctcttgatgtgtgggcgagctcaagtttctctgatccttttacaatcagctgtaaaattcttaaacaaaaattcgggacacctatgaatgcaatatttgacttatttgatttcaaaattattattctttctcactaatcttcaaatgcaagtcgatgcaagtgctcactgaccttgagatgcaagttgatgcagcgatgcaggcgcttattgatcttcacgtggaggacaatgcaaccgcgacgatacacaaggtataagaagttcaatcaacattttccctccatgagtgaatgcagatcgatcaaattgagaagatgactacttcaattgaagatgatcggaagataagtgtttgtgatatttttttattgccactttttgttcctaaatcaatcatttgctgtggttccagaaagtaactgaggagtgataaaacgacaattttgagcttcaacgctttgctaggttggcaaaaaacttaaagcaacagaggtaagttcgacttatgttaccctgggtacctgtatctatttcaatgtaaggcatatcatttgtaagcctctggtctgaaatacatgtcgccggttagtttagatttgagctaatcgtcaacatgtgttttagatcggatagagtactattttagaaatgtttggaccatacgagcagcctattgtccacaacaacaaaaaaaaacttaaaataggcacaatatggtttgacggtgaatgaatacacaatttcagagcacaaagagcaagtcccaatatatattgcattcccc

SEQ ID NO: 199901 - DNA, 1429 bp, Zea Mays
atcaatcaatcatagcagaaaagaagtcttcagctgctgaaaaacataaatgaatctgaatgaatacactaagtccaagaacttcacgaaagaagtattgttccatcggttgtcaaggacgacgagcaaaagtctctcttttctacgcctcttgatgtgtgggcgagctcaagtttctctgatccttttacaatcagctgtaaaattcttaaacaaaaattcgggacacctatgaatgcaatatttgacttatttgatttcaaaattattattctttctcactaatcttcaaatgcaagtcgatgcaagtgctcactgaccttgagatgcaagttgatgcagcgatgcaggcgcttattgatcttcacgtggaggacaatgcaaccgcgacgatacacaagtatattattcttcagtaccttggttttgcatgttgatgtcagttttgattaaaaaaagtctatactcgcacaggataaccacatggtccaaacatcaaaaattactttttccaggttcaaagttcaacagatcatgtaacatttaggttttacatttttcctattgtatgttaaaaaataatgaaaatttgaattaaattcttactagccggttaatttactccgttaatccctcattaatgtatgtactgttttcatgctaattaaactttgggagaatttttttccaactgatgtggaaaaatgaccattcaggcatttgagaagggctacccatctgttttatggaatgtcaattgcaatttattcagatgctaattttgcctttgtatgatctttacataataggttggtaaaaagcaaggtccatcgattattcgagacttaatgtgcaactatttttacagtttgtcagttatatataaccttttcagggtataagaagttcaatcaacattttccctccatgagtgaatgcagatcgatcaaattgagaagatgactacttcaattgaagatgatcggaagataagtgtttgtgatatttttttattgccactttttgttcctaaatcaatcatttgctgtggttccagaaagtaactgaggagtgataaaacgacaattttgagcttcaacgctttgctaggttggcaaaaaacttaaagcaacagaggtaagttcgacttatgttaccctgggtacctgtatctatttcaatgtaaggcatatcatttgtaagcctctggtctgaaatacatgtcgccggttagtttagatttgagctaatcgtcaacatgtgttttagatcggatagagtactattttagaaatgtttggaccatacgagcagcctattgtccacaacaacaaaaaaaaacttaaaataggcacaatatggtttgacggtgaatgaatacacaatttcagagcacaaagagcaagtcccaatatatattgcattcccc

SEQ ID NO: 199902 - DNA, 952 bp, Zea Mays
ggttaatccacccagtatcattcctcagacttttctcggccatttccctaggcctcggcctaggaactgactcgcgccacaacgacgtggaacatttccacgcgaaggcgagggggagcccgggagggaggtgtgtgcgattcgtgcggcggcggcacactagggcgacacctgcgactcctctccgccccctacgtaggaggaggtgagagtttttggcggactgcaacatctacctcgttagggcagccgcttggattcgttgtacagccgcccggattcgcaggggcagtcgctcagattcgctgggagttctccgcctgcaatgtattcaagtcaagacatgttctggtgtacaatgtactcaggtcaagacgtgtatttggcaaattggaattgacaaactactattttttggcttttgatactaatttcagatgtgcataattcatttttttgtccttgctgctttcacacatgaatctctctgaagttgtccctaaaaggctctaccaccagcttgcaacattggtattgatcattctaacaaaatatattccactgaacttgagaagatgcctacttaattttcgtaagagctaggatagtaaatgcacttggaggtggacaagagaaaaaaacaaagcttgactgcttgtgttgatcatttctgttgttgagccaactttgaggtcaacacaatgacaattctatgttgttgagcaaactattcagaagacaatatactaaaagatgaaagctttgaaaaatttctcttagaaataggtcatatatgcaacatgggatatgcacaatgttgtggttcactttttaagatatgctctattgtatattcaaccaagcctgaagaataattatagacaatattgaaatttgagtttttaaattggctttctaaaacaacttttagatcctcaaaatatgtttaaat

SEQ ID NO: 199903 - DNA, 959 bp, Zea Mays
gttaatccacccagtatcattcctcagacttttctcggccatttccctaggcctcggcctaggaactgactcgcgccacaacgacgtggaacatttccacgcgaaggcgagggggagcccgggagggaggtgtgtgcgattcgtgcggcggcggcacactagggcgacacctgcgactcctctccgccccctacgtaggagtaggaggtgagagtttttggcggactgcaacatctacctcgttagggcagccgcttggattcgttgtacagccgcccggattcgcaggggcagtcgctcagattcgctgggagttctccgcctgcaatgtattcaagtcaagacatgttctggtgtacaatgtactcagttgtccctaaaaggctctaccaccagcttgcaacattggtattgatcattctaacaaaatatattccactgaacttgagaagatgcctacttaattttcttgtctctgtacttgcggttgccgatcgaaaatctgcatcagcaaacttatgagtattattgctagagttgctgcagatacttatgagtattagtatatgtgcttctgcatcacctatggttctacaaatgtaagagctaggatagtaaatgcacttggaggtggacaagagaaaaaaacaaagcttgactgcttgtgttgatcatttctgttgttgagccaactttgaggtcaacacaatgacaattctatgttgttgagcaaactattcagaagacaatatactaaaagatgaaagctttgaaaaatttctcttagaaataggtcatatatgcaacatgggatatgcacaatgttgtggttcactttttaagatatgctctattgtatattcaaccaagcctgaagaataattatagacaatattgaaatttgagtttttaaattggctttctaaaacaacttttagatcctcaaaatatgtttaaat

SEQ ID NO: 199904 - DNA, 798 bp, Zea Mays
ggccatttccctaggcctcggcctaggaactgactcgcgccacaacgacgtggaacatttccacgcgaaggcgagggggagcccgggagggaggtgtgtgcgattcgtgcggcggcggcacactagggcgacacctgcgactcctctccgccccctacgtaggagcctgcaatgtattcaagtcaagacatgttctggtgtacaatgtactcaggtcaagacgtgtatttggcaaattggaattgacaaactactattttttggcttttgatactaatttcagatgtgcataattcatttttttgtccttgctgctttcacacatgaatctctctgaagttgtccctaaaaggctctaccaccagcttgcaacattggtattgatcattctaacaaaatatattccactgaacttgagaagatgcctacttaattttcgtaagagctaggatagtaaatgcacttggaggtggacaagagaaaaaaacaaagcttgactgcttgtgttgatcatttctgttgttgagccaactttgaggtcaacacaatgacaattctatgttgttgagcaaactattcagaagacaatatactaaaagatgaaagctttgaaaaatttctcttagaaataggtcatatatgcaacatgggatatgcacaatgttgtggttcactttttaagatatgctctattgtatattcaaccaagcctgaagaataattatagacaatattgaaatttgagtttttaaattggctttctaaaacaacttttagatcctcaaaatatgtttaaat

SEQ ID NO: 199905 - DNA, 754 bp, Zea Mays
ggccatttccctaggcctcggcctaggaactgactcgcgccacaacgacgtggaacatttccacgcgaaggcgagggggagcccgggagggaggtgtgtgcgattcgtgcggcggcggcacactagggcgacacctgcgactcctctccgccccctacgtaggagttgtccctaaaaggctctaccaccagcttgcaacattggtattgatcattctaacaaaatatattccactgaacttgagaagatgcctacttaattttcttgtctctgtacttgcggttgccgatcgaaaatctgcatcagcaaacttatgagtattattgctagagttgctgcagatacttatgagtattagtatatgtgcttctgcatcacctatggttctacaaatgtaagagctaggatagtaaatgcacttggaggtggacaagagaaaaaaacaaagcttgactgcttgtgttgatcatttctgttgttgagccaactttgaggtcaacacaatgacaattctatgttgttgagcaaactattcagaagacaatatactaaaagatgaaagctttgaaaaatttctcttagaaataggtcatatatgcaacatgggatatgcacaatgttgtggttcactttttaagatatgctctattgtatattcaaccaagcctgaagaataattatagacaatattgaaatttgagtttttaaattggctttctaaaacaacttttagatcctcaaaatatgtttaaat

SEQ ID NO: 199906 - DNA, 614 bp, Zea Mays
ctcagattcgctgggagttctccggttgtccctaaaaggctctaccaccagcttgcaacattggtattgatcattctaacaaaatatattccactgaacttgagaagatgcctacttaattttcttgtctctgtacttgcggttgccgatcgaaaatctgcatcagcaaacttatgagtattattgctagagttgctgcagatacttatgagtattagtatatgtgcttctgcatcacctatggttctacaaatgtaagagctaggatagtaaatgcacttggaggtggacaagagaaaaaaacaaagcttgactgcttgtgttgatcatttctgttgttgagccaactttgaggtcaacacaatgacaattctatgttgttgagcaaactattcagaagacaatatactaaaagatgaaagctttgaaaaatttctcttagaaataggtcatatatgcaacatgggatatgcacaatgttgtggttcactttttaagatatgctctattgtatattcaaccaagcctgaagaataattatagacaatattgaaatttgagtttttaaattggctttctaaaacaacttttagatcctcaaaatatgtttaaat

SEQ ID NO: 199907 - DNA, 700 bp, Zea Mays
gctgcagccgcctggattttgtggtgcactgctttgtcacgcgtcgtcttgcccccccgagatttatcaattgttagttacccggtggtagatcttacacctgcttgatagttgtccctaaaaggctctaccaccagcttgcaacattggtattgatcattctaacaaaatatattccactgaacttgagaagatgcctacttaattttcttgtctctgtacttgcggttgccgatcgaaaatctgcatcagcaaacttatgagtattattgctagagttgctgcagatacttatgagtattagtatatgtgcttctgcatcacctatggttctacaaatgtaagagctaggatagtaaatgcacttggaggtggacaagagaaaaaaacaaagcttgactgcttgtgttgatcatttctgttgttgagccaactttgaggtcaacacaatgacaattctatgttgttgagcaaactattcagaagacaatatactaaaagatgaaagctttgaaaaatttctcttagaaataggtcatatatgcaacatgggatatgcacaatgttgtggttcactttttaagatatgctctattgtatattcaaccaagcctgaagaataattatagacaatattgaaatttgagtttttaaattggctttctaaaacaacttttagatcctcaaaatatgtttaaat

SEQ ID NO: 199908 - DNA, 1056 bp, Zea Mays
ccgacggaaggcccttagcagcgccgccaccaccacgggagatgcgtggagagatgaagcaaaccaagtcaggaagaatagaaatgagggcagaatggaatgaaacaagaacttgtttttttgtgagcttactgaaggagtacaattcaccaagatatcgtgcccaaaatggttggacaaaagaagcatggaacaacatgacacaacgcatcaacgataaatttgaaacaaattttgtggtgacgtaattgaagaacaaatgaccagtgggggccgaataaacttacaaattcataccgaattttgcctggtccactaaagctgcctgcgcccccccccccccccccccccgcatgggctcgtagcccacagacgtcccaggagctggcccaatttatcttcgccatccatttcgattgaatggccacgatttaccgaaatcgcatatataaatgaaaatttcggcatgccctaaccctagcttcattcgcttccgatatttccggagtggtatagggcggatttggtggcggcgactgtgaggcgggcgagcgaggtggtcattgggctcgcgccggagaacgctatgatcccgctgttcgagacggggggcgcgcagctcgagctcatacgggatgccgagattgagccgtgtgcctacgtgaggtgggagcaagggaggccgagaggatccgcttcatgagttggatgcacacgagagacgttggggatcccagcttcccaatgcgggagatccagaagagtcaacggcggatcgatcaagtggattagcactctcccctgtctgcgtgatctgtagaacaaggataagtcggggacgctgttctgctttgccgcgatggaacatgtgttccaatccgagaatttcaggctggggcggttgggatgagggggaagccaatgggagatggatcaaggagatgagcatgggctagacgacttcctggtgaagggcggatttggtggcggcgactgtgaggcgggcgagcgaggtggtcattgggctcgcgccggagaacgctatgatcccgctgt

SEQ ID NO: 199909 - DNA, 1830 bp, Zea Mays
caccgacggaaggcccttagcagcgccgccaccaccacgggagatgcgtggagagatgaagcaaaccaagtcaggaagaatagaaatgagggcagaatggaatgaaacaagaacttgtttttttgtgagcttactgaaggagtacaattcaccaagatatcgtgcccaaaatggttggacaaaagaagcatggaacaacatgacacaacgcatcaacgataaatttgaaacaaattttgtggtgacgtaattgaagaacaaatgaccagtgggggccgaataaacttacaaattcataccgaattttgcctggtccactaaagctgcctgcgcccccccccccccccccccccgcatgggctcgtagcccacagacgtcccaggagctggcccaatttatcttcgccatccatttcgattgaatggccacgatttaccgaaatcgcatatataaatgaaaatttcggcatgccctaaccctagcttcattcgcttccgatatttccggagtggtatagggcggatttggtggcggcgactgtgaggcgggcgagcgaggtggtcattgggctcgcgccggagaacgctatgatcccgctgttcgagacggggggcgcgcagctcgagctcatacgggatgccgagattgagccgtgtgcctacgtgaggtgggagcaagggaggccgagaggatccgcttcatgagttggatgcacacgagagacgttggggatcccagcttcccaatgcgggagatccagaagagtcaacggcggatcgatcaagtggattagcactctcccctgtctgcgtgatctgtagaacaaggataagtcggggacgctgttctgctttgccgcgatggaacatgtgttccaatccgagaatttcaggctggggcggttgggatgagggggaagccaatgggagatggatcaaggagatgagcatgcgatgcaggcgcttattgatcttcacgtggaggacaatgcaaccgcgacgatacacaagtatattattcttcagtaccttggttttgcatgttgatgtcagttttgattaaaaaaagtctatactcgcacaggataaccacatggtccaaacatcaaaaattactttttccaggttcaaagttcaacagatcatgtaacatttaggttttacatttttcctattgtatgttaaaaaataatgaaaatttgaattaaattcttactagccggttaatttactccgttaatccctcattaatgtatgtactgttttcatgctaattaaactttgggagaatttttttccaactgatgtggaaaaatgaccattcaggcatttgagaagggctacccatctgttttatggaatgtcaattgcaatttattcagatgctaattttgcctttgtatgatctttacataataggttggtaaaaagcaaggtccatcgattattcgagacttaatgtgcaactatttttacagtttgtcagttatatataaccttttcagggtataagaagttcaatcaacattttccctccatgagtgaatgcagatcgatcaaattgagaagatgactacttcaattgaagatgatcggaagataagtgtttgtgatatttttttattgccactttttgttcctaaatcaatcatttgctgtggttccagaaagtaactgaggagtgataaaacgacaattttgagcttcaacgctttgctaggttggcaaaaaacttaaagcaacagagggcggatttggtggcggcgactgtgaggcgggcgagcgaggtggtcattgggctcgcgccggagaacgctatgatcccgctgt

SEQ ID NO: 199910 - DNA, 2392 bp, Zea Mays
gcgtattttttccttctcccgcgtgcggcgcgccctagcttcctccttcccttccactcccgtccatagcagcgctgccaccaccgacggaaggcccttagcagcgccgccaccaccacgggagatgcgtggagagatgaagcaaaccaagtcaggaagaatagaaatgagggcagaatggaatgaaacaagaacttgtttttttgtgagcttactgaaggagtacaattcaccaagatatcgtgcccaaaatggttggacaaaagaagcatggaacaacatgacacaacgcatcaacgataaatttgaaacaaattttgtggtgacgtaattgaagaacaaatgaccagtgggggccgaataaacttacaaattcataccgaattttgcctggtccactaaagctgcctgcgcccccccccccccccccccccgcatgggctcgtagcccacagacgtcccaggagctggcccaatttatcttcgccatccatttcgattgaatggccacgatttaccgaaatcgcatatataaatgaaaatttcggcatgccctaaccctagcttcattcgcttccgatatttccggagtggtatagggcggatttggtggcggcgactgtgaggcgggcgagcgaggtggtcattgggctcgcgccggagaacgctatgatcccgctgttcgagacggggggcgcgcagctcgagctcatacgggatgccgagattgagccgtgtgcctacgtgaggtgggagcaagggaggccgagaggatccgcttcatgagttggatgcacacgagagacgttggggatcccagcttcccaatgcgggagatccagaagagtcaacggcggatcgatcaagtggattagcactctcccctgtctgcgtgatctgtagaacaaggataagtcggggacgctgttctgctttgccgcgatggaacatgtgttccaatccgagaatttcaggctggggcggttgggatgagggggaagccaatgggagatggatcaaggagatgagcatgatcgatcaaattgagaagatgactacttcaattgaagatgatcggaagataagtgtttgtgatatttttttattgccactttttgttcctaaatcaatcatttgctgtggttccagaaagtaactgaggagtgataaaacgacaattttgagcttcaacgctttgctaggttggcaaaaaacttaaagcaacagagtgttcaagctaatgttttggtgctagaaaaggctttaatgcatcaggcttgtgttcctgtgttggataatgcttagagaagtttagcagtgataatgcttcactattcgaaaatcagtaaaaagtttagaccatttatgtgacatttttggatagttcctatgttgtgttgcaaccattaactatattaactgtatattttcacatggtgggacagatagaggacttcatagtgttcattcgaataatgttgatgtataagttaactttccacttttcttggttacttaatgaaattaacttttatagatttgtgtctacatagtgttcatgcaaatattgttgtatattatattatatttaagactcttaattagtgtcatttaacaacaataaaaaaaaattacacaatacattgttgatatgagataatcaagtccaaaaaatgtagaattatacgggcgcggcgaagcgcgcctgccatcctagtaataatgctaacaagaagagtcctctctcccttcacgttctgtatgttcttttttgttcttttggaggagcagggcgtctttgtcaatttaatgcaagtaaatcaggagaaagttttgttgattgatattgacaatgatcatattcaaaatcctattggtgatggcttttcagcatttaaatcaactagccccaaatgcatgtgattttttatctgaacagcattagtatatgacaaagtaattatacattatgttgataagcttaaaataattagttacatgttttcgtctatcggtcccgtgcatcgcacgggttttaagctagtctatgaaacaagtgattaacgtggtatgataatttgattcattcctgattctatggatcgtccgttcctatctgtgttattgggatcgattcgtttgccttttccttgaatattacacgattttttactgttattgtcattgttttgtagtcagtttagtgccagaaaaatgatcccgagcatgattttttcggactcagatcagagaagggtttcaccagattttttttagcacaagggcaaagccccccacctccttaataaggcggatttggtggcggcgactgtgaggcgggcgagcgaggtggtcattgggctcgcgccggagaacgctatgatcccgctgt

SEQ ID NO: 199911 - DNA, 4145 bp, Zea Mays
ccgacggaaggcccttagcagcgccgccaccaccacgggagatgcgtggagagatgaagcaaaccaagtcaggaagaatagaaatgagggcagaatggaatgaaacaagaacttgtttttttgtgagcttactgaaggagtacaattcaccaagatatcgtgcccaaaatggttggacaaaagaagcatggaacaacatgacacaacgcatcaacgataaatttgaaacaaattttgtggtgacgtaattgaagaacaaatgaccagtgggggccgaataaacttacaaattcataccgaattttgcctggtccactaaagctgcctgcgcccccccccccccccccccccgcatgggctcgtagcccacagacgtcccaggagctggcccaatttatcttcgccatccatttcgattgaatggccacgatttaccgaaatcgcatatataaatgaaaatttcggcatgccctaaccctagcttcattcgcttccgatatttccggagtggtatagggcggatttggtggcggcgactgtgaggcgggcgagcgaggtggtcattgggctcgcgccggagaacgctatgatcccgctgttcgagacggggggcgcgcagctcgagctcatacgggatgccgagattgagccgtgtgcctacgtgaggtgggagcaagggaggccgagaggatccgcttcatgagttggatgcacacgagagacgttggggatcccagcttcccaatgcgggagatccagaagagtcaacggcggatcgatcaagtggattagcactctcccctgtctgcgtgatctgtagaacaaggataagtcggggacgctgttctgctttgccgcgatggaacatgtgttccaatccgagaatttcaggctggggcggttgggatgagggggaagccaatgggagatggatcaaggagatgagcatgggctagacgacttcctggtgaaggtagcttcaacagaccataactttcatgacgcttcaacccgctgcaatgaagacggcgatgaacacaatttcaacataacatataacggtgaagggtttagtagatgaatataataggggatgtatgtgacaaatagaagagttctcaccaaaggcaaatgaacaaaaccgaaaagaaaaggaacatcgtatgtaatttatagtgaaacaaaatatatgtaaagaataaagagggacgtgaggcgttgtgagagcggcaagatccgattaaaaaattgccataaccgagtgaattcgagtgaggtggggggtgtggaaagcgtgaaatctggttggcaggccctattgtcagagtgtgcattaaaatcggatcaggtggtctggcaccggttcaggagaaaccggttgcgtgggaacgtgggtggactggcaccgggtcaggagtaaaaccggtcgcgtggtggcgtcagttggcgggtggacgcgcgcttcgcactgggacgcacgacgggacgacaagtgacgctttaaaggagtaaagagattgacggacctaagcaactgcataaccatttcgaggcctattttgagaagcccacagacggaagattacgtctccttgtcacggcccaaatagagcatacaagaactcatcagaatctccccgccgccatgcggatctgcagtaccttcatcctgtttgatccaaagccgactccttttcttcctctaatccttctttctggcagtatttgttagggttttctccgggattgaaggcactgctgcaggctgaaacgtttctcgcttgattggcggaagaagggattccagcgatctgtttgctgctagctgcgagagttcaatatgtctcggaccttcaaatcgacgacgggtctctctcggcggtttctgaatctgatcgcggccaaccactcccctggcgtcaagtcgctgcaccgcatcggcctgggtcgcatctttaactcaacgccagcgccaataccaaacggagatcgattggagtccgcagcaggacaagaagactacatggtgcggccccgcgcgttggatatcattcggctccccacgccgtcagggcgcggtttcctcttcgatgccaactcgtgcggggtgtcaaccgtggcccatctccatacacccaagcgatgcaggcgcttattgatcttcacgtggaggacaatgcaaccgcgacgatacacaagcatttgagaagggctacccatctgttttatggaatgtcaattgcaatttattcagatgctaattttgcctttgtatgatctttacataataggttggtaaaaagcaaggtccatcgattattcgagacttaatgtgcaactatttttacagtttgtcagttatatataaccttttcagggtataagaagttcaatcaacattttccctccatgagtgaatggtaacgtttaacattgcatttataaatcaatactttggggaatagatttattttcaccctcaaactcacaaattgcatttataagtcaacctgttggggaatacttttacttccattcttgaattgacttttcttatcttgtgaacgctacagcagatcgatcaaattgagaagatgactacttcaattgaagatgatcggaagataagtgtttgtgatatttttttattgccactttttgttcctaaatcaatcatttgctgtggttccagaaagtaactgaggagtgataaaacgacaattttgagcttcaacgctttgctaggttggcaaaaaacttaaagcaacagagtcagtttagtgccagaaaaatgatcccgagcatgattttttcggactcagatcagagaagggtttcaccagattttttttagcacaagggcaaagccccccacctccttaataagtgagtcaccttacaaagtataagggtttgaccagataatttcatttctttacgaatccctgaaataaacaataaaaatacaatcactattgcataaaaattgatagtgatccagtcataaagaaatgacactgcattttatgtttgaacgtcttactcatataggggtggctaaggagtgagattagttaattaaaactcatgtattttctatattttgaattaaaatttaaatttgaattcaaatataaaatatttggtgaattttctaggaatattgactaaatttaaattcgaattcagctcttagacctttgaagttctgagagcagaattcgaatttaaattttagttcaaaatacataccaaactagcaaaagtgttcaaaagtaaaattgtaatgaatagttctatcagtcaacaaggaccagatatttagttaaaaaaattgataggacccacttgtcagcctcttcacaacgccacataggatgccacctaggcgaaactgcctgcaaaatcgtctgagggatcaaaatcagacggttttgaaagttaaaaaactagtagttgtacctggttttgtgcagcagacacaaaaatagattcgcacaacacttaagaggaccaaaagagtactttttcccatagaactagttgtgagcctgtgcgttgcaacaggaaaatagatattgaacgaaaaggttcatcaaacatgtataatattagaataataagatacataattttaatattaaataatattttaacacattatgtaaatattatagtataatataatataaaatcatcattgggcaaaaataaagcaatatttcttctatattaattgcctttgaaaacataaactctttgtgtattaaaatttattcaatcataatctattagcaaattaacccacttaagtagtgtttttgttaaatacacatatctatagtgtccaacggcaaatagcgtacttgaaggacctctacgagcaaattttgccttcgtacaatattattgaccagcaataattaattaatgttgaaaattagttaacactaatttatttatattttatgaaagttaaagaaagattaagcatgtttcaacccaatgattaatgcacataattattcaattttatgctgcacaaaataattaaaaactaaaaagaaaaacaaatgaccagtgggggccgaataaacttacaaattcataccgaattttgcctggtccactaaagctgcctgccc

SEQ ID NO: 199912 - DNA, 4084 bp, Zea Mays
caccgacggaaggcccttagcagcgccgccaccaccacgggagatgcgtggagagatgaagcaaaccaagtcaggaagaatagaaatgagggcagaatggaatgaaacaagaacttgtttttttgtgagcttactgaaggagtacaattcaccaagatatcgtgcccaaaatggttggacaaaagaagcatggaacaacatgacacaacgcatcaacgataaatttgaaacaaattttgtggtgacgtaattgaagaacaaatgaccagtgggggccgaataaacttacaaattcataccgaattttgcctggtccactaaagctgcctgcgcccccccccccccccccccccgcatgggctcgtagcccacagacgtcccaggagctggcccaatttatcttcgccatccatttcgattgaatggccacgatttaccgaaatcgcatatataaatgaaaatttcggcatgccctaaccctagcttcattcgcttccgatatttccggagtggtatagggcggatttggtggcggcgactgtgaggcgggcgagcgaggtggtcattgggctcgcgccggagaacgctatgatcccgctgttcgagacggggggcgcgcagctcgagctcatacgggatgccgagattgagccgtgtgcctacgtgaggtgggagcaagggaggccgagaggatccgcttcatgagttggatgcacacgagagacgttggggatcccagcttcccaatgcgggagatccagaagagtcaacggcggatcgatcaagtggattagcactctcccctgtctgcgtgatctgtagaacaaggataagtcggggacgctgttctgctttgccgcgatggaacatgtgttccaatccgagaatttcaggctggggcggttgggatgagggggaagccaatgggagatggatcaaggagatgagcatgcgatgcaggcgcttattgatcttcacgtggaggacaatgcaaccgcgacgatacacaagtatattattcttcagtaccttggttttgcatgttgatgtcagttttgattaaaaaaagtctatactcgcacaggataaccacatggtccaaacatcaaaaattactttttccaggttcaaagttcaacagatcatgtaacatttaggttttacatttttcctattgtatgttaaaaaataatgaaaatttgaattaaattcttactagccggttaatttactccgttaatccctcattaatgtatgtactgttttcatgctaattaaactttgggagaatttttttccaactgatgtggaaaaatgaccattcaggcatttgagaagggctacccatctgttttatggaatgtcaattgcaatttattcagatgctaattttgcctttgtatgatctttacataataggttggtaaaaagcaaggtccatcgattattcgagacttaatgtgcaactatttttacagtttgtcagttatatataaccttttcagggtataagaagttcaatcaacattttccctccatgagtgaatgcagatcgatcaaattgagaagatgactacttcaattgaagatgatcggaagataagtgtttgtgatatttttttattgccactttttgttcctaaatcaatcatttgctgtggttccagaaagtaactgaggagtgataaaacgacaattttgagcttcaacgctttgctaggttggcaaaaaacttaaagcaacagtgttcaagctaatgttttggtgctagaaaaggctttaatgcatcaggcttgtgttcctgtgttggataatgcttagagaagtttagcagtgataatgcttcactattcgaaaatcagtaaaaagtttagaccatttatgtgacatttttggatagttcctatgttgtgttgcaaccattaactatattaactgtatattttcacatggtgggacagatagaggacttcatagtgttcattcgaataatgttgatgtataagttaactttccacttttcttggttacttaatgaaattaacttttatagatttgtgtctacatagtgttcatgcaaatattgttgtatattatattatatttaagactcttaattagtgtcatttaacaacaataaaaaaaaattacacaatacattgttgatatgagataatcaagtccaaaaaatgtagaattatacgggcgcggcgaagcgcgcctgccatcctagtaataatgctaacaagaagagtcctctctcccttcacgttctgtatgttcttttttgttcttttggaggagcagggcgtctttgtcaatttaatgcaagtaaatcaggagaaagttttgttgattgatattgacaatgatcatattcaaaatcctattggtgatggcttttcagcatttaaatcaactagccccaaatgcatgtgattttttatctgaacagcattagtatatgacaaagtaattatacattatgttgataagcttaaaataattagttacatgttttcgtctatcggtcccgtgcatcgcacgggttttaagctagtctatgaaacaagtgattaacgtggtatgataatttgattcattcctgattctatggatcgtccgttcctatctgtgttattgggatcgattcgtttgccttttccttgaatattacacgattttttactgttattgtcattgttttgtagtcagtttagtgccagaaaaatgatcccgagcatgattttttcggactcagatcagagaagggtttcaccagattttttttagcacaagggcaaagccccccacctccttaataagtgagtcaccttacaaagtataagggtttgaccagataatttcatttctttacgaatccctgaaataaacaataaaaatacaatcactattgcataaaaattgatagtgatccagtcataaagaaatgacactgcattttatgtttgaacgtcttactcatataggggtggctaaggagtgagattagttaattaaaactcatgtattttctatattttgaattaaaatttaaatttgaattcaaatataaaatatttggtgaattttctaggaatattgactaaatttaaattcgaattcagctcttagacctttgaagttctgagagcagaattcgaatttaaattttagttcaaaatacataccaaactagcaaaagtgttcaaaagtaaaattgtaatgaatagttctatcagtcaacaaggaccagatatttagttaaaaaaattgataggacccacttgtcagcctcttcacaacgccacataggatgccacctaggcgaaactgcctgcaaaatcgtctgagggatcaaaatcagacggttttgaaagttaaaaaactagtagttgtacctggttttgtgcagcagacacaaaaatagattcgcacaacacttaagaggaccaaaagagtactttttcccatagaactagttgtgagcctgtgcgttgcaacaggaaaatagatattgaacgaaaaggttcatcaaacatgtataatattagaataataagatacataattttaatattaaataatattttaacacattatgtaaatattatagtataatataatataaaatcatcattgggcaaaaataaagcaatatttcttctatattaattgcctttgaaaacataaactctttgtgtattaaaatttattcaatcataatctattagcaaattaacccacttaagtagtgtttttgttaaatacacatatctatagtgtccaacggcaaatagcgtacttgaaggacctctacgagcaaattttgccttcgtacaatattattgaccagcaataattaattaatgttgaaaattagttaacactaatttatttatattttatgaaagttaaagaaagattaagcatgtttcaacccaatgattaatgcacataattattcaattttatgctgcacaaaataattaaaaactaaaaagaaaaacaaatgaccagtgggggccgaataaacttacaaattcataccgaattttgcctggtccactaaagctgcctgccc

SEQ ID NO: 199913 - DNA, 1658 bp, Zea Mays
gtcattttctagagagctttttgtgatactcttattactcagggtagcaatcccaaaaatgcagggctagtttagaaacttaaatcatttctaggattcccggatcaaagaaaaaaatatatttatatatttacattttaaatgatatattaaataaaactaaaatatgtatgtaactatttaaatttaatggttatgacagatacatacgcatagcaatttattcctctcctctatatattttcaaaaacataaaaaagaaaaaaaatcaacaccggaccaatgcgcgctcgctccagcacagtattgcggcagtattgcagtccagaacagggcaccgccgcaccggtgctcgttccagcccaggaggccagtaccgcagtcccgcgcagccggccattcccatgccgccggcacccatgagatggcggcgcgggggccgctcgtcatcgcgtctccttcagcgagccctcctcttggccgccttctccgctgcggccctcatcctcctcgtactccagcaccaccacggtcctaaacgcccaaacccttccgccgcgtcccacgcccgcgactcctcagacgagctcctcgacgactcgcctcccgcggagcgggatccggatgccagtgaccctgcggtagttgttgacagggccacgtgcgcaacggtggagatgatgggggaggaggccgctggtgctgggcggggctctccggagcaggccagcctgcgggtccgcgagatgatccggcgccacttcgagctccacggggactgtatccttttggggagtacatttcttataccaaccagtcattcactattcatgaaatcaaacatttgtggaggaagcatcgctgtgctaggacatatggtagagatctgaatatcagagtggatatttttgaaaatccaactgagacgaatgttctgtgtagtgactggaatagctggaaggattcaattatctggtttgatggcgcaacagatgcagttgggattcagttctttctgaagaatgttcatcctagaatgaaggctgccgcgtcggctctttttggattgccagactcattgtacgccaggcctaatacatttggtgaacttatgcgagctattatatctccatccagcaaagtccaagaagcagttgactgggctttgaagggtgtgaatccagatattgttttgcacatgcgcatgatggcgaataggccagtccgagcaagaaaagctgcagttctttgtatcaagaaagccctacagtttagccatattaagggtacagctctggtggccttggtctcagacacaccagcatttgtgaaggagataaagtcagacatcagtgagtttgcagaggtacttaattttgattacaaattgtttgccaagacttctagtctggagattgttggaaatgataagcccttggattttcgatcaagagactggggatcagctccaaggtgggtggcgtttgttgatttctttatagctgcacaggccaggtacgcagtcgtcactggagcacatcgtcgtgtggggaccacctacgcacaactcattacagcattggctgcggcaaacaggcatggggattgtatccttttgaggagcacatttcttataccaaccagtcattcactattca

SEQ ID NO: 199914 - DNA, 997 bp, Zea Mays
ctcgattcgttcagctgtttgattctctgtgttgtgggcctgaatttcgattttctggtgttgaacttgacaaagcactcgtcctacctcatatacaatgctgctctcttcttcagcccattcatccagcaacagtatcatgacaaatatggtgataaagagatgattcctgttgctgcaaatgatgttgctttttcactgcatgctgtagcattgacagcctttaccgtttttcaagtattcatatatgagcgaggaacacagaaagtctccaaagtttgcatatcaatttctgctattgtctggatcgccgctcttgtttgcctcattattgcttggccaaaaagtgactggctttggcttattgatgtattcaattcaatacaagttggcatgacagcaatcaagtacatccctcaggccatcatgaacttcaggcggaagagcacaattggttggagcgttggcaatatattacttgatctcacaggaggggtgctgaatttttgtcagatgggtgtgcagtctatagatcaacatactttggtgaatttctatggaaacattgggaaaacccttctttcattggagacggttttctttgatgtcctgttcattatccaacactacgtgttgtaccctgtcaagaaggacgagaatggccacacacgcatgcgaattatttgttcaaaaggaattgctggcgcgtcttgattatattactgcttataacttttactacttggtgcactggtgagagatgtctcatataccaggttgcggtttcaagtggccccgtttttactatcgtgatttgtgaaggttattagatatcatctcggccaacatttacgatcaatgctcatgtaaatatttggttgcattacatttctatggtttcatatttgcttttttttcttatattttttgtttgatcttcgtcacttacgatcagcataggacatatttctagaagtttgaggtgtgcgaaaccaac

SEQ ID NO: 199915 - DNA, 810 bp, Zea Mays
agagtgcaaatgctggcgctgcaacagcccaagcagacaaaaaaaaatcttcaaaagcaagaaataaacatacagtagaagcttctgctgatgacaccgaaggaacatcaaaggttgttgaggaacctgcccctgagagcaagagggtatctgaatctgcagactacgatgcatcccagttgcatgagttttcccaggttgaagttggtgatgcccatgctgtagacggtgagggtgctggtgaggaagatggtgatattttggatggccaagatgcactgcctgatgtgccaatgacaccttctggaagcgagtttggagcggaacaggaagatgaggacgatgatgattcagagaggcgaaaccaatcaatcagcaagaagctatggtcattcttcactacatgacttgctgaagaggtcgtcatgtaggttatttctagcttttgtggtttcgattcatgataccccattcttggaactgtaggtcgtgtgcttttggtgattatgtactagatctcccacttgattgtgcttctctcccgtgtaattgaaatatatttgtagtggacatagtttgatggcactcacagaagtagctgatgagatgtacaatggcgatgatggtatgccctgtaaggctgtaacaccagtagcttggtttgtaattgttcttttcccccggttcgtgttacttcgttgaccttattccggggaaatattttagtgctgtgatgatggtctaaatgtttgttcgcctattgaaactaaatacaatgaattagaataccacagtccacaggagcttcgg

SEQ ID NO: 199916 - DNA, 2989 bp, Zea Mays
gaagttaaactcaatcgggctgcctttgtccttaagttctgccttagcgcctcccactgttcttctcaaatggaggggctccagaagcttcttgaggatcatcaggtggagcttgaatccaaaagacgggattttgaattagaattagagagggaaaggaaatcttttgatcaaaatatgacacagaagcaagcggatttattgaaaagggagaaagatgttaaatctttggaggctaaactttctaaaagtgagcaggcattgaatgataagaagaaatcaatggaaaacttgcagaatgatcttgatgccaaatctaaggctctgaagagttgggatgaatcattgaaaaatgacgagaaaaggttactgaaagaaaagcagcaaatggatcatgaaagagaacaattggagacatacaaattggagcttgaaaagatcaaatcagcattagaagctgagaaggaaaaaatatcagaagagcagaataatctgaaactcacagcgcaagagaggcaggagcatagcttgttgatagcaaaacttaagaaggagattgaggaatacagaatgcgaagcaactccctatctgaggaaatggaggatttaaggaagcaacggcagaaatttgaagaagagtgggaacaactagacgaaaagagagccctccttgtagaggaggacaaaaggttgaacattgagaggatgaatttagaacggtggcgtgacaacgaagaaaaaaggttaaatgatatgaaactcaaaatggatgaagaatacaagcagcagctggagagtcttgagcgcaaggaaaaggctttgagtgatgatatgaagcacaagcaaatggaaaatgatgaatttctgaagggagaacgtgctgatgttcaacgtaaattgcaactcaaacggcatgaattggagatggagatggagcaaaaacaagccacgaaggagaaggaactggaagaaaaggaaaatgagttaaataagaaaatagattttgtggaaaataaactccgacatgcaattgagttgaatgagtccaagattgagaagttattattggagaaaagggaggtgcagatggaaagagaattactgctggaggaaagaaagaaaacggagactgacaaggcagatattagaagggatattgagagtctgcactcattgagcaagagtttgaaggaacgtcgagaggcatataacagggacaggagcagactcatcgaactatttgaaaagtacaaggcgtgcaaaaactgtgggatttctatttttgagggattggattctctgctgcttaaagacagtgctgaaattgagcatccaagtttggctgttgagggagatgatcatgccttgaccaccgatacatcaggtccagatacaggaacccttgttaattcaggtggtcgtttttctttgttacagaagtgttcaaggcttttcaagttctcccctagaaaaaagggtgagcagtcatcagaacaaccatcagagaggaatatatcttttggtgcaagactcgaggaagcaacacagagcgatggagattatgtgccaactcctgtctatgagatagcccacgattctttcaatgcagaggatgagctcccttctgacggtgaaaccagggagaatgaagagtctgaaaggcatgacatagctgataatgcccagatggagtcttctgttggtgtagcagataacagtatagatattctcggtactaagtcatttgatggtgctaacgacatggcagttgaagcaactattgtctctgttgatcaaaatggcgaggactctgtagttcctgctgaagcaggtgtagagcctgaaacatcagagcaaggtcggcgccagcaaaaccagagaggcagaagaaaaggtggtatgaaaagaacacggtctgttaatgctgtagttgaagatgctaagatgatacttggcgaggtttttgaggagaagactgatgatcagggagatacagtcaaggtgggtgctacacgaaagcggcggtttgctggagctacaataagtgaacaagatgaagaagggagcgaagcacattcagaaagtgtttcacttggagggcagcgccgtaagaggcggcaaactgctggggcagtgacagatgccccaggagaaagacgttacaatttgagacacagtagagctgcaaatgctggcgctgcaacagcccaagcagacaaaaaaaaatcttcaaaagcaagaaataaacatacagtagaagcttctgctgatgacaccgaaggaacatcaaaggttgttgaggaacctgcccctgagagcaagagggtatctgaatctgcagactacgatgcatcccagttgcatgagttttcccaggttgaagttggtgatgcccatgctgtagacggtgagggtgctggtgaggaagatggtgatattttggatggccaagatgcactgcctgatgtgccaatgacaccttctggaagcgagtttggagcggaacaggaagatgaggacgatgatgattcagagaggcgaaaccaatcaatcagcaagaagctatggtcattcttcactacatgacttgctgaagaggtcgtcatgtaggttatttctagcttttgtggtttcgattcatgataccccattcttggaactgtaggtcgtgtgcttttggtgattatgtactagatctcccacttgattgtgcttctctcccgtgtaattgaaatatatttgtagtggacatagtttgatggcactcacagaagtagctgatgagatgtacaatggcgatgatggtatgccctgtaaggctgtaacaccagtagcttggtttgtaattgttcttttcccccggttcgtgttacttcgttgaccttattccggggaaatattttagtgctgtgatgatggtctaaatgtttgttcgcctattgaaactaaatacaatgaattagaataccacagtccacaggagcttcgg

SEQ ID NO: 199917 - DNA, 3963 bp, Zea Mays
gtaatgccatggtttcttgttgctttggggagggagaggtgctttggttcctggatgagctgtgaaggaactgggagcaagaagaattgatgtttactccgcagggcaaaggatggaccggctggtcgacgccaactccggccaaccagcggagcggtggtggggctcctgctgcgtcggcgccccttggaaagggcaaaggaagggtcgccgagctcgagcaggagttgcatgaatatcagtacaatatggggcttcttttgattgaaaagaaagaatgggcagcaaaatttgaagaaatcagtgaagtgctgacacagaaagaggagatactgaagagggagcaggcggcacatctgaatgctatatcagagtatgaaaggcgggaggagaacatgcggaaagcactaggtgttgagaagcaatgtgtcgctgatcttgaaaaagccttgcgtgatatacgagcagagatagctgaggttaaatttacatctgagaaaaagataacagatgctcagtctcttgaggctagtttggaggaaaaatccttggagatcgagggaaaacttcatgctgcagatgccaaacttgcagaggcaaaccgcaagaagtctcaagctgaccgtgatttagaagaggcggaagctcgtcaacgtagactggagaaggagaaactgtattttgagacagagcggaaggcccgagaaaagcaacttaaggagcaggaggaatcactgcaggaatgggagaaaaagctgaaggaaagtcagaatagacttaatgagttgcagagatctataaatgagcgagaggagagagcaaataagaatgatcaacttttcaagataaaacaggacgaactggaggaggcacgaaggacagtggaggccgctaaagttactctgaaagtcaaagaggatgatattaacaaaagactaaatgaattacatttacaggaaaaggatgctgactcaaagcgcagtgcattggaagagcaggggaaaaaattggatgagagagaggcaaaggtcactaatagagaaaaggaggggctccagaagcttcttgaggatcatcaggtggagcttgaatccaaaagacgggattttgaattagaattagagagggaaaggaaatcttttgatcaaaatatgacacagaagcaagcggatttattgaaaagggagaaagatgttaaatctttggaggctaaactttctaaaagtgagcaggcattgaatgataagaagaaatcaatggaaaacttgcagaatgatcttgatgccaaatctaaggctctgaagagttgggatgaatcattgaaaaatgacgagaaaaggttactgaaagaaaagcagcaaatggatcatgaaagagaacaattggagacatacaaattggagcttgaaaagatcaaatcagcattagaagctgagaaggaaaaaatatcagaagagcagaataatctgaaactcacagcgcaagagaggcaggagcatagcttgttgatagcaaaacttaagaaggagattgaggaatacagaatgcgaagcaactccctatctgaggaaatggaggatttaaggaagcaacggcagaaatttgaagaagagtgggaacaactagacgaaaagagagccctccttgtagaggaggacaaaaggttgaacattgagaggatgaatttagaacggtggcgtgacaacgaagaaaaaaggttaaatgatatgaaactcaaaatggatgaagaatacaagcagcagctggagagtcttgagcgcaaggaaaaggctttgagtgatgatatgaagcacaagcaaatggaaaatgatgaatttctgaagggagaacgtgctgatgttcaacgtaaattgcaactcaaacggcatgaattggagatggagatggagcaaaaacaagccacgaaggagaaggaactggaagaaaaggaaaatgagttaaataagaaaatagattttgtggaaaataaactccgacatgcaattgagttgaatgagtccaagattgagaagttattattggagaaaagggaggtgcagatggaaagagaattactgctggaggaaagaaagaaaacggagactgacaaggcagatattagaagggatattgagagtctgcactcattgagcaagagtttgaaggaacgtcgagaggcatataacagggacaggagcagactcatcgaactatttgaaaagtacaaggcgtgcaaaaactgtgggatttctatttttgagggattggattctctgctgcttaaagacagtgctgaaattgagcatccaagtttggctgttgagggagatgatcatgccttgaccaccgatacatcaggtccagatacaggaacccttgttaattcaggtggtcgtttttctttgttacagaagtgttcaaggcttttcaagttctcccctagaaaaaagggtgagcagtcatcagaacaaccatcagagaggaatatatcttttggtgcaagactcgaggaagcaacacagagcgatggagattatgtgccaactcctgtctatgagatagcccacgattctttcaatgcagaggatgagctcccttctgacggtgaaaccagggagaatgaagagtctgaaaggcatgacatagctgataatgcccagatggagtcttctgttggtgtagcagataacagtatagatattctcggtactaagtcatttgatggtgctaacgacatggcagttgaagcaactattgtctctgttgatcaaaatggcgaggactctgtagttcctgctgaagcaggtgtagagcctgaaacatcagagcaaggtcggcgccagcaaaaccagagaggcagaagaaaaggtggtatgaaaagaacacggtctgttaatgctgtagttgaagatgctaagatgatacttggcgaggtttttgaggagaagactgatgatcagggagatacagtcaaggtgggtgctacacgaaagcggcggtttgctggagctacaataagtgaacaagatgaagaagggagcgaagcacattcagaaagtgtttcacttggagggcagcgccgtaagaggcggcaaactgctggggcagtgacagatgccccaggagaaagacgttacaatttgagacacagtagagctgcaaatgctggcgctgcaacagcccaagcagacaaaaaaaaatcttcaaaagcaagaaataaacatacagtagaagcttctgctgatgacaccgaaggaacatcaaaggttgttgaggaacctgcccctgagagcaagagggtatctgaatctgcagactacgatgcatcccagttgcatgagttttcccaggttgaagttggtgatgcccatgctgtagacggtgagggtgctggtgaggaagatggtgatattttggatggccaagatgcactgcctgatgtgccaatgacaccttctggaagcgagtttggagcggaacaggaagatgaggacgatgatgattcagagaggcgaaaccaatcaatcagcaagaagctatggtcattcttcactacatgacttgctgaagaggtcgtcatgtaggttatttctagcttttgtggtttcgattcatgataccccattcttggaactgtaggtcgtgtgcttttggtgattatgtactagatctcccacttgattgtgcttctctcccgtgtaattgaaatatatttgtagtggacatagtttgatggcactcacagaagtagctgatgagatgtacaatggcgatgatggtatgccctgtaaggctgtaacaccagtagcttggtttgtaattgttcttttcccccggttcgtgttacttcgttgaccttattccggggaaatattttagtgctgtgatgatggtctaaatgtttgttcgcctattgaaactaaatacaatgaattagaataccacagtccacaggagcttcgg

SEQ ID NO: 199918 - DNA, 3696 bp, Zea Mays
gaattacgagggtttctgtcctgggcggtcaaaaattctgacttggaaaccctcggtgggccgcttcctggttcttgggagggagaggtgctttggttcctggatgagctgtgaaggaactgggagcaagaagaattgatgtttactccgcagggcaaaggatggaccggctggtcgacgccaactccggccaaccagcggagcggtggtggggctcctgctgcgtcggcgccccttggaaagggcaaaggaagggtcgccgagctcgagcaggagttgcatgaatatcagtacaatatggggcttcttttgattgaaaagaaagaatgggcagcaaaatttgaagaaatcagtgaagtgctgacacagaaagaggagatactgaagagggagcaggcggcacatctgaatgctatatcagagtatgaaaggcccgagaaaagcaacttaaggagcaggaggaatcactgcaggaatgggagaaaaagctgaaggaaagtcagaatagacttaatgagttgcagagatctataaatgagcgagaggagagagcaaataagaatgatcaacttttcaagataaaacaggacgaactggaggaggcacgaaggacagtggaggccgctaaagttactctgaaagtcaaagaggatgatattaacaaaagactaaatgaattacatttacaggaaaaggatgctgactcaaagcgcagtgcattggaagagcaggggaaaaaattggatgagagagaggcaaaggtcactaatagagaaaaggaggggctccagaagcttcttgaggatcatcaggtggagcttgaatccaaaagacgggattttgaattagaattagagagggaaaggaaatcttttgatcaaaatatgacacagaagcaagcggatttattgaaaagggagaaagatgttaaatctttggaggctaaactttctaaaagtgagcaggcattgaatgataagaagaaatcaatggaaaacttgcagaatgatcttgatgccaaatctaaggctctgaagagttgggatgaatcattgaaaaatgacgagaaaaggttactgaaagaaaagcagcaaatggatcatgaaagagaacaattggagacatacaaattggagcttgaaaagatcaaatcagcattagaagctgagaaggaaaaaatatcagaagagcagaataatctgaaactcacagcgcaagagaggcaggagcatagcttgttgatagcaaaacttaagaaggagattgaggaatacagaatgcgaagcaactccctatctgaggaaatggaggatttaaggaagcaacggcagaaatttgaagaagagtgggaacaactagacgaaaagagagccctccttgtagaggaggacaaaaggttgaacattgagaggatgaatttagaacggtggcgtgacaacgaagaaaaaaggttaaatgatatgaaactcaaaatggatgaagaatacaagcagcagctggagagtcttgagcgcaaggaaaaggctttgagtgatgatatgaagcacaagcaaatggaaaatgatgaatttctgaagggagaacgtgctgatgttcaacgtaaattgcaactcaaacggcatgaattggagatggagatggagcaaaaacaagccacgaaggagaaggaactggaagaaaaggaaaatgagttaaataagaaaatagattttgtggaaaataaactccgacatgcaattgagttgaatgagtccaagattgagaagttattattggagaaaagggaggtgcagatggaaagagaattactgctggaggaaagaaagaaaacggagactgacaaggcagatattagaagggatattgagagtctgcactcattgagcaagagtttgaaggaacgtcgagaggcatataacagggacaggagcagactcatcgaactatttgaaaagtacaaggcgtgcaaaaactgtgggatttctatttttgagggattggattctctgctgcttaaagacagtgctgaaattgagcatccaagtttggctgttgagggagatgatcatgccttgaccaccgatacatcaggtccagatacaggaacccttgttaattcaggtggtcgtttttctttgttacagaagtgttcaaggcttttcaagttctcccctagaaaaaagggtgagcagtcatcagaacaaccatcagagaggaatatatcttttggtgcaagactcgaggaagcaacacagagcgatggagattatgtgccaactcctgtctatgagatagcccacgattctttcaatgcagaggatgagctcccttctgacggtgaaaccagggagaatgaagagtctgaaaggcatgacatagctgataatgcccagatggagtcttctgttggtgtagcagataacagtatagatattctcggtactaagtcatttgatggtgctaacgacatggcagttgaagcaactattgtctctgttgatcaaaatggcgaggactctgtagttcctgctgaagcaggtgtagagcctgaaacatcagagcaaggtcggcgccagcaaaaccagagaggcagaagaaaaggtggtatgaaaagaacacggtctgttaatgctgtagttgaagatgctaagatgatacttggcgaggtttttgaggagaagactgatgatcagggagatacagtcaaggtgggtgctacacgaaagcggcggtttgctggagctacaataagtgaacaagatgaagaagggagcgaagcacattcagaaagtgtttcacttggagggcagcgccgtaagaggcggcaaactgctggggcagtgacagatgccccaggagaaagacgttacaatttgagacacagtagagctgcaaatgctggcgctgcaacagcccaagcagacaaaaaaaaatcttcaaaagcaagaaataaacatacagtagaagcttctgctgatgacaccgaaggaacatcaaaggttgttgaggaacctgcccctgagagcaagagggtatctgaatctgcagactacgatgcatcccagttgcatgagttttcccaggttgaagttggtgatgcccatgctgtagacggtgagggtgctggtgaggaagatggtgatattttggatggccaagatgcactgcctgatgtgccaatgacaccttctggaagcgagtttggagcggaacaggaagatgaggacgatgatgattcagagaggcgaaaccaatcaatcagcaagaagctatggtcattcttcactacatgacttgctgaagaggtcgtcatgtaggttatttctagcttttgtggtttcgattcatgataccccattcttggaactgtaggtcgtgtgcttttggtgattatgtactagatctcccacttgattgtgcttctctcccgtgtaattgaaatatatttgtagtggacatagtttgatggcactcacagaagtagctgatgagatgtacaatggcgatgatggtatgccctgtaaggctgtaacaccagtagcttggtttgtaattgttcttttcccccggttcgtgttacttcgttgaccttattccggggaaatattttagtgctgtgatgatggtctaaatgtttgttcgcctattgaaactaaatacaatgaattagaataccacagtccacaggagcttcgg

SEQ ID NO: 199919 - DNA, 4041 bp, Zea Mays
cagatccgttcggttttccattagcttggttcctgaggttcttggaattacgagggtttctgtcctgggcggtcaaaaattctgacttggaaaccctcggtgggccgcttcctggttcttgggagggagaggtgctttggttcctggatgagctgtgaaggaactgggagcaagaagaattgatgtttactccgcagggcaaaggatggaccggctggtcgacgccaactccggccaaccagcggagcggtggtggggctcctgctgcgtcggcgccccttggaaagggcaaaggaagggtcgccgagctcgagcaggagttgcatgaatatcagtacaatatggggcttcttttgattgaaaagaaagaatgggcagcaaaatttgaagaaatcagtgaagtgctgacacagaaagaggagatactgaagagggagcaggcggcacatctgaatgctatatcagagtatgaaaggcgggaggagaacatgcggaaagcactaggtgttgagaagcaatgtgtcgctgatcttgaaaaagccttgcgtgatatacgagcagagatagctgaggttaaatttacatctgagaaaaagataacagatgctcagtctcttgaggctagtttggaggaaaaatccttggagatcgagggaaaacttcatgctgcagatgccaaacttgcagaggcaaaccgcaagaagtctcaagctgaccgtgatttagaagaggcggaagctcgtcaacgtagactggagaaggagaaactgcggaaggcccgagaaaagcaacttaaggagcaggaggaatcactgcaggaatgggagaaaaagctgaaggaaagtcagaatagacttaatgagttgcagagatctataaatgagcgagaggagagagcaaataagaatgatcaacttttcaagataaaacaggacgaactggaggaggcacgaaggacagtggaggccgctaaagttactctgaaagtcaaagaggatgatattaacaaaagactaaatgaattacatttacaggaaaaggatgctgactcaaagcgcagtgcattggaagagcaggggaaaaaattggatgagagagaggcaaaggtcactaatagagaaaaggaggggctccagaagcttcttgaggatcatcaggtggagcttgaatccaaaagacgggattttgaattagaattagagagggaaaggaaatcttttgatcaaaatatgacacagaagcaagcggatttattgaaaagggagaaagatgttaaatctttggaggctaaactttctaaaagtgagcaggcattgaatgataagaagaaatcaatggaaaacttgcagaatgatcttgatgccaaatctaaggctctgaagagttgggatgaatcattgaaaaatgacgagaaaaggttactgaaagaaaagcagcaaatggatcatgaaagagaacaattggagacatacaaattggagcttgaaaagatcaaatcagcattagaagctgagaaggaaaaaatatcagaagagcagaataatctgaaactcacagcgcaagagaggcaggagcatagcttgttgatagcaaaacttaagaaggagattgaggaatacagaatgcgaagcaactccctatctgaggaaatggaggatttaaggaagcaacggcagaaatttgaagaagagtgggaacaactagacgaaaagagagccctccttgtagaggaggacaaaaggttgaacattgagaggatgaatttagaacggtggcgtgacaacgaagaaaaaaggttaaatgatatgaaactcaaaatggatgaagaatacaagcagcagctggagagtcttgagcgcaaggaaaaggctttgagtgatgatatgaagcacaagcaaatggaaaatgatgaatttctgaagggagaacgtgctgatgttcaacgtaaattgcaactcaaacggcatgaattggagatggagatggagcaaaaacaagccacgaaggagaaggaactggaagaaaaggaaaatgagttaaataagaaaatagattttgtggaaaataaactccgacatgcaattgagttgaatgagtccaagattgagaagttattattggagaaaagggaggtgcagatggaaagagaattactgctggaggaaagaaagaaaacggagactgacaaggcagatattagaagggatattgagagtctgcactcattgagcaagagtttgaaggaacgtcgagaggcatataacagggacaggagcagactcatcgaactatttgaaaagtacaaggcgtgcaaaaactgtgggatttctatttttgagggattggattctctgctgcttaaagacagtgctgaaattgagcatccaagtttggctgttgagggagatgatcatgccttgaccaccgatacatcaggtccagatacaggaacccttgttaattcaggtggtcgtttttctttgttacagaagtgttcaaggcttttcaagttctcccctagaaaaaagggtgagcagtcatcagaacaaccatcagagaggaatatatcttttggtgcaagactcgaggaagcaacacagagcgatggagattatgtgccaactcctgtctatgagatagcccacgattctttcaatgcagaggatgagctcccttctgacggtgaaaccagggagaatgaagagtctgaaaggcatgacatagctgataatgcccagatggagtcttctgttggtgtagcagataacagtatagatattctcggtactaagtcatttgatggtgctaacgacatggcagttgaagcaactattgtctctgttgatcaaaatggcgaggactctgtagttcctgctgaagcaggtgtagagcctgaaacatcagagcaaggtcggcgccagcaaaaccagagaggcagaagaaaaggtggtatgaaaagaacacggtctgttaatgctgtagttgaagatgctaagatgatacttggcgaggtttttgaggagaagactgatgatcagggagatacagtcaaggtgggtgctacacgaaagcggcggtttgctggagctacaataagtgaacaagatgaagaagggagcgaagcacattcagaaagtgtttcacttggagggcagcgccgtaagaggcggcaaactgctggggcagtgacagatgccccaggagaaagacgttacaatttgagacacagtagagctgcaaatgctggcgctgcaacagcccaagcagacaaaaaaaaatcttcaaaagcaagaaataaacatacagtagaagcttctgctgatgacaccgaaggaacatcaaaggttgttgaggaacctgcccctgagagcaagagggtatctgaatctgcagactacgatgcatcccagttgcatgagttttcccaggttgaagttggtgatgcccatgctgtagacggtgagggtgctggtgaggaagatggtgatattttggatggccaagatgcactgcctgatgtgccaatgacaccttctggaagcgagtttggagcggaacaggaagatgaggacgatgatgattcagagaggcgaaaccaatcaatcagcaagaagctatggtcattcttcactacatgacttgctgaagaggtcgtcatgtaggttatttctagcttttgtggtttcgattcatgataccccattcttggaactgtaggtcgtgtgcttttggtgattatgtactagatctcccacttgattgtgcttctctcccgtgtaattgaaatatatttgtagtggacatagtttgatggcactcacagaagtagctgatgagatgtacaatggcgatgatggtatgccctgtaaggctgtaacaccagtagcttggtttgtaattgttcttttcccccggttcgtgttacttcgttgaccttattccggggaaatattttagtgctgtgatgatggtctaaatgtttgttcgcctattgaaactaaatacaatgaattagaataccacagtccacaggagcttcgg

SEQ ID NO: 199920 - DNA, 4072 bp, Zea Mays
gtgagggctcaccccgcagatccgttcggttttccattagcttggttcctgaggttcttggaattacgagggtttctgtcctgggcggtcaaaaattctgacttggaaaccctcggtgggccgcttcctggttcttgggagggagaggtgctttggttcctggatgagctgtgaaggaactgggagcaagaagaattgatgtttactccgcagggcaaaggatggaccggctggtcgacgccaactccggccaaccagcggagcggtggtggggctcctgctgcgtcggcgccccttggaaagggcaaaggaagggtcgccgagctcgagcaggagttgcatgaatatcagtacaatatggggcttcttttgattgaaaagaaagaatgggcagcaaaatttgaagaaatcagtgaagtgctgacacagaaagaggagatactgaagagggagcaggcggcacatctgaatgctatatcagagtatgaaaggcgggaggagaacatgcggaaagcactaggtgttgagaagcaatgtgtcgctgatcttgaaaaagccttgcgtgatatacgagcagagatagctgaggttaaatttacatctgagaaaaagataacagatgctcagtctcttgaggctagtttggaggaaaaatccttggagatcgagggaaaacttcatgctgcagatgccaaacttgcagaggcaaaccgcaagaagtctcaagctgaccgtgatttagaagaggcggaagctcgtcaacgtagactggagaaggagaaactgtattttgagacagagcggaaggcccgagaaaagcaacttaaggagcaggaggaatcactgcaggaatgggagaaaaagctgaaggaaagtcagaatagacttaatgagttgcagagatctataaatgagcgagaggagagagcaaataagaatgatcaacttttcaagataaaacaggacgaactggaggaggcacgaaggacagtggaggccgctaaagttactctgaaagtcaaagaggatgatattaacaaaagactaaatgaattacatttacaggaaaaggatgctgactcaaagcgcagtgcattggaagagcaggggaaaaaattggatgagagagaggcaaaggtcactaatagagaaaaggaggggctccagaagcttcttgaggatcatcaggtggagcttgaatccaaaagacgggattttgaattagaattagagagggaaaggaaatcttttgatcaaaatatgacacagaagcaagcggatttattgaaaagggagaaagatgttaaatctttggaggctaaactttctaaaagtgagcaggcattgaatgataagaagaaatcaatggaaaacttgcagaatgatcttgatgccaaatctaaggctctgaagagttgggatgaatcattgaaaaatgacgagaaaaggttactgaaagaaaagcagcaaatggatcatgaaagagaacaattggagacatacaaattggagcttgaaaagatcaaatcagcattagaagctgagaaggaaaaaatatcagaagagcagaataatctgaaactcacagcgcaagagaggcaggagcatagcttgttgatagcaaaacttaagaaggagattgaggaatacagaatgcgaagcaactccctatctgaggaaatggaggatttaaggaagcaacggcagaaatttgaagaagagtgggaacaactagacgaaaagagagccctccttgtagaggaggacaaaaggttgaacattgagaggatgaatttagaacggtggcgtgacaacgaagaaaaaaggttaaatgatatgaaactcaaaatggatgaagaatacaagcagcagctggagagtcttgagcgcaaggaaaaggctttgagtgatgatatgaagcacaagcaaatggaaaatgatgaatttctgaagggagaacgtgctgatgttcaacgtaaattgcaactcaaacggcatgaattggagatggagatggagcaaaaacaagccacgaaggagaaggaactggaagaaaaggaaaatgagttaaataagaaaatagattttgtggaaaataaactccgacatgcaattgagttgaatgagtccaagattgagaagttattattggagaaaagggaggtgcagatggaaagagaattactgctggaggaaagaaagaaaacggagactgacaaggcagatattagaagggatattgagagtctgcactcattgagcaagagtttgaaggaacgtcgagaggcatataacagggacaggagcagactcatcgaactatttgaaaagtacaaggcgtgcaaaaactgtgggatttctatttttgagggattggattctctgctgcttaaagacagtgctgaaattgagcatccaagtttggctgttgagggagatgatcatgccttgaccaccgatacatcaggtccagatacaggaacccttgttaattcaggtggtcgtttttctttgttacagaagtgttcaaggcttttcaagttctcccctagaaaaaagggtgagcagtcatcagaacaaccatcagagaggaatatatcttttggtgcaagactcgaggaagcaacacagagcgatggagattatgtgccaactcctgtctatgagatagcccacgattctttcaatgcagaggatgagctcccttctgacggtgaaaccagggagaatgaagagtctgaaaggcatgacatagctgataatgcccagatggagtcttctgttggtgtagcagataacagtatagatattctcggtactaagtcatttgatggtgctaacgacatggcagttgaagcaactattgtctctgttgatcaaaatggcgaggactctgtagttcctgctgaagcaggtgtagagcctgaaacatcagagcaaggtcggcgccagcaaaaccagagaggcagaagaaaaggtggtatgaaaagaacacggtctgttaatgctgtagttgaagatgctaagatgatacttggcgaggtttttgaggagaagactgatgatcagggagatacagtcaaggtgggtgctacacgaaagcggcggtttgctggagctacaataagtgaacaagatgaagaagggagcgaagcacattcagaaagtgtttcacttggagggcagcgccgtaagaggcggcaaactgctggggcagtgacagatgccccaggagaaagacgttacaatttgagacacagtagagctgcaaatgctggcgctgcaacagcccaagcagacaaaaaaaaatcttcaaaagcaagaaataaacatacagtagaagcttctgctgatgacaccgaaggaacatcaaaggttgttgaggaacctgcccctgagagcaagagggtatctgaatctgcagactacgatgcatcccagttgcatgagttttcccaggttgaagttggtgatgcccatgctgtagacggtgagggtgctggtgaggaagatggtgatattttggatggccaagatgcactgcctgatgtgccaatgacaccttctggaagcgagtttggagcggaacaggaagatgaggacgatgatgattcagagaggcgaaaccaatcaatcagcaagaagctatggtcattcttcactacatgacttgctgaagaggtcgtcatgtaggttatttctagcttttgtggtttcgattcatgataccccattcttggaactgtaggtcgtgtgcttttggtgattatgtactagatctcccacttgattgtgcttctctcccgtgtaattgaaatatatttgtagtggacatagtttgatggcactcacagaagtagctgatgagatgtacaatggcgatgatggtatgccctgtaaggctgtaacaccagtagcttggtttgtaattgttcttttcccccggttcgtgttacttcgttgaccttattccggggaaatattttagtgctgtgatgatggtctaaatgtttgttcgcctattgaaactaaatacaatgaattagaataccacagtccacaggagcttcgg

SEQ ID NO: 199921 - DNA, 3086 bp, Zea Mays
ctcttcctctctgtcctctcccctgctgccgccccctttcccaaatctggccgcacgacgcaccagccaccaaccgcacacaccccaaacttgaaggcacaacccgagcgctcgcccgcctcgcctctgcgccgcgtccggccgccggtagcgggccggtcacttaccggaggggctccagaagcttcttgaggatcatcaggtggagcttgaatccaaaagacgggattttgaattagaattagagagggaaaggaaatcttttgatcaaaatatgacacagaagcaagcggatttattgaaaagggagaaagatgttaaatctttggaggctaaactttctaaaagtgagcaggcattgaatgataagaagaaatcaatggaaaacttgcagaatgatcttgatgccaaatctaaggctctgaagagttgggatgaatcattgaaaaatgacgagaaaaggttactgaaagaaaagcagcaaatggatcatgaaagagaacaattggagacatacaaattggagcttgaaaagatcaaatcagcattagaagctgagaaggaaaaaatatcagaagagcagaataatctgaaactcacagcgcaagagaggcaggagcatagcttgttgatagcaaaacttaagaaggagattgaggaatacagaatgcgaagcaactccctatctgaggaaatggaggatttaaggaagcaacggcagaaatttgaagaagagtgggaacaactagacgaaaagagagccctccttgtagaggaggacaaaaggttgaacattgagaggatgaatttagaacggtggcgtgacaacgaagaaaaaaggttaaatgatatgaaactcaaaatggatgaagaatacaagcagcagctggagagtcttgagcgcaaggaaaaggctttgagtgatgatatgaagcacaagcaaatggaaaatgatgaatttctgaagggagaacgtgctgatgttcaacgtaaattgcaactcaaacggcatgaattggagatggagatggagcaaaaacaagccacgaaggagaaggaactggaagaaaaggaaaatgagttaaataagaaaatagattttgtggaaaataaactccgacatgcaattgagttgaatgagtccaagattgagaagttattattggagaaaagggaggtgcagatggaaagagaattactgctggaggaaagaaagaaaacggagactgacaaggcagatattagaagggatattgagagtctgcactcattgagcaagagtttgaaggaacgtcgagaggcatataacagggacaggagcagactcatcgaactatttgaaaagtacaaggcgtgcaaaaactgtgggatttctatttttgagggattggattctctgctgcttaaagacagtgctgaaattgagcatccaagtttggctgttgagggagatgatcatgccttgaccaccgatacatcaggtccagatacaggaacccttgttaattcaggtggtcgtttttctttgttacagaagtgttcaaggcttttcaagttctcccctagaaaaaagggtgagcagtcatcagaacaaccatcagagaggaatatatcttttggtgcaagactcgaggaagcaacacagagcgatggagattatgtgccaactcctgtctatgagatagcccacgattctttcaatgcagaggatgagctcccttctgacggtgaaaccagggagaatgaagagtctgaaaggcatgacatagctgataatgcccagatggagtcttctgttggtgtagcagataacagtatagatattctcggtactaagtcatttgatggtgctaacgacatggcagttgaagcaactattgtctctgttgatcaaaatggcgaggactctgtagttcctgctgaagcaggtgtagagcctgaaacatcagagcaaggtcggcgccagcaaaaccagagaggcagaagaaaaggtggtatgaaaagaacacggtctgttaatgctgtagttgaagatgctaagatgatacttggcgaggtttttgaggagaagactgatgatcagggagatacagtcaaggtgggtgctacacgaaagcggcggtttgctggagctacaataagtgaacaagatgaagaagggagcgaagcacattcagaaagtgtttcacttggagggcagcgccgtaagaggcggcaaactgctggggcagtgacagatgccccaggagaaagacgttacaatttgagacacagtagagctgcaaatgctggcgctgcaacagcccaagcagacaaaaaaaaatcttcaaaagcaagaaataaacatacagtagaagcttctgctgatgacaccgaaggaacatcaaaggttgttgaggaacctgcccctgagagcaagagggtatctgaatctgcagactacgatgcatcccagttgcatgagttttcccaggttgaagttggtgatgcccatgctgtagacggtgagggtgctggtgaggaagatggtgatattttggatggccaagatgcactgcctgatgtgccaatgacaccttctggaagcgagtttggagcggaacaggaagatgaggacgatgatgattcagagaggcgaaaccaatcaatcagcaagaagctatggtcattcttcactacatgacttgctgaagaggtcgtcatgtaggttatttctagcttttgtggtttcgattcatgataccccattcttggaactgtaggtcgtgtgcttttggtgattatgtactagatctcccacttgattgtgcttctctcccgtgtaattgaaatatatttgtagtggacatagtttgatggcactcacagaagtagctgatgagatgtacaatggcgatgatggtatgccctgtaaggctgtaacaccagtagcttggtttgtaattgttcttttcccccggttcgtgttacttcgttgaccttattccggggaaatattttagtgctgtgatgatggtctaaatgtttgttcgcctattgaaactaaatacaatgaattagaataccacagtccacaggagcttcgg

SEQ ID NO: 199922 - DNA, 4037 bp, Zea Mays
agcactgccctcttcctctctgtcctctcccctgctgccgccccctttcccaaatctggccgcacgacgcaccagccaccaaccgcacacaccccaaacttgaaggcacaacccgagcgctcgcccgcctcgcctctgcgccgcgtccggccgccggtagcgggccggtcacttaccgggcaaaggatggaccggctggtcgacgccaactccggccaaccagcggagcggtggtggggctcctgctgcgtcggcgccccttggaaagggcaaaggaagggtcgccgagctcgagcaggagttgcatgaatatcagtacaatatggggcttcttttgattgaaaagaaagaatgggcagcaaaatttgaagaaatcagtgaagtgctgacacagaaagaggagatactgaagagggagcaggcggcacatctgaatgctatatcagagtatgaaaggcgggaggagaacatgcggaaagcactaggtgttgagaagcaatgtgtcgctgatcttgaaaaagccttgcgtgatatacgagcagagatagctgaggttaaatttacatctgagaaaaagataacagatgctcagtctcttgaggctagtttggaggaaaaatccttggagatcgagggaaaacttcatgctgcagatgccaaacttgcagaggcaaaccgcaagaagtctcaagctgaccgtgatttagaagaggcggaagctcgtcaacgtagactggagaaggagaaactgtattttgagacagagcggaaggcccgagaaaagcaacttaaggagcaggaggaatcactgcaggaatgggagaaaaagctgaaggaaagtcagaatagacttaatgagttgcagagatctataaatgagcgagaggagagagcaaataagaatgatcaacttttcaagataaaacaggacgaactggaggaggcacgaaggacagtggaggccgctaaagttactctgaaagtcaaagaggatgatattaacaaaagactaaatgaattacatttacaggaaaaggatgctgactcaaagcgcagtgcattggaagagcaggggaaaaaattggatgagagagaggcaaaggtcactaatagagaaaaggaggggctccagaagcttcttgaggatcatcaggtggagcttgaatccaaaagacgggattttgaattagaattagagagggaaaggaaatcttttgatcaaaatatgacacagaagcaagcggatttattgaaaagggagaaagatgttaaatctttggaggctaaactttctaaaagtgagcaggcattgaatgataagaagaaatcaatggaaaacttgcagaatgatcttgatgccaaatctaaggctctgaagagttgggatgaatcattgaaaaatgacgagaaaaggttactgaaagaaaagcagcaaatggatcatgaaagagaacaattggagacatacaaattggagcttgaaaagatcaaatcagcattagaagctgagaaggaaaaaatatcagaagagcagaataatctgaaactcacagcgcaagagaggcaggagcatagcttgttgatagcaaaacttaagaaggagattgaggaatacagaatgcgaagcaactccctatctgaggaaatggaggatttaaggaagcaacggcagaaatttgaagaagagtgggaacaactagacgaaaagagagccctccttgtagaggaggacaaaaggttgaacattgagaggatgaatttagaacggtggcgtgacaacgaagaaaaaaggttaaatgatatgaaactcaaaatggatgaagaatacaagcagcagctggagagtcttgagcgcaaggaaaaggctttgagtgatgatatgaagcacaagcaaatggaaaatgatgaatttctgaagggagaacgtgctgatgttcaacgtaaattgcaactcaaacggcatgaattggagatggagatggagcaaaaacaagccacgaaggagaaggaactggaagaaaaggaaaatgagttaaataagaaaatagattttgtggaaaataaactccgacatgcaattgagttgaatgagtccaagattgagaagttattattggagaaaagggaggtgcagatggaaagagaattactgctggaggaaagaaagaaaacggagactgacaaggcagatattagaagggatattgagagtctgcactcattgagcaagagtttgaaggaacgtcgagaggcatataacagggacaggagcagactcatcgaactatttgaaaagtacaaggcgtgcaaaaactgtgggatttctatttttgagggattggattctctgctgcttaaagacagtgctgaaattgagcatccaagtttggctgttgagggagatgatcatgccttgaccaccgatacatcaggtccagatacaggaacccttgttaattcaggtggtcgtttttctttgttacagaagtgttcaaggcttttcaagttctcccctagaaaaaagggtgagcagtcatcagaacaaccatcagagaggaatatatcttttggtgcaagactcgaggaagcaacacagagcgatggagattatgtgccaactcctgtctatgagatagcccacgattctttcaatgcagaggatgagctcccttctgacggtgaaaccagggagaatgaagagtctgaaaggcatgacatagctgataatgcccagatggagtcttctgttggtgtagcagataacagtatagatattctcggtactaagtcatttgatggtgctaacgacatggcagttgaagcaactattgtctctgttgatcaaaatggcgaggactctgtagttcctgctgaagcaggtgtagagcctgaaacatcagagcaaggtcggcgccagcaaaaccagagaggcagaagaaaaggtggtatgaaaagaacacggtctgttaatgctgtagttgaagatgctaagatgatacttggcgaggtttttgaggagaagactgatgatcagggagatacagtcaaggtgggtgctacacgaaagcggcggtttgctggagctacaataagtgaacaagatgaagaagggagcgaagcacattcagaaagtgtttcacttggagggcagcgccgtaagaggcggcaaactgctggggcagtgacagatgccccaggagaaagacgttacaatttgagacacagtagagctgcaaatgctggcgctgcaacagcccaagcagacaaaaaaaaatcttcaaaagcaagaaataaacatacagtagaagcttctgctgatgacaccgaaggaacatcaaaggttgttgaggaacctgcccctgagagcaagagggtatctgaatctgcagactacgatgcatcccagttgcatgagttttcccaggttgaagttggtgatgcccatgctgtagacggtgagggtgctggtgaggaagatggtgatattttggatggccaagatgcactgcctgatgtgccaatgacaccttctggaagcgagtttggagcggaacaggaagatgaggacgatgatgattcagagaggcgaaaccaatcaatcagcaagaagctatggtcattcttcactacatgacttgctgaagaggtcgtcatgtaggttatttctagcttttgtggtttcgattcatgataccccattcttggaactgtaggtcgtgtgcttttggtgattatgtactagatctcccacttgattgtgcttctctcccgtgtaattgaaatatatttgtagtggacatagtttgatggcactcacagaagtagctgatgagatgtacaatggcgatgatggtatgccctgtaaggctgtaacaccagtagcttggtttgtaattgttcttttcccccggttcgtgttacttcgttgaccttattccggggaaatattttagtgctgtgatgatggtctaaatgtttgttcgcctattgaaactaaatacaatgaattagaataccacagtccacaggagcttcgg

SEQ ID NO: 199923 - DNA, 432 bp, Zea Mays
cctccctcccaacccccgcgtcagtccttccgcgccgcaatcctccgtccatgccaggtccaacgccgtcttccacgccgccggcggcagccgcaaaccccagccacaactcgaggcggaagcggaagcccaggccgaaaacagcgcccccctctgccctaaatcctaactgggcgctgctccagtccaagctcccccaccgccccgctgcgacccacctcggcaagcgcaagcacgacggtgccactccggcgcccgcggagccgtctccaccacccacagcgcaggaggtcagactcgagccaacctccgacgataccagcttgactaaggtggtggcgattgattgcgagatggtcggggtaggatttgatggcggtaaaagcgccctcggcagggttaccttgagagcgcttgggatttggagtgatg

SEQ ID NO: 199924 - DNA, 308 bp, Zea Mays
gcgaccccactgggccatggcttctttccccgtgacacctctgtcgggatcgcgagggatgcgttcaacacgttcttcagtgaaacgggcgcagggaagcacgttccaagggccctgtttgtcgacttggagcccactgtgattgatgaggtgaagaccggggcgtaccgccggcttttccatcctgagcagctcatctcacacaaggaagatgatgcgaacaacttcgcccgtggacattacacaggtgtgacatcttgtcactgttatgcaggctcaaaatgttcttggaaacaaggggactgaaa

SEQ ID NO: 199925 - DNA, 1623 bp, Zea Mays
gacgggggagaatgttgccgagccacgtggcaatctatctcacagcctgaatcagaatcagcccgcgcctcccctcccacctccactcgtttcgctcctctgaatcccccccgggccccggcacggaattccccccggcacaccccccaaggccaccggacgccagcagccccgcccccgcccacacctacgtacgagcgcaatgctggcggcgtccctcaggccggggccttcgctcgcggccttccccggtaccgcccagaggagcccagttcctttcctccccttccctgcccgcctccaccaccggcccgtcctcctctccgcgaccgccgagggaaccggcgcccccgccggccagggagacgcctcggctgccccgctcgacgagttcgctgcggactgggaatccgcgcgcgcgtgcaaggaccaggggaggatcttctcgctgccggtgctgagggccaacagcggcgggctcatcgtcaggttcaactccctgcaggggttcgtgcccaaccctctcctcagccccgcgcactggtgtaaagaccccaaaaggcccatccaagatgttacgaaagacctagtaggaacgtccatttctgtcaaggtggctgaagtgaatgaggaggaaaagaaacttgtcttctctgagaaggatgctagttggtcaacatactcttcccgaataaagattggcgacatctatgatggaattgtgggctcagtgttccactatggtgcatttgttcacctgcgatttcctgatggattatatcatcttactggccttgtacatatctcggaggtgtcttgggatcttgtccaagacgtcaaggattttctaaacgaaggggatgctgtcaaggtcatagttgtgaacattgatatgacgaagtcaaggatagctttatctatcagacaactggaggaagatcctttattggaaacattggacaaagttatccctttggaagctgatcaatcacctaatcgaatgatgtctccttcggaagttgaacttctgccaggacttgatggtatatgcaatgaactattgcaagaggatggtataacagacgtacagtttgggcgccaggcattggagaaacgtgtcgtttcacaagatttagagctttggatttcgaatgttcaagctaaggacaacaggttcacacttcttgcacgagctgggaggcaggtccaggaagtgtatttgaccacttccctagaccaggagggcataaagaaagccgtgcaaagagtgctggggcgtgttccttgaacccgacacgcagcgtgtagaaaccgattttctaactaaagcattacaaggaatcaaaagtacgagcgaacagcctgaaacatttgccactgtcagtctgtcacaacacccggctaaatttttctctgttggatactacgacaaccaaaaatctgtaaatatttgcagtcctacacgagtaggttaggcaccttgggccctcccttcaaactaagacgttgctaagcagtggttctgtgtatttgctggggtctgtcttttgatgccatgtgcacttgtcatactgtgacttcagttcactgcttgcacttggctgaactcccgaggtaacttgt

SEQ ID NO: 199926 - DNA, 1006 bp, Zea Mays
aaaactcttttgaacacgtctaagaatgtacggacaaggacctgctctgtttctcggcgagtttttcccacttccacctctccgtccctgccgagctgcggcggccgcatcgactgttagggcgaaaatccgttctagtctctcggcgattttcggcaggcggaggcagcaggatctgcgggaaggatttcgtgtcgagatggctgggcgcaaggaaactgcactcgacctggcgaagttcgtcgacaagggcgtccaggtgaagctcaccggcggccgccaagtcatttacacaacctcttggcgtgcaacttccttttgtgttggaatcgttcatctatccatcttaggcatacttgagctagttgctgatgaatgttgacaggaactctaaagggatatgaccaactactcaacttagtgctagatgaagcagttgagaatgaaagagagcaagatgatccattgaagctatcagggaaaactagacaacttggcctcattgtgtgcagaggcacggcagtcatgctggtctcaccgactgatgggactgatgagatcgccaaccctttcctcgcggacggagcatagcttgcacccctcggaacaatatgtccctgtgggaaaagaaccggtttctcgtgtatctgttgtatcgtgtgcagctgtgcggcttattagtggtgtttaaatgcactagatctaatagttagtgactaaaattagttggagacatccaaacatcctagctatgagttcaattattagctatttttagtaaattagttaataattagctatctatttgttagctagctaaatccactagtatttttttagccaactaactattaactatagtacatttaaacaccccttagaatttagggacaaaatcagatctcacgttagggttgtttgatagatatatttagcccgtaagtttaaggggctgtttgaattcaaagttttttaatactatggtattttgggtgtttggtttcta

SEQ ID NO: 199927 - DNA, 2037 bp, Zea Mays
cgcacttttcccgcccatacgcaaggaatggccggcgccgtctccgtctccgctcaccggcggcaatggcggtacacgtgggaagccctaaaccatcttcccctcctccgcctctacctcctaccccgcgccgcgctgcccttccgcatcccctcggacctccgcgccgacctccgactccagggctctctcctccacctgtccttctcgctccccggggacggggctgccgtcgcgctcagggtccccgtcccgagggtgctcgtagacccttccgcccccgtagagtgccgcgccgccgccgcgggggaccacctcgagctccgcctcgcgctcgtcctgcccgtcgaccaccctgtcgtcgccgccgcgttccctccaccccccggcgcggagcctccggcttctctagcgctgcgcgatatttgaagagtttatctactggagacgttcacttgtattgcaaaaattgttcgtcaaggttgacaaaacagccactaaggaaaatcatggaaatgccatctgtagattgggtagatgtggctgacaattgggttggtggatgttgcacctcatttggtggtgcaggcgagaaacttgtatctcagtttattagggcatatggtcgtttagaaggaacaagtctactggatgcaacttccattactgtagaaacagacaatcttgaaacagatttagtgtctcaggtagcttgttcagcacttagtagacattttgttgctataaaagaagatatatttaatgttagtgtagaaaaagatcataccactgggaagataaagttgaagaattcagaagagcaagcaaatatcacagctactcatgcacaaccacctattattttggaagaggggcctagtgttagttgtagtgaaacaaacggagtcactcagactaatcagcctggcatttctcagacagaagctgatactgatgcatactttgagaagtctgaaaatgactgttgtgttgagaaagtggggaaatctaagaaagaggttgatttgttgctggtagatccatgccgttgctgttgtgtcaatggatacagtgagaaagctgaagataacccttcacagttgtccttggtcaatgagaaaaagcagaatatgttggagattaaaagagattacaaattaacaaaaactatttctcttggtagtagcttcattgttaaagcatctaaccttttgaatgattttgagtgggttgaacttctctgtggtcaatgttcatcacctcttggctcatacccttctcagtgttcgcttggtccagctgatggccgcctacgactcttcaagtgctacacatctacagaaattcctgtaacagggcctcatgatgtgtttagggggcatacattggaaagagtttttgtgaatctgttgcttgaagttgcagaagacgaaatatcttttcgcacattagtcagagatttgaaaaccaaaaggcccatgctgcaattagttcttcttagttcaaaagcatggttatcttctggttgctgttatgaaaatgatatcgatggttcacatggaacaacagatctgcagccaagtgttaaactcttgtattctgattatagcaatgcttcagaagcagatttaaggatagtagaagcgtgggcatccaaatatcgggctgaagagctgtacatgatgaagcgtcagatagacgaacttactgaatgcctaagctcaggaaggaacaactttccagtttcttgttcttcccttgaagggatgcggctctcatcgcttaggcgctgacttcagaatatgacatggaaattgtgcctggactgatcatatttttgtactgatcaaaggagtctacagcatagaatcctgatggcatacctgatcatcctcggtgtcttttgagctttcagcaagctacctaataatttcttctttaaaatttaagatggcatgccttgtcctctgctctgaaaagacttggtggcatccgaaatggagcaatggcttatccaaaactttcagcttctctggt

SEQ ID NO: 199928 - DNA, 1275 bp, Zea Mays
ttgaacaatgctgagtccactatgtcctccatttcatgttatttttcaccccaagtcaaaaatgatcatgcaaattaaggatatagatgacaaacagaatgtgtggcgccagttataactcttatccaactctcactatgctttggtaacaacaaaacaagcctttagagtaatttatgtatgcgacagcatatatggcgggccttcacatttctggaccttgtgtgtcacggtaatcagttctgcattattcatagttatgcttctagtttgttgttttgacaaatggcatgctttctccttcaggcttacgatttcactcgaatattgagctccttttatttcaagggctacactttactgacaaaaatacagcgcatcgaatggaacaataggggacctattacattccgttattcgataatatccacctctgcgttgggggtttctgtcggctacttcatcactgatcttgcaatgatcttctggctgtatccttcccttggtggaatggaatatgtcctccaccatactgtttccctggttgcaatagcttacacaatgttgtctggggaagggcagttttacacatacatggttctcatttcagagacaaccacccctgaaatcaacttgcgatggtttcttgacactgctggactgaagaaatcaagtgcttacttggttaatggaattctgatgtttgttgcatggctggtggcaaggatatttttgttcatgtatgtattttaccacatctatttgcattacggtcagataatgcagatgcatgcctttgggtactacctgacatttgttgtgccatcagtgctctttgtaatgaacacaatgtggttcatgaagatcttaaaaggtgtgatgaaaacactggcaaaatggccatgacgtggatgacgccaagaggatctcagaactatcaacaggatttcgtctttctggcatcattacgtgaccttaatctgtgaagttatggatatcagggtaactagagaaacataatatgtaaagtattagcaaacaagctatattaggtgaaattgccctattttcagtcgagctggaagttcataaccggtttggtttgtaccggagatccagcacgctgttctgcttaccccacctgtgccatgtgtatatctgaagagaattttaatgggtggtttgttcaacagtacaatcccagtgctgtgtactccctccgtttctttttacaagtcgtttccaacagccaatctataaatatcggcgacatct

SEQ ID NO: 199929 - DNA, 2321 bp, Zea Mays
tagaggaagaggagcaggagacacattaaattgagcaagggagagaggggcgaccctgagcctgagctgcacacctcatcatgacagcgcagcgcagcgcagactgtggcagcagagcagagtgtgcgcccagcgtcctcgtggtgagggagcgccagcattgcaagcggctggttctctgctgaaatagaattcaaggcatggccagctcgccctcggcggacagcaggaagaagaagcggcggcggcggcggcggaggaggctggcggcatgctgctcatcgagacctgctgccggcgccgctcaaggtcagtgtcagtgcggctcctctagccccggtggcggcggcggaagcggcagcctcgtggcaagaacaccgcgcgcgttctctagctgctcaagcgccgccgcctcgtctgcctgcgcgccggcggcggccgtccatctcggcacccagcacaagctgacggcgctcctcgtcgcgctcgcgctcctcctcgtcctccctcgccctcctctcgtggcaggggtcccggtgtcgccccgcaggatggcgaggatccgcagccacgtggagaggatcaacaagacccccgtgcgctccatccgggtaagaacacgacaacagcgcggggaggccgaaccaatcgatcggttattccaacgatccatccatggatgaagcgacaacaactgtgtttttgtttttcgtttttctgtctgtctcccggttgacgaccacgcatacatacatacatgcatggctgatggacggtggggggtcgtcggctatcgtttgtttcagagccaggacggcgacaccatcgactgcgtggcggcgcacgagcagcacggcctggaccacccgctcctcagggcgcacgccgtccagacggagccgcccgaggcgccgaggggcggcggcgcgctctccttcccgtctggctctgcgacgaacgggagcgggagcggcagcggcagcggcgcaggcaaggacagcaggcggggcgcgtggcagacgtggcaccacggcgggcactgtccccggggcacggtggccatccggcggacgagcgccgaggacgtgctgcgcgccggatccgtctcccgcttcggccgcaagaggaggcaccggaaggccgccgccgccgccgccgccgccgccgccgccgcgcgcgcggcctacgcgccggacgtcatcaccggcaacgggcacgagcacgcgatcgcgtacacggcgccgtcgcagcagccggtgtacggcgccaaggccaccatcaacgtgtgggatccggccatccaggagtccaacggcttcagcctctcccagctctgggtcctctccggctccttcaacggctccgacctcaacagcatcgaggcaggatggcagtcaggtcagccctgagctgtacggggacagcaggccgaggctcttcacgtactggacaagcgacgcgtacgaggctactggttgctacaacgcgctgtgcccggggttcgtgcagacgagctcccgcatcgccatcggcgcgtccatctcgccggtgtcgtcggccggcggcgcgcagtacgacatgacgctgctggtgtggaaggacccgaagctgggcaactggtggctcagctacggggaccagctggtggggtactggccggcgcagctgttcacgcacctgtcggaccacgccaccatggtggagtggggcggcgaggtggtggacaccaggcccggcggggcgcacaccgccacgcagatgggctcgggccgcttcgccgccgagggcttcggccgcgccagctacttccgcaacctggagacggtggacgccgacaacagcctggccgaggtggcgctcgacgccatccagacgctggccgaggaccccgcctgctacgacatacgcaaggcctacgacgacgacgacgacgacgacgacgacggccagcactccgcccgcggaggctggggaacccacttctactacggtggcccgggacacaacccggcatgcccctgatggccggatctctgtcctctgatggagttgtgacgatgagcgcgcgcgcggcacctgaccggccgtacgtaccatggatggcatgcatttgatttaacttccgcctatatatgtgtacgtggccaaattttgacgtacgttcgcacgtgcctttgctagtatttcaagctttcgctaattctacctgtaaggacttgcaatatgtaattaactgttgatttatctgttatttcaatcgatcccaaggatcgtcccagatttaattttcctcgaaacatagacaatccatcgatgctgcg

SEQ ID NO: 199930 - DNA, 1692 bp, Zea Mays
tttgacttcatgtgccttattttagaaacttgagctcacaaactttatcttatttggtctttatatggtggaatcatgttattttataatctctgttcattcagtcagtcgttatgaactctcatctaatcgctcacttcattggtcgtgttgtatcaagacatattgcatggagtaaacaataacctcagttagccaaatcaaaataatattatacagagagcggagacaatcaataaaaaatcttaaatttttttgatagataatttatgtgcgtattgttgtaagccgtcgtaatagacgggcaaccgactagttggccatctatacacgtgcgcctccagcgagtccacgctgcacgccagacgccacccttttcccatctcccgtggccagccagacaaacaaatctctcgcgcctcccactcctccccgccactcgccgccagcgaccaaccatcgcccgcccagcagcagcacggtcccacgccaggactcgacccacgcgcggctagctaagctcccgccgccatgatcacggccctgcaggtctccggcggcggcctgccgctcctgttcgcccggcgccggcgccgggcgttccggccgccccaagcggtggcgtccgacgccgccgccgccgccgagggcacggcgagggaggatggcgggaaggtggccctgggcgggtccggcgtagccgtcaccaagctcggcgtcggggcgtggtcctggggcgacaccacctactggaacgagttccggtgggacgatacgaagctgaaggcagccaaaggagcgtttgacgcgagcatcgactgcggaataaccttcttcgacaccgccgaagtgtacggagcaggggtatcgggagcgattaattcagagagtttactaggaaggtttatcaaggagaggcagcggaaggagcaggtggacgtggctgtcgcgaccaagttcgcagctcttccatggaggttcggtcgtgggagcgtcatctgcgcgctcaaggcctcgctggatcgccttggcgtctcttcggttgagctctaccaactccattggccagggatatggggcaacgaagactacctggacggccttggagacgctgtggagcaagggcttgtgaaggcagtcggggtctcaaactacagcgagaaacgtctccgagacgcgtacgagcgcctcaggaagaggggggtcccgctcgcctccaaccaggtgaactacagcctgatataccggaacccggaggagaacggggtgaaggcggcctgcgacgagctcggcgtcactctgatcgcgtactccccgatcgcccaaggtgctctgacgggaaagtacacgccggagagtcctcctaaaggccctcgaggacggatatacacgccggagttcctgacgaagctccagccacttatcaaccggatcaaggagatcggaggaagctacgggaggacttcaacccaggtggtgctgaactggctggtgtgccagggcaacgtggtgccgatcccgggcgccaagaacgccgagcaggcgcgggagttcgctggcgctctcgggtggagcctggcgcccgacgaggtggaggagctccggtccatggcgcgccaggtcaagcccgtcatcggcttcccagtggagaagctgtgaccacccccatggcactggttgcatgtacacgag

SEQ ID NO: 199931 - DNA, 920 bp, Zea Mays
cgtttctccgctctcgccgcatacgaagctgaaggcagccaaaggagcgtttgacgcgagcatcgactgcggaataaccttcttcgacaccgccgaagtgtacggagcaggggtatcgggagcgattaattcagagagtttactaggaaggtttatcaaggagaggcagcggaaggagcaggtggacgtggctgtcgcgaccaagttcgcagctcttccatggaggttcggtcgtgggagcgtcatctgcgcgctcaaggcctcgctggatcgccttggcgtctcttcggccagggatatggggcaacgaagactacctggacggccttggagacgctgtggagcaagggcttgtgaaggcagtcggggtctcaaactacagcgagaaacgtctccgagacgcgtacgagcgcctcaggaagaggggggtcccgctcgcctccaaccaggtgaactacagcctgatataccggaacccggaggagaacggggtgaaggcggcctgcgacgagctcggcgtcactctgatcgcgtactccccgatcgcccaaggtgctctgacgggaaagtacacgccggagagtcctcctaaaggccctcgaggacggatatacacgccggagttcctgacgaagctccagccacttatcaaccggatcaaggagatcggaggaagctacgggaggacttcaacccagggcaacgtggtgccgatcccgggcgccaagaacgccgagcaggcgcgggagttcgctggcgctctcgggtggagcctggcgcccgacgaggtggaggagctccggtccatggcgcgccaggtcaagcccgtcatcggcttcccagtggagaagctgtgaccacccccatggcactggtatatatcaggtgtatagtaggactgtaggttgcatgtacacgag

SEQ ID NO: 199932 - DNA, 420 bp, Zea Mays
caaaaacaattaattaacacacaaactacctggacggccttggagacgctgtggagcaagggcttgtgaaggcagtcggggtctcaaactacagcgagaaacgtctccgagacgcgtacgagcgcctcaggaagaggggggtcccgctcgcctccaaccaggtgaactacagcctgatataccggaacccggaggagaacggggtgaaggcggcctgcgacgagctcggcgtcactctgatcgcgtactccccgatcgcccaaggtgctctgacgggaaagtacacgccggagagtcctcctaaaggccctcgaggacggatatacacgccggagttcctgacgaagccacttatcaaccggatcaaggagatcggaggaagctacgggaggacttcaacccaggttgcatgtacacgag

SEQ ID NO: 199933 - DNA, 624 bp, Zea Mays
attaattaacacacaaactacctggacggccttggagacgctgtggagcaagggcttgtgaaggcagtcggggtctcaaactacagcgagaaacgtctccgagacgcgtacgagcgcctcaggaagaggggggtcccgctcgcctccaaccaggtgaactacagcctgatataccggaacccggaggagaacggggtgaaggcggcctgcgacgagctcggcgtcactctgatcgcgtactccccgatcgcccaaggtgctctgacgggaaagtacacgccggagagtcctcctaaaggccctcgaggacggatatacacgccggagttcctgacgaagctccagccacttatcaaccggatcaaggagatcggaggaagctacgggaggacttcaacccagggcaacgtggtgccgatcccgggcgccaagaacgccgagcaggcgcgggagttcgctggcgctctcgggtggagcctggcgcccgacgaggtggaggagctccggtccatggcgcgccaggtcaagcccgtcatcggcttcccagtggagaagctgtgaccacccccatggcactggtatatatcaggtgtatagtaggactgtaggttgcatgtacacgag

SEQ ID NO: 199934 - DNA, 1603 bp, Zea Mays
ggcctcggcgcaacggcccttcccgcgcgactgcacttgcacacgcggcggagaaatgaaagcgccagcggctagtggataagctaagctctccctctcgctgagccggctgttgctctccccacaaccccgcgcgcgggggagcgataaaccctagtcttcgccgtcgtcgcaggaggacccgcgatgtcgcacttcgggaggtcaggcccgccggacatccgcgacaccttctcgctcctcgtcctcaacatcagcttccgcaccacggccgacgacctcttcccgctcttcgagcgctacggcaaggtcgtcgacgtcttcatcccgagggaccggaggaccggggactcgaggggtttcgcgttcgtgcggtacaagtacgccgacgaggcgcagaaggctatagatcggctcgatggccgtgatgtggatgggagaaacatcatggtgcagtttgcaaagtacggccccaatgctgagccaatccgcaaaggaagggttaaagagggggttgagaaatcacaagacagatcaagaagccgcagtccaaggccaaggcacagagatagagatcatagaagccaaagtcgcagcaggagcagagaaaggcatgtccgtgatagagacaggggctatcgtcgtcggagcagaagtagaagccgaagtcttagttcaagccctgacaacagaagtcatcatagagcaagagatgatgataagcgcaagagcatgagtaagagcaggagcaggagcaggagcacaagtagaagccgctcatactataggtgcctcaataccaatatgcagttccaccatttggttactctttacatgttccgaaattctaatttgatttcttccaacagtgcttcacctgcccggcacagtgctagccctcgcaagagcccaccgccacagaggagccccactcctgcaaagcatgccaatggaaaagtagcacctctgtcacgctgtgtttctccattaccgaagcgtgcaacctcccgcagcccaggcagtgatggcaagccttctcacggagtcacgggattgcagaaccttgagaaggttgattgagcacaatggaagtagcagtctgcaatcaaccgcgatccaagttatctgttcgtgagatgggttgctgtttactggtagaacggtattgcacgggaccaactatggtggatgatgtcttgctgtcattggtgttgatatggcaatggtgcagctgatgtgacgatgcagatgccgatgctgctgacagtgaccatcttgtttgcacaatgatcccttacaagttatgttggttcttatccccccttctcgcagatgcttttgcatcagtgctagttggaacatggtgttgaggggttaattatgacgggcatgggtcctgtttatcatgtggtggtgttgagtgactccttttgctatctgtggccctagctttattcattatttgaagcaaccattaataaaatccatgaactcaattattaatttgttagccgaaacgctatatacaggtgacgttgtagtcgtaagcatgtagcaatgtattgactttttggtgattgaattgatagttttttgaaacaat

SEQ ID NO: 199935 - DNA, 1537 bp, Zea Mays
cagaaaaaggcctcggcgcaacggcccttcccgcgcgactgcacttgcacacgcggcggagaaatgaaagcgccagcggctagtggataagctaagctctccctctcgctgagccggctgttgctctccccacaaccccgcgcgcgggggagcgataaaccctagtcttcgccgtcgtcgcaggaggacccgcgatgtcgcacttcgggaggtcaggcccgccggacatccgcgacaccttctcgctcctcgtcctcaacatcagcttccgcaccacggccgacgacctcttcccgctcttcgagcgctacggcaaggtcgtcgacgtcttcatcccgagggaccggaggaccggggactcgaggggtttcgcgttcgtgcggtacaagtacgccgacgaggcgcagaaggctatagatcggctcgatggccgtgatgtggatgggagaaacatcatggtgcagtttgcaaagtacggccccaatgctgagccaatccgcaaaggaagggttaaagagggggttgagaaatcacaagacagatcaagaagccgcagtccaaggccaaggcacagagatagagatcatagaagccaaagtcgcagcaggagcagagaaaggcatgtccgtgatagagacaggggctatcgtcgtcggagcagaagtagaagccgaagtcttagttcaagccctgacaacagaagtcatcatagagcaagagatgatgataagcgcaagagcatgagtaagagcaggagcaggagcaggagcacaagtagaagccgctcatactatagtgcttcacctgcccggcacagtgctagccctcgcaagagcccaccgccacagaggagccccactcctgcaaagcatgccaatggaaaagtagcacctctgtcacgctgtgtttctccattaccgaagcgtgcaacctcccgcagcccaggcagtgatggcaagaaaacagccttctcacggagtcacgggattgcagaaccttgagaaggttgattgagcacaatggaagtagcagtctgcaatcaaccgcgatccaagttatctgttcgtgagatgggttgctgtttactggtagaacggtattgcacgggaccaactatggtggatgatgtcttgctgtcattggtgttgatatggcaatggtgcagctgatgtgacgatgcagatgccgatgctgctgacagtgaccatcttgtttgcacaatgatcccttacaagttatgttggttcttatccccccttctcgcagatgcttttgcatcagtgctagttggaacatggtgttgaggggttaattatgacgggcatgggtcctgtttatcatgtggtggtgttgagtgactccttttgctatctgtggccctagctttattcattatttgaagcaaccattaataaaatccatgaactcaattattaatttgttagccgaaacgctatatacaggtgacgttgtagtcgtaagcatgtagcaatgtattgactttttggtgattgaattgatagttttttgaaacaat

SEQ ID NO: 199936 - DNA, 3508 bp, Zea Mays
aacagtccaggtcccacaccggaggcatatttcttatatcagtgatggctaatgggtcgtaggaggagcagaaatatttatgtctccaatgatcctgtggcggtggaccaaatgtactgctgaatgcttcaggcgcaggaagccttttcactgtgaagttgcttgcccctactctaagatcgccgcttctgttcagtgtgatgactcaagtggtgatgaaaagctgaactttgctcctgataatgagcctatccagaaatggcaccggtctttgagctctgacagtgttgtgcagacactccgctgtttaaggaggaaacctgcagttgcattcacctactttaaagatacacatagccttggttttcaccatgacttctcaacctactcagagatcatacaaattttgtcccattcattccaggggaagatgctggtatccttgtttcgtgagattctcttgggaactggtagtggtggccctgaaatcttaccgctcattgatcacttgagaaaaacatgtgccacttctcacgtactctcgtatgcagtcaattgcttaatcaaggcatacaccacctgccacgatgcacaagaaacagtagagatgttttgttgcctttgcaggcttggatttgttccaacactttgggctcgcaactttctgctcaaatttgtatctcagagcagtggtgattcacatatggttgtcgcagcttatgatcgaatgaagtgctttcagttgacactggatgctcaatcattgaacatagtcactagatcactttttcaagcaaacaaggcagacgaagcattccaaatgtaggtcgggatgattgaaatgggagtgaaattagatgtacatggattctcatcatttataattggcctttgtgattgtggaaagtttgatctagcttataacatggtaagaagatatgctgttctacaagagatatcccaagagagggttccaattgaagccatggcttataatatggtaatcgatggactatgcaaagaaatgaaactgaaggaggctgaaaaggtcttggagatcaagaccagacatggatctgcccctgatctatatagctatagctatctcattcatagtcattgcaaaatgggtaacctagagaaggcatggtatcatgttgaagacatggtatcccatggcattgagataaattgttacattgttgcttaccttctacagtgcctcaggaagttaggcatggtatctgaagtaattgtgcacttccagaaatttagagatttaggggtccatcttgatggcgtgctttataacattgctatggatgcttattgcaagcttgggaacatgaatgaggcagttaagctactgaatgaaatgatggctggaagtttggtaccagacaaaatccactatacatgcctgatcaatggttattgtctgaaaggagaaacagaaaatgcctggcaagtatttgaggagatgctgaaggcaaatataaaaccagatgtagttacatataacatattggccagtggatatagcaggaatggccttgttatgaaggtatttgacattctagagcacatgatggatcaagggctcgaacctaattcactcacctatggtatagctattgctggtttttgtagaggaggcaacttgagcgaagcagaggtgctgtttaatatagtagaagaaagagggatagataatatcaatgtgctgtacggttctatggtttgtggttatttgcactcaggctggactgaccatgcttacatgctttttcttagagttgctaaacaaggaaatatggtggatcgtttgtcatgttcaaaattgataaacggactctgtagggatgaaaaggttggagaggcttcaactgtatgtaaaatgatgcttgaaaagaatgttgtccctgatgtaatttcatatagcaaacttatatcagcttattgtcagacaagagatatgcacaatgctcgcttatggttccatgatatggttgaacgaggactttctgatgttattgtatacactgtactgatgaatggttattgcaaggttggtcggttgcaagaagcatgtgaattatttgtccaaatgataaatttaggaatcaagcctgatgtagttgcatacacagtgctattggatggccacctaaaggagaccctacaacaagggtggcagggcatcgctaaggaaaggaggaccttttttcttaggacaaagcataaggtgttgctgaactctatgaaagatatggaaatcgaacctgatgtaacctgttacacagtattgattgatggacggtgcaaagcagaatatctagaggaagcacgaggattgtttgatgagatgttagcaaaaggacttatccctgatgttcacacatacacagctcttataaatggatactgtagccagggagaaatagctaaggctgaagatcttttccaagaaatgatagctaagggaatgaagccagatgtactgagcttttcagtattacataagagaaccttgagacatgaaaaggctcattaatatttatgtgtactaatggttatgttgatgaatgtcagtttgactgaaggtgaaggggcgtcctgccaacaaaagggaaggcgaacacctggattgaaagactgctctctcagttcagcattgggtcgtcaaggagaacaaaatgatggtaccttcagcgtgaggatcgatgactgtcaatggagctgtgcaaacacaatcgtggcaaagctggctgtggcactggcgcctatgccatttatgagggttttgcttgaccgttttgtggctgcaactagtggtgtgttcccagacaaccaagagctacaagacagaggtaagctctcgggttccgtcctggggcaatggggagctgttgatgatcctgagtccatgctgcaccacatccattgggcagtaatgaggtgattccaatcgttaagagtcaagcataatgttgtgtgatagatctatttgcggtgtttgacatcgaggctggggaagttggaaaatggacacagatcgcagagctcggttaaacaagtggcctgtgcctgccatgttggtatcatccaaacagtctccatgtctgcattatactgatgactggaatgagggtgtgtccaaggaggagctggactctgagatcccacctggcgaggagtcgatatacggatacataatgggaatggcagatacatgtagtctgtagaatccatcaggatttccccttgataggtctcaggtttcactctaatattgtgcattgtccctcaagatgttaatacagcaatttcttgtttagtgctcataacattactccagtctccaggcgtagtgcttggtgtagagacataaaacagataatgcagcaccagtttgtggcttcaaattccgaaacaacagctttgtggaagacagaaaagaacactagtttttggcgaactgttgattcatttcagaatccaaagattg

SEQ ID NO: 199937 - DNA, 3223 bp, Zea Mays
ttccaaaacagtccaggtcccacaccggaggcatatttcttatatcagtgatggctaatgggtcgtaggaggagcagaaatatttatgtctccaatgatcctgtggcggtggaccaaatgtactgctgaatgcttcaggcgcaggaagccttttcactgtgaagttgcttgcccctactctaagatcgccgcttctgttcagtgtgatgactcaagtggtgatgaaaagctgaactttgctcctgataatgagcctatccagaaatggcaccggtctttgagctctgacagtgttgtgcagacactccgctgtttaaggaggaaacctgcagttgcattcacctactttaaagatacacatagccttggttttcaccatgacttctcaacctactcagagatcatacaaattttgtcccattcattccaggggaagatgctggtatccttgtttcgtgagattctcttgggaactggtagtggtggccctgaaatcttaccgctcattgatcacttgagaaaaacatgtgccacttctcacgtcgggatgattgaaatgggagtgaaattagatgtacatggattctcatcatttataattggcctttgtgattgtggaaagtttgatctagcttataacatggtaagaagatatgctgttctacaagagatatcccaagagagggttccaattgaagccatggcttataatatggtaatcgatggactatgcaaagaaatgaaactgaaggaggctgaaaaggtcttggagatcaagaccagacatggatctgcccctgatctatatagctatagctatctcattcatagtcattgcaaaatgggtaacctagagaaggcatggtatcatgttgaagacatggtatcccatggcattgagataaattgttacattgttgcttaccttctacagtgcctcaggaagttaggcatggtatctgaagtaattgtgcacttccagaaatttagagatttaggggtccatcttgatggcgtgctttataacattgctatggatgcttattgcaagcttgggaacatgaatgaggcagttaagctactgaatgaaatgatggctggaagtttggtaccagacaaaatccactatacatgcctgatcaatggttattgtctgaaaggagaaacagaaaatgcctggcaagtatttgaggagatgctgaaggcaaatataaaaccagatgtagttacatataacatattggccagtggatatagcaggaatggccttgttatgaaggtatttgacattctagagcacatgatggatcaagggctcgaacctaattcactcacctatggtatagctattgctggtttttgtagaggaggcaacttgagcgaagcagaggtgctgtttaatatagtagaagaaagagggatagataatatcaatgtgctgtacggttctatggtttgtggttatttgcactcaggctggactgaccatgcttacatgctttttcttagagttgctaaacaaggaaatatggtggatcgtttgtcatgttcaaaattgataaacggactctgtagggatgaaaaggttggagaggcttcaactgtatgtaaaatgatgcttgaaaagaatgttgtccctgatgtaatttcatatagcaaacttatatcagcttattgtcagacaagagatatgcacaatgctcgcttatggttccatgatatggttgaacgaggactttctgatgttattgtatacactgtactgatgaatggttattgcaaggttggtcggttgcaagaagcatgtgaattatttgtccaaatgataaatttaggaatcaagcctgatgtagttgcatacacagtgctattggatggccacctaaaggagaccctacaacaagggtggcagggcatcgctaaggaaaggaggaccttttttcttaggacaaagcataaggtgttgctgaactctatgaaagatatggaaatcgaacctgatgtaacctgttacacagtattgattgatggacggtgcaaagcagaatatctagaggaagcacgaggattgtttgatgagatgttagcaaaaggacttatccctgatgttcacacatacacagctcttataaatggatactgtagccagggagaaatagctaaggctgaagatcttttccaagaaatgatagctaagggaatgaagccagatgtactgagcttttcagtattacataagagaaccttgagacatgaaaaggctcattaatatttatgtgtactaatggttatgttgatgaatgtcagtttgactgaaggtgaaggggcgtcctgccaacaaaagggaaggcgaacacctggattgaaagactgctctctcagttcagcattgggtcgtcaaggagaacaaaatgatggtaccttcagcgtgaggatcgatgactgtcaatggagctgtgcaaacacaatcgtggcaaagctggctgtggcactggcgcctatgccatttatgagggttttgcttgaccgttttgtggctgcaactagtggtgtgttcccagacaaccaagagctacaagacagaggtaagctctcgggttccgtcctggggcaatggggagctgttgatgatcctgagtccatgctgcaccacatccattgggcagtaatgaggtgattccaatcgttaagagtcaagcataatgttgtgtgatagatctatttgcggtgtttgacatcgaggctggggaagttggaaaatggacacagatcgcagagctcggttaaacaagtggcctgtgcctgccatgttggtatcatccaaacagtctccatgtctgcattatactgatgactggaatgagggtgtgtccaaggaggagctggactctgagatcccacctggcgaggagtcgatatacggatacataatgggaatggcagatacatgtagtctgtagaatccatcaggatttccccttgataggtctcaggtttcactctaatattgtgcattgtccctcaagatgttaatacagcaatttcttgtttagtgctcataacattactccagtctccaggcgtagtgcttggtgtagagacataaaacagataatgcagcaccagtttgtggcttcaaattccgaaacaacagctttgtggaagacagaaaagaacactagtttttggcgaactgttgattcatttcagaatccaaagattg

SEQ ID NO: 199938 - DNA, 3415 bp, Zea Mays
cttcttccaaaacagtccaggtcccacaccggaggtacgctagggttccacctgagctcttccttcttccccttctgctcgtctccccatttgattcctcgccgcctgtggcttcttccccgttgtcatggagtcgggcaaaggtcctgtggtcgcggacgattaagcgatttgctcgctgcagccaggcgtgcaagggtcgttgctcgcaaagccgccttcgttgctagtgcgacggctttggagatgattgttcaagctgagaaggcgaacaccgaggctgccaagaaagctcctagacctctgcgtcgtgatgcatatttcttatatcagtgatggctaatgggtcgtaggaggagcagaaatatttatgtctccaatgatcctgtggcggtggaccaaatgtactgctgaatgcttcaggcgcaggaagccttttcactgtgaagttgcttgcccctactctaagatcgccgcttctgttcagtgtgatgactcaagtggtgatgaaaagctgaactttgctcctgataatgagcctatccagaaatggcaccggtctttgagctctgacagtgttgtgcagacactccgctgtttaaggaggaaacctgcagttgcattcacctactttaaagatacacatagccttggttttcaccatgacttctcaacctactcagagatcatacaaattttgtcccattcattccaggggaagatgctggtatccttgtttcgtgagattctcttgggaactggtagtggtggccctgaaatcttaccgctcattgatcacttgagaaaaacatgtgccacttctcacgtcgggatgattgaaatgggagtgaaattagatgtacatggattctcatcatttataattggcctttgtgattgtggaaagtttgatctagcttataacatggtaagaagatatgctgttctacaagagatatcccaagagagggttccaattgaagccatggcttataatatggtaatcgatggactatgcaaagaaatgaaactgaaggaggctgaaaaggtcttggagatcaagaccagacatggatctgcccctgatctatatagctatagctatctcattcatagtcattgcaaaatgggtaacctagagaaggcatggtatcatgttgaagacatggtatcccatggcattgagataaattgttacattgttgcttaccttctacagtgcctcaggaagttaggcatggtatctgaagtaattgtgcacttccagaaatttagagatttaggggtccatcttgatggcgtgctttataacattgctatggatgcttattgcaagcttgggaacatgaatgaggcagttaagctactgaatgaaatgatggctggaagtttggtaccagacaaaatccactatacatgcctgatcaatggttattgtctgaaaggagaaacagaaaatgcctggcaagtatttgaggagatgctgaaggcaaatataaaaccagatgtagttacatataacatattggccagtggatatagcaggaatggccttgttatgaaggtatttgacattctagagcacatgatggatcaagggctcgaacctaattcactcacctatggtatagctattgctggtttttgtagaggaggcaacttgagcgaagcagaggtgctgtttaatatagtagaagaaagagggatagataatatcaatgtgctgtacggttctatggtttgtggttatttgcactcaggctggactgaccatgcttacatgctttttcttagagttgctaaacaaggaaatatggtggatcgtttgtcatgttcaaaattgataaacggactctgtagggatgaaaaggttggagaggcttcaactgtatgtaaaatgatgcttgaaaagaatgttgtccctgatgtaatttcatatagcaaacttatatcagcttattgtcagacaagagatatgcacaatgctcgcttatggttccatgatatggttgaacgaggactttctgatgttattgtatacactgtactgatgaatggttattgcaaggttggtcggttgcaagaagcatgtgaattatttgtccaaatgataaatttaggaatcaagcctgatgtagttgcatacacagtgctattggatggccacctaaaggagaccctacaacaagggtggcagggcatcgctaaggaaaggaggaccttttttcttaggacaaagcataaggtgttgctgaactctatgaaagatatggaaatcgaacctgatgtaacctgttacacagtattgattgatggacggtgcaaagcagaatatctagaggaagcacgaggattgtttgatgagatgttagcaaaaggacttatccctgatgttcacacatacacagctcttataaatggatactgtagccagggagaaatagctaaggctgaagatcttttccaagaaatgatagctaagggaatgaagccagatatttggtcaatgatgcgagtgatcggtgtgcctatgtcaggaaggcgaacacctggattgaaagactgctctctcagttcagcattgggtcgtcaaggagaacaaaatgatggtaccttcagcgtgaggatcgatgactgtcaatggagctgtgcaaacacaatcgtggcaaagctggctgtggcactggcgcctatgccatttatgagggttttgcttgaccgttttgtggctgcaactagtggtgtgttcccagacaaccaagagctacaagacagaggtaagctctcgggttccgtcctggggcaatggggagctgttgatgatcctgagtccatgctgcaccacatccattgggcagtaatgaggtgattccaatcgttaagagtcaagcataatgttgtgtgatagatctatttgcggtgtttgacatcgaggctggggaagttggaaaatggacacagatcgcagagctcggttaaacaagtggcctgtgcctgccatgttggtatcatccaaacagtctccatgtctgcattatactgatgactggaatgagggtgtgtccaaggaggagctggactctgagatcccacctggcgaggagtcgatatacggatacataatgggaatggcagatacatgtagtctgtagaatccatcaggatttccccttgataggtctcaggtttcactctaatattgtgcattgtccctcaagatgttaatacagcaatttcttgtttagtgctcataacattactccagtctccaggcgtagtgcttggtgtagagacataaaacagataatgcagcaccagtttgtggcttcaaattccgaaacaacagctttgtggaagacagaaaagaacactagtttttggcgaactgttgattcatttcagaatccaaagattg

SEQ ID NO: 199939 - DNA, 3646 bp, Zea Mays
gttcttcttccaaaacagtccaggtcccacaccggaggtacgctagggttccacctgagctcttccttcttccccttctgctcgtctccccatttgattcctcgccgcctgtggcttcttccccgttgtcatggagtcgggcaaaggtcctgtggtcgcggacgattaagcgatttgctcgctgcagccaggcgtgcaagggtcgttgctcgcaaagccgccttcgttgctagtgcgacggctttggagatgattgttcaagctgagaaggcgaacaccgaggctgccaagaaagctcctagacctctgcgtcgtgatgaggagcagaaatatttatgtctccaatgatcctgtggcggtggaccaaatgtactgctgaatgcttcaggcgcaggaagccttttcactgtgaagttgcttgcccctactctaagatcgccgcttctgttcagtgtgatgactcaagtggtgatgaaaagctgaactttgctcctgataatgagcctatccagaaatggcaccggtctttgagctctgacagtgttgtgcagacactccgctgtttaaggaggaaacctgcagttgcattcacctactttaaagatacacatagccttggttttcaccatgacttctcaacctactcagagatcatacaaattttgtcccattcattccaggggaagatgctggtatccttgtttcgtgagattctcttgggaactggtagtggtggccctgaaatcttaccgctcattgatcacttgagaaaaacatgtgccacttctcacgtactctcgtatgcagtcaattgcttaatcaaggcatacaccacctgccacgatgcacaagaaacagtagagatgttttgttgcctttgcaggcttggatttgttccaacactttgggctcgcaactttctgctcaaatttgtatctcagagcagtggtgattcacatatggttgtcgcagcttatgatcgaatgaagtgctttcagttgacactggatgctcaatcattgaacatagtcactagatcactttttcaagcaaacaaggcagacgaagcattccaaatgtaggtcgggatgattgaaatgggagtgaaattagatgtacatggattctcatcatttataattggcctttgtgattgtggaaagtttgatctagcttataacatggtaagaagatatgctgttctacaagagatatcccaagagagggttccaattgaagccatggcttataatatggtaatcgatggactatgcaaagaaatgaaactgaaggaggctgaaaaggtcttggagatcaagaccagacatggatctgcccctgatctatatagctatagctatctcattcatagtcattgcaaaatgggtaacctagagaaggcatggtatcatgttgaagacatggtatcccatggcattgagataaattgttacattgttgcttaccttctacagtgcctcaggaagttaggcatggtatctgaagtaattgtgcacttccagaaatttagagatttaggggtccatcttgatggcgtgctttataacattgctatggatgcttattgcaagcttgggaacatgaatgaggcagttaagctactgaatgaaatgatggctggaagtttggtaccagacaaaatccactatacatgcctgatcaatggttattgtctgaaaggagaaacagaaaatgcctggcaagtatttgaggagatgctgaaggcaaatataaaaccagatgtagttacatataacatattggccagtggatatagcaggaatggccttgttatgaaggtatttgacattctagagcacatgatggatcaagggctcgaacctaattcactcacctatggtatagctattgctggtttttgtagaggaggcaacttgagcgaagcagaggtgctgtttaatatagtagaagaaagagggatagataatatcaatgtgctgtacggttctatggtttgtggttatttgcactcaggctggactgaccatgcttacatgctttttcttagagttgctaaacaaggaaatatggtggatcgtttgtcatgttcaaaattgataaacggactctgtagggatgaaaaggttggagaggcttcaactgtatgtaaaatgatgcttgaaaagaatgttgtccctgatgtaatttcatatagcaaacttatatcagcttattgtcagacaagagatatgcacaatgctcgcttatggttccatgatatggttgaacgaggactttctgatgttattgtatacactgtactgatgaatggttattgcaaggttggtcggttgcaagaagcatgtgaattatttgtccaaatgataaatttaggaatcaagcctgatgtagttgcatacacagtgctattggatggccacctaaaggagaccctacaacaagggtggcagggcatcgctaaggaaaggaggaccttttttcttaggacaaagcataaggtgttgctgaactctatgaaagatatggaaatcgaacctgatgtaacctgttacacagtattgattgatggacggtgcaaagcagaatatctagaggaagcacgaggattgtttgatgagatgttagcaaaaggacttatccctgatgttcacacatacacagctcttataaatggatactgtagccagggagaaatagctaaggctgaagatcttttccaagaaatgatagctaagggaatgaagccagatgtactgagcttttcagtattacataagagaaccttgagacatgaaaaggctcattaatatttatgtgtactaatggttatgttgatgaatgtcagtttgactgaaggtgaaggggcgtcctgccaacaaaagggaaggcgaacacctggattgaaagactgctctctcagttcagcattgggtcgtcaaggagaacaaaatgatggtaccttcagcgtgaggatcgatgactgtcaatggagctgtgcaaacacaatcgtggcaaagctggctgtggcactggcgcctatgccatttatgagggttttgcttgaccgttttgtggctgcaactagtggtgtgttcccagacaaccaagagctacaagacagaggtaagctctcgggttccgtcctggggcaatggggagctgttgatgatcctgagtccatgctgcaccacatccattgggcagtaatgaggtggcctgtgcctgccatgttggtatcatccaaacagtctccatgtctgcattatactgatgactggaatgagggtgtgtccaaggaggagctggactctgagatcccacctggcgaggagtcgatatacggatacataatgggaatggcagatacatgtagtctgtagaatccatcaggatttccccttgataggtctcaggtttcactctaatattgtgcattgtccctcaagatgttaatacagcaatttcttgtttagtgctcataacattactccagtctccaggcgtagtgcttggtgtagagacataaaacagataatgcagcaccagtttgtggcttcaaattccgaaacaacagctttgtggaagacagaaaagaacactagtttttggcgaactgttgattcatttcagaatccaaagattg

SEQ ID NO: 199940 - DNA, 3521 bp, Zea Mays
gttcttcttccaaaacagtccaggtcccacaccggagccaggcgtgcaagggtcgttgctcgcaaagccgccttcgttgctagtgcgacggctttggagatgattgttcaagctgagaaggcgaacaccgaggctgccaagaaagctcctagacctctgcgtcgtgatgcatatttcttatatcagtgatggctaatgggtcgtaggaggagcagaaatatttatgtctccaatgatcctgtggcggtggaccaaatgtactgctgaatgcttcaggcgcaggaagccttttcactgtgaagttgcttgcccctactctaagatcgccgcttctgttcagtgtgatgactcaagtggtgatgaaaagctgaactttgctcctgataatgagcctatccagaaatggcaccggtctttgagctctgacagtgttgtgcagacactccgctgtttaaggaggaaacctgcagttgcattcacctactttaaagatacacatagccttggttttcaccatgacttctcaacctactcagagatcatacaaattttgtcccattcattccaggggaagatgctggtatccttgtttcgtgagattctcttgggaactggtagtggtggccctgaaatcttaccgctcattgatcacttgagaaaaacatgtgccacttctcacgtactctcgtatgcagtcaattgcttaatcaaggcatacaccacctgccacgatgcacaagaaacagtagagatgttttgttgcctttgcaggcttggatttgttccaacactttgggctcgcaactttctgctcaaatttgtatctcagagcagtggtgattcacatatggttgtcgcagcttatgatcgaatgaagtgctttcagttgacactggatgctcaatcattgaacatagtcactagatcactttttcaagcaaacaaggcagacgaagcattccaaatgtaggtcgggatgattgaaatgggagtgaaattagatgtacatggattctcatcatttataattggcctttgtgattgtggaaagtttgatctagcttataacatggtaagaagatatgctgttctacaagagatatcccaagagagggttccaattgaagccatggcttataatatggtaatcgatggactatgcaaagaaatgaaactgaaggaggctgaaaaggtcttggagatcaagaccagacatggatctgcccctgatctatatagctatagctatctcattcatagtcattgcaaaatgggtaacctagagaaggcatggtatcatgttgaagacatggtatcccatggcattgagataaattgttacattgttgcttaccttctacagtgcctcaggaagttaggcatggtatctgaagtaattgtgcacttccagaaatttagagatttaggggtccatcttgatggcgtgctttataacattgctatggatgcttattgcaagcttgggaacatgaatgaggcagttaagctactgaatgaaatgatggctggaagtttggtaccagacaaaatccactatacatgcctgatcaatggttattgtctgaaaggagaaacagaaaatgcctggcaagtatttgaggagatgctgaaggcaaatataaaaccagatgtagttacatataacatattggccagtggatatagcaggaatggccttgttatgaaggtatttgacattctagagcacatgatggatcaagggctcgaacctaattcactcacctatggtatagctattgctggtttttgtagaggaggcaacttgagcgaagcagaggtgctgtttaatatagtagaagaaagagggatagataatatcaatgtgctgtacggttctatggtttgtggttatttgcactcaggctggactgaccatgcttacatgctttttcttagagttgctaaacaaggaaatatggtggatcgtttgtcatgttcaaaattgataaacggactctgtagggatgaaaaggttggagaggcttcaactgtatgtaaaatgatgcttgaaaagaatgttgtccctgatgtaatttcatatagcaaacttatatcagcttattgtcagacaagagatatgcacaatgctcgcttatggttccatgatatggttgaacgaggactttctgatgttattgtatacactgtactgatgaatggttattgcaaggttggtcggttgcaagaagcatgtgaattatttgtccaaatgataaatttaggaatcaagcctgatgtagttgcatacacagtgctattggatggccacctaaaggagaccctacaacaagggtggcagggcatcgctaaggaaaggaggaccttttttcttaggacaaagcataaggtgttgctgaactctatgaaagatatggaaatcgaacctgatgtaacctgttacacagtattgattgatggacggtgcaaagcagaatatctagaggaagcacgaggattgtttgatgagatgttagcaaaaggacttatccctgatgttcacacatacacagctcttataaatggatactgtagccagggagaaatagctaaggctgaagatcttttccaagaaatgatagctaagggaatgaagccagatgtactgagcttttcagtattacataagagaaccttgagacatgaaaaggctcattaatatttatgtgtactaatggttatgttgatgaatgtcagtttgactgaaggtgaaggggcgtcctgccaacaaaagggaaggcgaacacctggattgaaagactgctctctcagttcagcattgggtcgtcaaggagaacaaaatgatggtaccttcagcgtgaggatcgatgactgtcaatggagctgtgcaaacacaatcgtggcaaagctggctgtggcactggcgcctatgccatttatgagggttttgcttgaccgttttgtggctgcaactagtggtgtgttcccagacaaccaagagctacaagacagagatctatttgcggtgtttgacatcgaggctggggaagttggaaaatggacacagatcgcagagctcggttaaacaagtggcctgtgcctgccatgttggtatcatccaaacagtctccatgtctgcattatactgatgactggaatgagggtgtgtccaaggaggagctggactctgagatcccacctggcgaggagtcgatatacggatacataatgggaatggcagatacatgtagtctgtagaatccatcaggatttccccttgataggtctcaggtttcactctaatattgtgcattgtccctcaagatgttaatacagcaatttcttgtttagtgctcataacattactccagtctccaggcgtagtgcttggtgtagagacataaaacagataatgcagcaccagtttgtggcttcaaattccgaaacaacagctttgtggaagacagaaaagaacactagtttttggcgaactgttgattcatttcagaatccaaagattg

SEQ ID NO: 199941 - DNA, 3615 bp, Zea Mays
cgttcttcttccaaaacagtccaggtcccacaccggagccaggcgtgcaagggtcgttgctcgcaaagccgccttcgttgctagtgcgacggctttggagatgattgttcaagctgagaaggcgaacaccgaggctgccaagaaagctcctagacctctgcgtcgtgatgaggagcagaaatatttatgtctccaatgatcctgtggcggtggaccaaatgtactgctgaatgcttcaggcgcaggaagccttttcactgtgaagttgcttgcccctactctaagatcgccgcttctgttcagtgtgatgactcaagtggtgatgaaaagctgaactttgctcctgataatgagcctatccagaaatggcaccggtctttgagctctgacagtgttgtgcagacactccgctgtttaaggaggaaacctgcagttgcattcacctactttaaagatacacatagccttggttttcaccatgacttctcaacctactcagagatcatacaaattttgtcccattcattccaggggaagatgctggtatccttgtttcgtgagattctcttgggaactggtagtggtggccctgaaatcttaccgctcattgatcacttgagaaaaacatgtgccacttctcacgtactctcgtatgcagtcaattgcttaatcaaggcatacaccacctgccacgatgcacaagaaacagtagagatgttttgttgcctttgcaggcttggatttgttccaacactttgggctcgcaactttctgctcaaatttgtatctcagagcagtggtgattcacatatggttgtcgcagcttatgatcgaatgaagtgctttcagttgacactggatgctcaatcattgaacatagtcactagatcactttttcaagcaaacaaggcagacgaagcattccaaatgtaggtcgggatgattgaaatgggagtgaaattagatgtacatggattctcatcatttataattggcctttgtgattgtggaaagtttgatctagcttataacatggtaagaagatatgctgttctacaagagatatcccaagagagggttccaattgaagccatggcttataatatggtaatcgatggactatgcaaagaaatgaaactgaaggaggctgaaaaggtcttggagatcaagaccagacatggatctgcccctgatctatatagctatagctatctcattcatagtcattgcaaaatgggtaacctagagaaggcatggtatcatgttgaagacatggtatcccatggcattgagataaattgttacattgttgcttaccttctacagtgcctcaggaagttaggcatggtatctgaagtaattgtgcacttccagaaatttagagatttaggggtccatcttgatggcgtgctttataacattgctatggatgcttattgcaagcttgggaacatgaatgaggcagttaagctactgaatgaaatgatggctggaagtttggtaccagacaaaatccactatacatgcctgatcaatggttattgtctgaaaggagaaacagaaaatgcctggcaagtatttgaggagatgctgaaggcaaatataaaaccagatgtagttacatataacatattggccagtggatatagcaggaatggccttgttatgaaggtatttgacattctagagcacatgatggatcaagggctcgaacctaattcactcacctatggtatagctattgctggtttttgtagaggaggcaacttgagcgaagcagaggtgctgtttaatatagtagaagaaagagggatagataatatcaatgtgctgtacggttctatggtttgtggttatttgcactcaggctggactgaccatgcttacatgctttttcttagagttgctaaacaaggaaatatggtggatcgtttgtcatgttcaaaattgataaacggactctgtagggatgaaaaggttggagaggcttcaactgtatgtaaaatgatgcttgaaaagaatgttgtccctgatgtaatttcatatagcaaacttatatcagcttattgtcagacaagagatatgcacaatgctcgcttatggttccatgatatggttgaacgaggactttctgatgttattgtatacactgtactgatgaatggttattgcaaggttggtcggttgcaagaagcatgtgaattatttgtccaaatgataaatttaggaatcaagcctgatgtagttgcatacacagtgctattggatggccacctaaaggagaccctacaacaagggtggcagggcatcgctaaggaaaggaggaccttttttcttaggacaaagcataaggtgttgctgaactctatgaaagatatggaaatcgaacctgatgtaacctgttacacagtattgattgatggacggtgcaaagcagaatatctagaggaagcacgaggattgtttgatgagatgttagcaaaaggacttatccctgatgttcacacatacacagctcttataaatggatactgtagccagggagaaatagctaaggctgaagatcttttccaagaaatgatagctaagggaatgaagccagatgtactgagcttttcagtattacataagagaaccttgagacatgaaaaggctcattaatatttatgtgtactaatggttatgttgatgaatgtcagtttgactgaaggtgaaggggcgtcctgccaacaaaagggaaggcgaacacctggattgaaagactgctctctcagttcagcattgggtcgtcaaggagaacaaaatgatggtaccttcagcgtgaggatcgatgactgtcaatggagctgtgcaaacacaatcgtggcaaagctggctgtggcactggcgcctatgccatttatgagggttttgcttgaccgttttgtggctgcaactagtggtgtgttcccagacaaccaagagctacaagacagaggtaagctctcgggttccgtcctggggcaatggggagctgttgatgatcctgagtccatgctgcaccacatccattgggcagtaatgaggtgattccaatcgttaagagtcaagcataatgttgtgtgatagatctatttgcggtgtttgacatcgaggctggggaagttggaaaatggacacagatcgcagagctcggttaaacaagtggcctgtgcctgccatgttggtatcatccaaacagtctccatgtctgcattatactgatgactggaatgagggtgtgtccaaggaggagctggactctgagatcccacctggcgaggagtcgatatacggatacataatgggaatggcagatacatgtagtctgtagaatccatcaggatttccccttgataggtctcaggtttcactctaatattgtgcattgtccctcaagatgttaatacagcaatttcttgtttagtgctcataacattactccagtctccaggcgtagtgcttggtgtagagacataaaacagataatgcagcaccagtttgtggcttcaaattccgaaacaacagctttgtggaagacagaaaagaacactagtttttggcgaactgttgattcatttcagaatccaaagattg

SEQ ID NO: 199942 - DNA, 1407 bp, Zea Mays
cccaaccacaaccggccaacccaaccacaatcccccgtgcttgtgcgtacatttttttccatccattcagcctaaactatcacctaaaatctaggatatattattccccccaaaacaaaccctaaccggccggcccaattctcacgcgctcgccgcctaggagcattcacgttggcggcgggcggcggctcggttcctctcctccaccgcacctccaagaatccacctccacgactgagctgacggctcggtagcgccatggcagttcaccggctccaaccttccccatccggcctacagtgctccaccgcccggtcgccagtgctcctccatgggccacggctgacgggtgcacgcaccggttatttttccagcacttgacattcgagtgaaaaatgtcgcagggacatattctcttgaacataaaggagaaaatgatctcttcgcacatcagacaaggcttctactctttcagaagaaagtcatttttaggagaatcgtgaacaaaatgaccagatgtttaggcctggttggaaggacatttttcgaatgaatcagagtgagctcgaggctgagatttgaaaaggtctctcgagattctactcttgatccaaggaggaaggcctatctgatccaaaatctcatgaccagccgttggatagttgctcagcaataatcaccacaaccaagcgtcgaaggacataatggatgtacacgatgacctggatgtgttccttcgtaccgagacccagggaaacaaatatttgggctgtgagcattacaaaagaaactgcaagcttgttgctgcatgctgcaataagctattcacttgcagattctgtcacgataaagtaactcaagaggtccacttattgactcttatgaccatgtaattggtgttaatacaactacattaacatgtaaaggttggtagatctggaaggtcttgatggtctaatacctatctatgagtacggaagaaaaggcgggagaagtcggtctctgcagcatcgcgcgtgaaaaaaaatcagccaattccacgagcattgatgttgtcatgacttcaaaagaggagagaccatgctaagaataatgcattatgacatttgtcaggcttacatatcgactgtttgatatggatagatgtataggtttatgaccaatccagttcaaagcaattggagtatagaagaaataaggagaaacaggaaagctctgtacatcttgcattttgctgttgtttgtcgaagtttcaatgtctgtcgcgtgacaaaatatagttgtaatttatattttggcatgcacgaaacaggtgtatttattcatttttgaacgaaattttatgtcaaatcctctattgcgttatatacgaaattttaacgcggcatgcacggaaactaacactaa

SEQ ID NO: 199943 - DNA, 1660 bp, Zea Mays
caaccggccaacccaaccacaatcccccgtgcttgtgcgtacatttttttccatccattcagcctaaactatcacctaaaatctaggatatattattccccccaaaacaaaccctaaccggccggcccaattctcacgcgctcgccgcctaggagcattcacgttggcggcgggcggcggctcggttcctctcctccaccgcacctccaagaatccacctccacgactgagctgacggctcggtagcgccatggcagttcaccggctccaaccttccccatccggcctacagtgctccaccgcccggtcgccagtgctcctccatgggccacggctgacgggtgcacgcaccgggcgacgagcacccaccaccggttatgtgcaccctctctccttcggtccttcctccctttcttccgtgctaagccaccgagcacccaagcggtttggcctgatgccacatctctggtaggagaggtggatttggtggacctagattcgatgtgcagagagcgacttggaggtggctgacatcttcaagcactgcatcatgcagttacaactactgttggccatacagggaaatgctgggcctattataccaattgttcaaagttatttttccagcacttgacattcgagtgaaaaatgtcgcagggacatattctcttgaacataaaggagaaaatgatctcttcgcacatcagacaaggcttctactctttcagaagaaagtcatttttaggagaatcgtgaacaaaatgaccagatgtttaggcctggttggaaggacatttttcgaatgaatcagagtgagctcgaggctgagatttgaaaaggtctctcgagattctactcttgatccaaggaggaaggcctatctgatccaaaatctcatgaccagccgttggatagttgctcagcaataatcaccacaaccaagcgtcgaaggacataatggatgtacacgatgacctggatgtgttccttcgtaccgagacccagggaaacaaatatttgggctgtgagcattacaaaagaaactgcaagcttgttgctgcatgctgcaataagctattcacttgcagattctgtcacgataaagtaactcaagaggtccacttattgactcttatgaccatgtaattggtgttaatacaactacattaacatgtaaaggttggtagatctggaaggtcttgatggtctaatacctatctatgagtacggaagaaaaggcgggagaagtcggtctctgcagcatcgcgcgtgaaaaaaaatcagccaattccacgagcattgatgttgtcatgacttcaaaagaggagagaccatgctaagaataatgcattatgacatttgtcaggcttacatatcgactgtttgatatggatagatgtataggtttatgaccaatccagttcaaagcaattggagtatagaagaaataaggagaaacaggaaagctctgtacatcttgcattttgctgttgtttgtcgaagtttcaatgtctgtcgcgtgacaaaatatagttgtaatttatattttggcatgcacgaaacaggtgtatttattcatttttgaacgaaattttatgtcaaatcctctattgcgttatatacgaaattttaacgcggcatgcacggaaactaacactaa

SEQ ID NO: 199944 - DNA, 1386 bp, Zea Mays
ctatcacctaaaatctaggatatattattccccccaaaacaaaccctaaccggccggcccaattctcacgcgctcgccgcctaggagcattcacgttggcggcgggcggcggctcggttcctctcctccaccgcacctccaagaatccacctccacgactgagctgacggctcggtagcgccatggcagttcaccggctccaaccttccccatccggcctacagtgctccaccgcccggtcgccagtgctcctccatgggccacggctgacgggtgcacgcaccggtaggagaggtggatttggtggacctagattcgatgtgcagagagcgacttggaggttatttttccagcacttgacattcgagtgaaaaatgtcgcagggacatattctcttgaacataaaggagaaaatgatctcttcgcacatcagacaaggcttctactctttcagaagaaagtcatttttaggagaatcgtgaacaaaatgaccagatgtttaggcctggttggaaggacatttttcgaatgaatcagagtgagctcgaggctgagatttgaaaaggtctctcgagattctactcttgatccaaggaggaaggcctatctgatccaaaatctcatgaccagccgttggatagttgctcagcaataatcaccacaaccaagcgtcgaaggacataatggatgtacacgatgacctggatgtgttccttcgtaccgagacccagggaaacaaatatttgggctgtgagcattacaaaagaaactgcaagcttgttgctgcatgctgcaataagctattcacttgcagattctgtcacgataaagtaactcaagaggtccacttattgactcttatgaccatgtaattggtgttaatacaactacattaacatgtaaaggttggtagatctggaaggtcttgatggtctaatacctatctatgagtacggaagaaaaggcgggagaagtcggtctctgcagcatcgcgcgtgaaaaaaaatcagccaattccacgagcattgatgttgtcatgacttcaaaagaggagagaccatgctaagaataatgcattatgacatttgtcaggcttacatatcgactgtttgatatggatagatgtataggtttatgaccaatccagttcaaagcaattggagtatagaagaaataaggagaaacaggaaagctctgtacatcttgcattttgctgttgtttgtcgaagtttcaatgtctgtcgcgtgacaaaatatagttgtaatttatattttggcatgcacgaaacaggtgtatttattcatttttgaacgaaattttatgtcaaatcctctattgcgttatatacgaaattttaacgcggcatgcacggaaactaacactaa

SEQ ID NO: 199945 - DNA, 1544 bp, Zea Mays
ctatcacctaaaatctaggatatattattccccccaaaacaaaccctaaccggccggcccaattctcacgcgctcgccgcctaggagcattcacgttggcggcgggcggcggctcggttcctctcctccaccgcacctccaagaatccacctccacgactgagctgacggctcggtagcgccatggcagttcaccggctccaaccttccccatccggcctacagtgctccaccgcccggtcgccagtgctcctccatgggccacggctgacgggtgcacgcaccggtaggagaggtggatttggtggacctagattcgatgtgcagagagcgacttggaggtggctgacatcttcaagcactgcatcatgcagttacaactactgttggccatacagggaaatgctgggcctattataccaattgttcaaagcatggaccttgtataattacatgtttttatcatagatagattaatttctgaaatgcccatagattggttatttttccagcacttgacattcgagtgaaaaatgtcgcagggacatattctcttgaacataaaggagaaaatgatctcttcgcacatcagacaaggcttctactctttcagaagaaagtcatttttaggagaatcgtgaacaaaatgaccagatgtttaggcctggttggaaggacatttttcgaatgaatcagagtgagctcgaggctgagatttgaaaaggtctctcgagattctactcttgatccaaggaggaaggcctatctgatccaaaatctcatgaccagccgttggatagttgctcagcaataatcaccacaaccaagcgtcgaaggacataatggatgtacacgatgacctggatgtgttccttcgtaccgagacccagggaaacaaatatttgggctgtgagcattacaaaagaaactgcaagcttgttgctgcatgctgcaataagctattcacttgcagattctgtcacgataaagtaactcaagaggtccacttattgactcttatgaccatgtaattggtgttaatacaactacattaacatgtaaaggttggtagatctggaaggtcttgatggtctaatacctatctatgagtacggaagaaaaggcgggagaagtcggtctctgcagcatcgcgcgtgaaaaaaaatcagccaattccacgagcattgatgttgtcatgacttcaaaagaggagagaccatgctaagaataatgcattatgacatttgtcaggcttacatatcgactgtttgatatggatagatgtataggtttatgaccaatccagttcaaagcaattggagtatagaagaaataaggagaaacaggaaagctctgtacatcttgcattttgctgttgtttgtcgaagtttcaatgtctgtcgcgtgacaaaatatagttgtaatttatattttggcatgcacgaaacaggtgtatttattcatttttgaacgaaattttatgtcaaatcctctattgcgttatatacgaaattttaacgcggcatgcacggaaactaacactaa

SEQ ID NO: 199946 - DNA, 1477 bp, Zea Mays
ctatcacctaaaatctaggatatattattccccccaaaacaaaccctaaccggccggcccaattctcacgcgctcgccgcctaggagcattcacgttggcggcgggcggcggctcggttcctctcctccaccgcacctccaagaatccacctccacgactgagctgacggctcggtagcgccatggcagttcaccggctccaaccttccccatccggcctacagtgctccaccgcccggtcgccagtgctcctccatgggccacggctgacgggtgcacgcaccggtaggagaggtggatttggtggacctagattcgatgtgcagagagcgacttggaggtggctgacatcttcaagcactgcatcatgcagttacaactactgttggccatacagggaaatgctgggcctattataccaattgttcaaagttatttttccagcacttgacattcgagtgaaaaatgtcgcagggacatattctcttgaacataaaggagaaaatgatctcttcgcacatcagacaaggcttctactctttcagaagaaagtcatttttaggagaatcgtgaacaaaatgaccagatgtttaggcctggttggaaggacatttttcgaatgaatcagagtgagctcgaggctgagatttgaaaaggtctctcgagattctactcttgatccaaggaggaaggcctatctgatccaaaatctcatgaccagccgttggatagttgctcagcaataatcaccacaaccaagcgtcgaaggacataatggatgtacacgatgacctggatgtgttccttcgtaccgagacccagggaaacaaatatttgggctgtgagcattacaaaagaaactgcaagcttgttgctgcatgctgcaataagctattcacttgcagattctgtcacgataaagtaactcaagaggtccacttattgactcttatgaccatgtaattggtgttaatacaactacattaacatgtaaaggttggtagatctggaaggtcttgatggtctaatacctatctatgagtacggaagaaaaggcgggagaagtcggtctctgcagcatcgcgcgtgaaaaaaaatcagccaattccacgagcattgatgttgtcatgacttcaaaagaggagagaccatgctaagaataatgcattatgacatttgtcaggcttacatatcgactgtttgatatggatagatgtataggtttatgaccaatccagttcaaagcaattggagtatagaagaaataaggagaaacaggaaagctctgtacatcttgcattttgctgttgtttgtcgaagtttcaatgtctgtcgcgtgacaaaatatagttgtaatttatattttggcatgcacgaaacaggtgtatttattcatttttgaacgaaattttatgtcaaatcctctattgcgttatatacgaaattttaacgcggcatgcacggaaactaacactaa

SEQ ID NO: 199947 - DNA, 2263 bp, Zea Mays
tctttatccaacacgctgatggagttgattattacttggccgacatcttgatcgtttctgagattaaactgatgatgctgatgctcgtttagttatcttggtttggagatatatcagatatgggtgatcggaatcatggacgctctctccctctactgctctatctacatcttttgctgccaatacttccgtttgctatggcagatatagcctccgagaagcaagcactctttgcttttgcctctgcagtctaccatggcaacaagctgaattggagccaaaatatcccagtgtgctcatggcatggtgtgacatgctcactggatcgatcatgtatattggcccttagggtgccaggtgctggtttgattggtaccattcctgctgatactcttggcaggcttgtgtccctccaagttttaagcatgaggtctaaccgtttgagtggaagccttccgtacgatgttgtctcacttccttatttacaagccatatttgttcagcacaacgaattgtcaggagacttgcctccatttctctctccaaaccttaatacccttgatctctcttacaactcctttacaggacaaatcccatcaggtttgcagaatcttaccaaattgtctgtcttgaatttagcagaaaattccctgtccgggccgattccggatctcaaacttcctagcctaagacagctaaatctgagcaacaatgaactgaatggttcgattcctccctttttccaaatcttctcaaatagttccttcctagggaactctggattgtgtggaccgccgctaactgaatgttcttttctatcttcaccaacaccgtcgcaagtgccttcaccaccaaaattaccaaatcatgagaagaaggctggcaatggcttggtaatcgtggctgttgctgggagctttgtcatatttctgctagctgctgtgatgttcactatgtgcatttcaaagaggaaggagaagaaagacgaagcgggttacaacggtaaggttactgatggtggaagggttgagaagcgcaaagaggatctcagcagcggcgtccaaatggcgcataagaacaagttagttttcttggagggatgcagttacaactttgacttggaggacttgctgagagcttctgctgaagttctcgggaaagggagctatggaactgcctacaaggctatactcgaggatggctctactgtggtagtcaagaggctaaaggatgtcgtggcagggaagaaagaatttgagcagcagatggagctcatagggagggtaggtaaacatgcaaacatcgcgcctattcgtgcttactactactcgaaggatgagaagcttgttgtttatgagtatattggtagaggcagcttctcagctctgttgcatggtatcaagggcgtgtgtgagaagaccccattagattggaacacaaggatgaagattatactcggaacagcacgcggcctcgagcacatccattcagaaggcggctccaggctcgcacacggcaacatcaagtcaaccaacgttctgctcgacggagaccacaacccttacgtctcagactacgggctgagctcgttgacgagccttccgatcaccacttcccgagctgtcgctggctaccgagctcaggagaccttcgaatcgaggaagttcacccacaagtccgacgtgtacggtttcggcgtcctcctcatggagacgctgacgggcaaggccccgcttcagtcacagggtcaggacgacgccgtcgacctaccgaggtgggtgcattcggtggtccgcgaggagtggaccgctgaggtgtttgacgtccagctgatgaagtatcccaacatagaagacgagctggtccagatgctccgtatcgccatggcgtgcacggcgtggtctcccgaccggcgtccgacgatggcgcaggtggttaggatggtggaggagctccggcactctgcttccgggagtcgcgctctctccgttggcagtcccaaggaatccagtcctctgtcagcctgaattgtggttctgattcagaattcgtgtatccatgacatcgatgatcgatggtatcctgcatgtggttcacggtgcacacgttgtctgcctcgtcagatacttcgtactgctgtaactttggttcaatggaatgcttaagaaacaaggtcggaataggcgaatagctattttcgtctttcacctattgattttgtccttgcatacaaaaaaaagaatagacagaaaacagaaaagaa

SEQ ID NO: 199948 - DNA, 2317 bp, Zea Mays
gggaccgctgttgttcttctccattctgtcgcggcgtagacgaatctcaaccctaacgcgctgaaggcaggtctgcaccggcctggtagcgctgtctcgtggagctatctctagaggggataagcaggtgaaggggcaagtttctgcaacttaaataaatagagtgaatatgactgacatgaattctgatgagattcttgaggttcctgacactcctgaccgattacagcagtcaaaataccatgtttccagctctattgttgggagggatggtacaatggcagctgctaatccatcaccacagcgcaaatttagaattagattcaagaacaattccgtgcaaggttcatcaagtcaaaataatggttgtagcatactgcctgcagctttagatactgatcatattttcaaacaagctgaagcagcacagattctggaactgtctaaagactataaggcaaaattttccctacagaaacctgacagcacaaggatatctgttgacagtgaaaagagggctggaaaacatggctttgatcagagcagaagcatttcgaacaatataagttgtagtgtgactggaggaaggaaccctaccttccaagttaaagatggagaggttggtcagcaagatgcaggtcatcagagtgcaaactttctagacataggaccaggttttcctactattcaagtgggaaaaccaggatacagattatgcactcgcactactgataagctgaaaggtgtaacaggtgctgatgtttgtccaggatcaagttctggggaggtcaaaggggacttgatcactaacaaggtcattgcaggacctacaagccctctgcgtgtttttcctcgaaggcatgtgggccaaaaaaggctggtacgcaatggatgtatttccccctctaacatagccaagacagatgcaaaagttaatgaaaaacaggaaatgtgctctttaagtgaacatttggaccatccgcatcagcctgatgcatttgacggaggtgatgtgattgacctcacggagaattcaccaataatgacaaggcagagatctgaagtgaacaataaattgatgtctggacacaatatggacacaagggccgcaaaaaagctgagaacagacagatttggcaggactttggttcggcagtccaaatgtcatgcaaacaacagcagttgttctgaagttagcttatcaggcctcaacaacaatggaaaaggaattgactgtgatatcttggatagtgatcaaactggagaagctaatttgaggggggttgatcttagtactgctggaacttatctaaacaaaaacttttctgatataagcacggagcaaggttggagaacaacacacaaccacacaagtaaattacccatttcgtttatgggtaatataactagcagttccggatgggaatctggatcttctaccacacgatctaatcaaaaccatggatctgctggaggcaagcatagctctgttagtggagcaaacataatagttcctgataagatagggaataaaacaataatgcttggtagagaaaggagaaaacaaacctcaacttcttcccatattggtgaaagctctagtgctgctgacgaacctagagaagcacaattggagtcggatgagttattggctcgccaactccaggagcagctctacaatgaatctgctcgttttgccccaacagaagagattgatgcaattgtagcaatgtcacttcaacatgaagaagatactcatcggacatctaggaccttaaggaggttccaaaaccatactagaggtgctcgggctactcgtttgagttcttatcgaaatgctcttagggctgaattagcaacagcaaacaatatgatttcccgtcagcggaatactgctccaataaatttgggattgagagctgctttagcaagatatcctggtgctttgcacattcaaccaaacattgacttaaatgactatgatgcactgcttgctctggatgaaaataaccaccagcacactggtgcttcagaaagccagatcaataatttgccacagtcagtagttcagtccaatagcattgaagatccatgttctgtctgccttgaaaatccttctgtgggagatactatccgccatttgccttgctttcacaagttccataaagagtgtattgacgagtggcttaggagaaagaaactgtgcccagtctgcaagtttgggattaactgaagtttgccgtaccagtctacagtggagttctacttggtagtggcagcgacgaggtgctgcaatttctcatacgggatgctttcc

SEQ ID NO: 199949 - DNA, 2643 bp, Zea Mays
gacgaatctcaaccctaacgcgctgaaggcaggtctgcaccggcctggtagcgctgtctcgtggagctatctctagaggggataagcaggtgaaggggcaagtttctgcaacttaaataaatagagtgaatatgactgacatgaattctgatgagattcttgaggttcctgacactcctgaccgattacagcagtcaaaataccatgtttccagctctattgttgggagggatggtacaatggcagctgctaatccatcaccacagcgcaaatttagaattagattcaagaacaattccgtgcaaggttcatcaagtcaaaataatggttgtagcatactgcctgcagctttagatactgatcatattttcaaacaagctgaagcagcacagattctggaactgtctaaagactataaggcaaaattttccctacagaaacctgacagcacaaggatatctgttgacagtgaaaagagggctggaaaacatggctttgatcagagcagaagcatttcgaacaatataagttgtagtgtgactggaggaaggaaccctaccttccaagttaaagatggagaggttggtcagcaagatgcaggtcatcagagtgcaaactttctagacataggaccaggttttcctactattcaagtgggaaaaccaggatacagattatgcactcgcactactgataagctgaaaggtgtaacaggtgctgatgtttgtccaggatcaagttctggggaggtcaaaggggacttgatcactaacaaggtcattgcaggacctacaagccctctgcgtgtttttcctcgaaggcatgtgggccaaaaaaggctggtacgcaatggatgtatttccccctctaacatagccaagacagatgcaaaagttaatgaaaaacaggaaatgtgctctttaagtgaacatttggaccatccgcatcagcctgatgcatttgacggaggtgatgtgattgacctcacggagaattcaccaataatgacaaggcagagatctgaagtgaacaataaattgatgtctggacacaatatggacacaagggccgcaaaaaagctgagaacagacagatttggcaggactttggttcggcagtccaaatgtcatgcaaacaacagcagttgttctgaagttagcttatcaggcctcaacaacaatggaaaaggaattgactgtgatatcttggatagtgatcaaactggagaagctaatttgaggggggttgatcttagtactgctggaacttatctaaacaaaaacttttctgatataagcacggagcaaggttggagaacaacacacaaccacacaagtaaattacccatttcgtttatgggtaatataactagcagttccggatgggaatctggatcttctaccacacgatctaatcaaaaccatggatctgctggaggcaagcatagctctgttagtggagcaaacataatagttcctgataagatagggaataaaacaataatgcttggtagagaaaggagaaaacaaacctcaacttcttcccatattggtgaaagctctagtgctgctgacgaacctagaggtgatcttcaatcgtcaaaaatatcagctggcccaaatcatagcagtcatcagcataatattcctgtaataaacattgatgacgtatcccctgaagctagacctagttcgagtggattcactaatagaactcttgatcctaccatagaagcacaattggagtcggatgagttattggctcgccaactccaggagcagctctacaatgaatctgctcgttttgccccaacagaagagattgatgcaattgtagcaatgtcacttcaacatgaagaagatactcatcggacatctaggaccttaaggaggttccaaaaccatactagaggtgctcgggctactcgtttgagttcttatcgaaatgctcttagggctgaattagcaacagcaaacaatatgatttcccgtcagcggaatactgctccaataaatttgggattgagagctgctttagcaagatatcctggtgctttgcacattcaaccaaacattgacttaaatgactatgatgcactgcttgctctggatgaaaataaccaccagcacactggtgcttcagaaagccagatcaataatttgccacagtcagtagttcagtccaatagcattgaagatccatgttctgtctgccttgaaaatccttctgtgggagatactatccgccatttgccttgctttcacaagttccataaagagtgtattgacgagtggcttaggagaaagaaactgtgcccagtctgcaagtttgggattaactgaagtttgccgtaccagtctacagtggagttctacttggtagtggcagcgacgaggtgctgcaatttctcatacgggatgctttcctgcaaagatttttttttgtctaagataaaaaaacaatgtattgctgtgatctgcgcttttgggcatcattttgtatgcacgcacgttttgcttgctatttttgttgtcgtgatccaccaattcccatgaattggttaccagcatcttgtcaatcatttatgtcgccgcatatatgatccatcaattggcatcaatttatttttattttacgttcttg

SEQ ID NO: 199950 - DNA, 1629 bp, Zea Mays
gcgccggcccacacttcaacggatccactcggcaccggaccatttgctattgggcttccttgttcgccggcccatcacttcatcagttcctgctctcctgtcgtcccccaattccaggtcgcctacaggaatactgacacgctgtcgcccccgtcgtgcgacgccgccggctgggcatcgccccggaactcctcctgaaggcccctcatcacgctcttgcaggttctggacggacgtgggaggccccgcggcgcccgtacgtatatctagcggcgagacggcaagctcccgccccatctccgccgcctccgctccccgtcgtccggctgcgctgttgctgctcatacggatcaagctcggctacacccgtttctgcgagcagatcagaggacgccatcgtcggccagccttggaagagtggccaagggtggggatcagcgactcgaagcacttgaagacgagatcaatggagcagaagggccgaaacgctaactgggatcgctggaacccaagagggggcggcaaccttctcctgtttgggggagaaatcgcaatctaagctggcgcctaaggactccacatgcttcgtcggaagcaaaagtggaccagctgggatcttcttctggagacggtagcactccagttatttgcgaacaaagagttataattccaaacgggcatggggagaagcttgttggtttattacatcgaacaagttcaaagaatcttgtgatcctttgtcatggattccaagccacaaaggatgacagcatcttggttgaccttgctgatgccatcacaaaggaaggaattagtgcttttcggtttgatttttctggaaatggggaaagtgatggtgaattccagtatggaagctacagaaaagaggcagctgatttgcgctctgtagtattacatttctcagaacagaaatatgacataattgctcttatcgggcatagcaaaggaggaaatgctgttcttctttatgcttccaagtaccatgatgtccctgccattgtgaacatttctggccgctttgcattagagcgaggtatggagggacgccttgggaagaatttcatgaggagaataaacgaagatggatacattgatgtgaagaataaaaaaggggagttgcagtaccgggtgtcgaaagcgagtctggatgaccggctgagcactgataccctattctccagccgtgccataagcgaaggctgcagggttctcacgatccacggcgccaaagacgagatcgtcccggcggaggacgcccggcagttcgcggcgaacatccgcaaccacgagctgcgcatcgtcgcagatgccaaccaccgttacaccgggcacagggaggagctggcctcgctggtgctgggcttcctcagctcccatccctaccagatcacgtcgcgcttgcgtccgagactctagatagagtagagcacacccacttgaccgtttgcgaacaaaaaaaaatcccctgtaccaatctaagagttgtgggtgtggtgatgtgtttatccagaaccagaacacgagcacctgccgtccaaatcagcgtgactcgctctcgctctagaatttcaaaaaaagtcagtgccaggcatctaacagcaatctcct

SEQ ID NO: 199951 - DNA, 2370 bp, Zea Mays
cccgacgctccatgcatctcggtcacgctttcatctccgccatcatcggctacctgcctcgacatcctccccctccgctcaccgtccaggatctcatcgcgcacgcctagtctgtcccaccccgacatcctcccccaccacgccgtgcacgcctcacgtcgtgcgtctccaccacgcccgccgcacacgccgcgatgagatccaggaaagcagtctgcggatcccccgcgacatcctcctccaccgcgccatggccgcccccgacgtcctcccctccgcgccgcgcccgcccgatccaatgatgaaagcgggtcgctgccacgggtggaaaaagggagcgtctttgggaagaggttaatgctggcgtacctgaaatgcggcgacctgggcgaggcaaggacggtgttcgatggaatgcctcctcaagctgctgatgtccgtgtccggacttcgctgatgagcgcgtacgccaaggcgggtgatttacagaaagttgttttgctgtttaggcagatgcaagtgctgcggggtcagtccagatgcacatgctgtttcctgtgtcctcaagtgcgttgccagtttgggcagccttacgaacgaggtgattcatggattactttgagaagttgggtctcggtcaagcatgcgcggttgcaaatgctctgatcgccgtgtactcgaggtgtggacggatggaggatgcgaagcgggtatttgacagtatgcatccctgggatgccatctcttggaattctatgattggtggatgcttttcaaacggatggcatggtacagctgttgattttttcagcaaaatgtggtctcaaggccttgattctgtacaaagtgggatagatgatgctgctcttggatccaaactggtattcatgtatgtgaaatgtggggacatgggctctgcaagaagggtgcttgatgcgatgtcatcaaaaggtaatgtgcacgtatggaatctgataatgggtgggtacgcaaaggttggtgaatttgaagaaactctcgcttttttgtgcaaatgcatgagcttggaatcgcccccgatgaacatgtcatttcttgccttctgaagtgcatcacttgtttgtcttgtgccagggatggcttggtggctcatggatatatagtaaaattgggtttcagggcagagtgtgcagtttgcaatgcactgatatcattctatgcaaagtccaacatgattggcgatgcagtcttggtgttcgatataatgcctcgtcaagataccatttcttggaattatgtgattagtggatgctcttccaatggactaaacagtgaagctattgagttgttcataagaatgtggacacaaggacatgagctggacttagttacattgctaagtgtttttgccagcttgtgcagtcacgctattggtttgcaggaagggtggttcatggttactcggttaaaactggattgattggggaaacatctcttgcaaactggattcattgttcatgttgctaatgctagcaatttttcctaccagatttcttggtatatcttttaggaagcctgctaaatctacattggaacttatctttaaaatttgtatgtcatcaagtccaattttatttgtgcaataaaagcagggaggcttttatctataacattttccttttatcttttctgtagagatttttctcacaactagctgttaggcaacttctatgttttcctgtagtgtatgtgcgcaaccatgggtcggttcctagggcggactggtccacctggaccgtggaggtggcggggctcgtgagacgcctcgccaagttgaccatggagcagctagtgacggagttcgagaccttggaactccccgtgacgctggtatgcgtggccaaccgacacaaggagcataacatggtgtgccaaaaggtgggcttcaactagccccgacgccatctccatgtccatgcggtgcggcacgcgcctctacgacgtgttgtgtcactgcggtgtcatgggcaccacggatgacgttgtcaacgtgtgcttcaatactgattctttagaaatactttgtgccatattataatattggttgcacattagtccattctatttaatcacacggatttcacaaattataatgatgtttgtcgttccgtatctatgtttcaaactaattttgtactcccgtgacaacgtacgagcacagacctagtttaatctttagtttaagaaaaaatagaaaaaacaaccatccaacagttccttatcaagactccttattcacccgcacgccaaaaatattccctcccctacgcaaatatacgccaccgcgtctcgtcccaattccctgtattttcactttcccgcatgatattc

SEQ ID NO: 199952 - DNA, 2019 bp, Zea Mays
caaaaatgccaacttgacgaggacacagataagtcatgacaacaaggaagtgatcaagcaataaattaactacacataacaaaatctagagcaacgtctgctgggcggaactatgacgaattcatcatcaactccaccacgatcggtatcagtggcaatccagcaacgtctgctgggcgcagccgtatccggcaactccgcggaaatgaaacacatggccctgcgagccccgggggtgctgctggggaccactcctcaggggaacacctgcctccacatcgcctgcatctatggccacgagaggttctgcagggacgtcctggcgctgacgacgaacagccagcagtctccggcggcggcgcctcttctcgtgaccatcaacgcggatggcgagacgccgctgctcgccgccgtggccagcggccacgtctccgtggccttgtttatcctcgggcgctgtcgggaggagcggctgagcgaggcgatcctgacgcaggacaagcgcgggttcaacgcgctgcaccacgccatccgcaacgggcaccgggggctcgccctccagctggtcgacgcggagcccggcctgtcgaaagccgtgaacaaacacgacgagtcgcccttgttcatcgcggtgatgaggaactacgcggacgtcgcggagaaactgctggagatccccgattctgctcacgtgggagcgtatggctacaatgctctgcatgctgccgtgagaagtggcaatccagttgtggcaaaaaggatcatggagacacgtcctgagctggcaagacaagaagacaagcacaaggcgaccccaatgcacatggctgtgcactgggataagattgacgtgctgagagtgctgctggagcatgactggtccttagggtacgtactcgactccagtggtatccctattcttgcttcagttgcgagtcgaggatacgttggtgctgcccaagagcttctcaggcattgcccagatgctccctatgcccctacaaatggcctgttgacatgccttcaccaagccgttcagggtggtcacatggagcttctagaattcttcctgcggtcaaagcatctacggaagctagtcaacatgcgagacggagcggaagagactcctctgcacgacgccgtccgaaagtgcaatcccaagatagtcaatgctttgctgcagcatccggacaccgacgtcacagtgcttaaccggtcgggtaacccggctacctggctactacggggcgaccacgccaagactttaaactggaatgaagtctccatgcttatgttgaaagctgatcctgatgcagcaaacgatacatataaccttcataagcaaatcaaggatcgagtaacttctgaatcaaggaaggatataaagttattgactcaaacatacacaagcaacacttcattagtggcaatcctcattgcaacaatcacctttgctgctgcttttaccttgcctggaggatacgacaatgatgctggaagtgaggggctacccatcatgtcaagaaaggttgcctttcaggcatttttgatctctgactgcttggcaatgtgctcctcactggctgttgccttcatatccatactagcaagatgggaagattttgagtttttagtttactacagatcgtttactaagaaacttatgtgggttagctacgtagcaaccaccatagcatttgcaaccggtctatacacagttttagcccctcgcctcctatggttggctataacaatttgccttatgtcagttctactgccatttcttacttggttactaggtgaatggcctgtcttgaagcttagatttcacctgggcaaaacattcaagtctgagctccttgatatggtctgattttatgaactcgtcttatttcttccaacaactctctgttttactatatctaaaaagatagtatgtatgcctcatgttgtttgaaaagatgtcattgtgattttgaatgtcatgtaaaccttaaattttgtaatttgatgtttatt

SEQ ID NO: 199953 - DNA, 1067 bp, Zea Mays
ttaataataccggcatggcatgcatctctaccgcatattcgagaaaaaagaagaatttcacagtgatttttcttctaccttctatgcagagaagacatttctgggaagaaggtatatgcggggcttttataacgatgttgctcggctgcagtgcttcttcccacaagaagttgcaaaaagcatcaccaccccgatgtttatactcaatccagcatatgatgtttggcaggtagagcatgtgttgtctccagaaggttctgaccgtgaaaatctatggcaaaattgcaggatggatattagcaggtgtagctcaaaacagcttgaagttcttcaaggtttcaggaaagcgctgcttgatgctataaatgaattcaagaagagaagggactggggtatgttcattgactcctgctttatacactgtcagtcaatgaaagctttggcttggcattcgccatcagctgctagagtgaacaacaagacggccgcagaagcggtgggagattggttctttgagcggagggaggtgaaggaaatagattgtgaatatccctgcaacccgacatgctacaatgtggttctcgatcagccctacaaggaagattaactgacttgcagtgttagttgtggtagatttaattcgtaattgactctccatgagttgatatttgtcgagctaaatgtgatcattagcagagttcggactgagacttgtacttgaggcctattaaaatacgaggagaacaatacttacaaagagaattctatacaatgagcgttgatatgacatacagtaggatatatgtgtgtgtcacgagacgagagggaccttgtccttgaaacagggtaggccatcgttttctttgagagggacattgtgctgtgcatggagagataggtaaggctgacaagttgaccaacgcaacagcatgctgtgtattcaccacgtcatctgttgtatttttttgttgttgttgttcaggttggctgatgacagtggcaagggatgttgtctccgtgagcggagcctggttggttgatgcgtttgtgttctccgggggtccagt

SEQ ID NO: 199954 - DNA, 411 bp, Zea Mays
cttgatatgaatataattacatatacgaaaataatcatagaaaggtggttcgagctatgataccagaaggatccagacatatgagcctactagctttcgggcagtcatcatcaactgaagatgaacaggcgtatgatgaacaataatggtacatgaggttccgaagatggaacacttgtgaaaccgtcaagctctggcttgtgtcccttgcggataacagaaaagatcagagctggaacgattccgggtgcaatccgacggaaatgaacaaggcctaatgttgtacgtgtactgtggcatggcagaaccgtccggtttaacccaatttcgggcacacctgccagctatttatcactaagtgcaccagagattatatcaaatccgatagtctgttaagcccatccaatgaaa

SEQ ID NO: 199955 - DNA, 1663 bp, Zea Mays
ctcctgcgcgttcgagaaaaaaaaagaatccatcgatgtcctcgctcggctagaacaccaagcaatcccactcttgacgcaacttctgttgggtggctctgctcgtgcggttattgctgatgtgtgccacggcgatggcatccttggaggtttccttgttcgtgaggacggcgccatctccggcgggacatcaataaggagggcctccagcgcttcaaaaagttcttgatgccgctatgaatgacataaacaactcttttggaaaaggaagtgttacaagattaggcagtgctggtggtgcttttgttgagacattcccaagtggttgtctaacactagattttgctctgggtggcggtcttccaaaaggaagagtagtggaggtatatggtccagaaagcagtggaaagactaccctagctttgcatgcaattgctgaaatacagaagcttggaggaaatgccatgcttgtcgatgcagagcatgcttttgatccagcttattcaaaagctcttggggtagatattgaaaatctgattgtctgccagcctgacaacggagagatggcactagaaattgcggaccgtatgtgcagatctggagcaatagatcttatctgtattgattcggtgtcagcgctcaccccacgtgcagaaattgaaggtgagataggaatgcagcagatgggtctacaagctcgtctgatgagtcaagcattgagaaaaatgtcaggcaatgcctcaaaggctggctgtactcttatgttcttgaatcaaataagatacaagattggagtgttctatgggaatcctgaagtcactagtggagggatagccttgaaattctttgcatctgtccgtcttgagatacggctcattgggaagataaaatctgccaagggagatgaagatgttggtgtgaaggttcgtgtcagagtgcagaagagtaaagtatctaggccctacaagcaagctgaatttgaaatcatttttggggagggtgttagtaaattggggtgcgttcttgattgtgctgagctgatggatgtagttgcaaagaagggttcgtggtacagctacaaagatataagattgggccaaggcagagagaaggcactgcagtatctccgagagagcccaaccacctgcgatgagatagaaaaggtggttcgagctatgataccagaaggatccagacatatgagcctactagctttcgggcagtcatcatcaactgaagatgaacaggcgtatgatgaacaataatggtacatgaggttccgaagatggaacacttgtgaaaccgtcaagctctggcttgtgtcccttgcggataacagaaaagatcagaggtaaccaaccaatatggcagttgtgtgagcgctggagtggagttgactaagaccttgttcgtttctgccggattggtgggtcctaacgattcctgaccggattgtttctctaatttatataaactttgattagctggaacgattccgggtgcaatccgacggaaatgaacaaggcctaatgttgtacgtgtactgtggcatggcagaaccgtccggtttaacccaatttcgggcacacctgccagctatttatcactaagtgcaccagagattatatcaaatccgatagtctgttaagcccatccaatgaaa

SEQ ID NO: 199956 - DNA, 1475 bp, Zea Mays
ctttgtatggtcttcatctttgctgagcaaaaagttcttgatgccgctatgaatgacataaacaactcttttggaaaaggaagtgttacaagattaggcagtgctggtggtgcttttgttgagacattcccaagtggttgtctaacactagattttgctctgggtggcggtcttccaaaaggaagagtagtggaggtatatggtccagaaagcagtggaaagactaccctagctttgcatgcaattgctgaaatacagaagcttggaggaaatgccatgcttgtcgatgcagagcatgcttttgatccagcttattcaaaagctcttggggtagatattgaaaatctgattgtctgccagcctgacaacggagagatggcactagaaattgcggaccgtatgtgcagatctggagcaatagatcttatctgtattgattcggtgtcagcgctcaccccacgtgcagaaattgaaggtgagataggaatgcagcagatgggtctacaagctcgtctgatgagtcaagcattgagaaaaatgtcaggcaatgcctcaaaggctggctgtactcttatgttcttgaatcaaataagatacaagattggagtgttctatgggaatcctgaagtcactagtggagggatagccttgaaattctttgcatctgtccgtcttgagatacggctcattgggaagataaaatctgccaagggagatgaagatgttggtgtgaaggttcgtgtcagagtgcagaagagtaaagtatctaggccctacaagcaagctgaatttgaaatcatttttggggagggtgttagtaaattggggtgcgttcttgattgtgctgagctgatggatgtagttgcaaagaagggttcgtggtacagctacaaagatataagattgggccaaggcagagagaaggcactgcagtatctccgagagagcccaaccacctgcgatgagatagaaaaggtggttcgagctatgataccagaaggatccagacatatgagcctactagctttcgggcagtcatcatcaactgaagatgaacaggcgtatgatgaacaataatggtacatgaggttccgaagatggaacacttgtgaaaccgtcaagctctggcttgtgtcccttgcggataacagaaaagatcagaggtaaccaaccaatatggcagttgtgtgagcgctggagtggagttgactaagaccttgttcgtttctgccggattggtgggtcctaacgattcctgaccggattgtttctctaatttatataaactttgattagctggaacgattccgggtgcaatccgacggaaatgaacaaggcctaatgttgtacgtgtactgtggcatggcagaaccgtccggtttaacccaatttcgggcacacctgccagctatttatcactaagtgcaccagagattatatcaaatccgatagtctgttaagcccatccaatgaaa

SEQ ID NO: 199957 - DNA, 2069 bp, Zea Mays
cacgaatctcgaggcgagctgttcgatcaccactatctgacgtagcttcttcgctcggctcttcttcaccccacccctctcccactcggccactccccccgcggggacaccgagcgctcgccgccgccttcgagttcggagcggagccacagccacgcatgccaatggccgtctccgctgttaccgcctcccatctcgctctctcttttccagcacgtagtcgccggagacgcgctgcgccccgcgccgcggcaggcggcctaacggctcgcgcacggcggctgcgctgcgagttcgtcgccggtggtgggaacggggcgctctccggagaggacgaccctcgcctcgtcgaccgccaaaaagttcttgatgccgctatgaatgacataaacaactcttttggaaaaggaagtgttacaagattaggcagtgctggtggtgcttttgttgagacattcccaagtggttgtctaacactagattttgctctgggtggcggtcttccaaaaggaagagtagtggaggtatatggtccagaaagcagtggaaagactaccctagctttgcatgcaattgctgaaatacagaagcttggaggaaatgccatgcttgtcgatgcagagcatgcttttgatccagcttattcaaaagctcttggggtagatattgaaaatctgattgtctgccagcctgacaacggagagatggcactagaaagtaatccatttcgcacatatagggttcaatacttctttacctaatattggtcgtccctctactttaatcttactgtgcaacttttatctagtaaaggactcatatagtcatattcatccttttgaatttttgtctcaattcataaacttttccactcaggtttgatgttcttcctttaggatccttgtctaaatttaacacatgagaatcctgccgagatggtttgatagtgcaatatttgtttttttctctctaaataagtctctttctgttgaggtttgcataaactttcttttcgcagatgaccagatgtctgccatggaactttactttgtcattttcagatggtacagaacagttacttacagcctctgccccccaaaatagtgcaattctagttgcggaccgtatgtgcagatctggagcaatagatcttatctgtattgattcggtgtcagcgctcaccccacgtgcagaaattgaaggtgagataggaatgcagcagatgggtctacaagctcgtctgatgagtcaagcattgagaaaaatgtcaggcaatgcctcaaaggctggctgtactcttatgttcttgaatcaaataagatacaagattggagtgttctatgggaatcctgaagtcactagtggagggatagccttgaaattctttgcatctgtccgtcttgagatacggctcattgggaagataaaatctgccaagggagatgaagatgttggtgtgaaggttcgtgtcagagtgcagaagagtaaagtatctaggccctacaagcaagctgaatttgaaatcatttttggggagggtgttagtaaattggggtgcgttcttgattgtgctgagctgatggatgtagttgcaaagaagggttcgtggtacagctacaaagatataagattgggccaaggcagagagaaggcactgcagtatctccgagagagcccaaccacctgcgatgagatagaaaaggtggttcgagctatgataccagaaggatccagacatatgagcctactagctttcgggcagtcatcatcaactgaagatgaacaggcgtatgatgaacaataatggtacatgaggttccgaagatggaacacttgtgaaaccgtcaagctctggcttgtgtcccttgcggataacagaaaagatcagagctggaacgattccgggtgcaatccgacggaaatgaacaaggcctaatgttgtacgtgtactgtggcatggcagaaccgtccggtttaacccaatttcgggcacacctgccagctatttatcactaagtgcaccagagattatatcaaatccgatagtctgttaagcccatccaatgaaa

SEQ ID NO: 199958 - DNA, 4177 bp, Zea Mays
ccctttggaccctttccagttgtccacgctcccatctttttcaccaccccttctccttctctctctcccccccaccctcgcccttctcccaccgcgcgcttgccctccggccgggcgcccgtcccgtccttccctacttgtaccagcccctcttttccaatttcatcctctccctccaattccaccatccctctctctctctctcgctcgccacccgcaccactctcgctcggtgtgtgggagagagaggaggggagggagctaggctggcatggccggccgcttgagctgcgcatgcctacaattcagtaccagtactagcaaagcaagctaggtaggagtaacacctccccaattgctacttctactgagttagccatcccgtcgtcccggcagtcacttctacaagtacgcacgcagctacccagcagggcggctatactaatccctccctgcctctgccttccttccgaggaccgccgcggcgggccggggtgcgcgcacccgccatgcagcagcagcaccagggtggcggcggcggcggtggcggaggctcacagttcggggccccgccgccggacatgggccccttctcgccgacgccggctgctaccggtcccatgccgctgagcagcaggcctccgtcggcgcagccgcagcagcaaccgaggaccagctacgaagaattggcgcccatggtgcctggggccgccgctgccagtggcttcgacgacgagacgatgggtagtggcggcggcggcggcgggtcgtcgggcgcgtccagcaaccggtggccgcgggaggagacgcaggcgctcatcaggatccggtcggagatggacgcaaccttccgcgacgcgacgctcaaaggccccctatgggaggacgtctccaggtaaaggagcgagagagagagagacaggggaactcgtcgtcgtcctcgtccagacgcatttgcagtctggttcaagaagcctgtctccggcatgattttttttccctgcggaaagcggctaacggtttcgtggaatttagcagccgcgcccacatgaaatgatggataattatcctgcgtcgctcgctgcgcccaattcccctcgaatttcgttttgttttcccgtttccgtcccagtctaatcaaatgcgtctcgatttcagcgagacggcaggggagagacagagagagagagagagagagctggaaggcagtactcctaggtgcagtagccagtagggtgaaccggtgaaggaatctgggcgcctgcgcgcctggggatcgtaccacggtggtgagtgcgggagtgcaggcagctgctgccgtcgctgcaggctgcaggctgccactgtctcctgctttcatggctccagtttttgggaaaagaaggaaggcagccttcctctcccatcccaatgcggcctccttgctttcatgactcaccagtgcatcatcagcttcacatcccctctgatccctaaaaatacgagatggtttgtgattaactataattccattctgctgcagtacctccacctccttcggctcgcactcttctctcctcgctctcgcctgtccttccaaaattccaattcttcccatcttcttgtctctttcctccagaggccttgatgtgttatgccactacattagatgcttcctccagtaaacgctgccactgcccatcatttaattcttcttcctcgccgatcacttgattctttgcacgtaagtaatggctgaccggaacctttgtgtacgcgtctttgtcactgctgtggctttcaggaagcttgccgacctgggctacaagaggagcgccaagaagtgcaaggagaagtttgagaacgtgcacaagtactacaagcgcacaaaggaaggccgcgccggcaggcaggacggcaagagctaccgcttcttcgaggagctggaggcgttgcacgcagccgcgccgcagccgccaccacagcacttgccggcagccagcaccgccccgcagttgcacgccctcgccgcgccagtatccccgacgccccagcagcagttgccggcatccagcgccgccccgccgttgcacgccttccccgcgccagtatccgcgccgccgccgttgagttcaatgccactgctgacagggccgatgcagccagcgcccatatcatcggcggccccagccccggcaccggtggatctgctcgtggcccaccagcccctcaacctgcaaggcttcagcttctcttccatgtcggactcggagtccgacgacgagtccgaggacgacgacatgacggcggagacaggcggaaaccaggaccgcctcggcaagcggaagcgcggcgacggcggcggcagcagcagcaacaagatgatgtctttcttcgaggggctcatgcagcaggtcgtcgacaggcaggaggaaatgcagcggcggttcctggagaccatggagaagcgggaggccgagcgcacggctcgggaggaggcgtggcgcaggcaggaggtcgcccgcctcaaccgcgagcaggagcagctcgctcaggagcgcgccgccgcggcctccagggacgccgccatcatcgccttcctccagcgcatcggcgggcagtccgtgcagccccctgctaccgccgttgttgtcccaatgccagcaccggtgtcagtccataccacgccgccgaaacaaccttctcgccagcagcagcaaccgccgccgccgtcgccccaggccggccaggcgacaccgcagtcgaagccaatctcagccgcgccgctccagcagcaaccgccacagcagcaaccgaaggatacgtcgcagcaggacgccggcacgccgcgcagcttgcccccggcgtctagccagtcactcgagctggtgcccgtcgccgccacggagcaccacgtcgattccgggctaggaggaggggatggaggtgcggcgtcgtcatcgcggtggcccaagaccgaggtgcacgcgctcatccagctgcgcatggacctggacatgcgctaccaggagacaggtcccaagggtcctctctgggaggatatttcgtccgggatgcggcggctgggatacaaccggagctccaagcggtgcaaggagaagtgggagaacatcaacaagtactacaagaaggtgaaggagagcaacaagaagcggcccgaggactccaagacctgcccatacttccaccagctcgaggccatctacaacagaaagcacctccgcagcctcacaaccgcggccacatcgtccgccgccgccgctcctcgtcccgcctacccagatcagctgaacccgagcaggcaagagatagaggggaagaacatcaacgatgacaagaggaacaacggtggatcaggtggaggcacgcaggtgccgaccagcaatggcgagacagcgacgacgacgacgacgacgacgctcgtcgcgttcgacgccgacaccggcatgaagaagaagacatcgtcagggagttgaacgagcacccgcgtcgggagttcacgacggaggacgagacggacagcgacgacatgggcgacgagtacaccgacgacggcgaggaaggcgaagacgacggcaaaatgcagtacaggatacagttccagaggccgaacccgggcggcaccaacaccgcgccagcaccggcagcagcgacgacggctgcgccagcggtgccgacttcggctccgaccagcaccttcctcgccatggttcaataggggcgcgggcggcacccctctcaaaccgtacatccccaccgttgcggaggatgcagagtgaggctgtggtggtagagcaaaaaggaagagtccagtccctcagtaataacttatttataggtcatcgtcgatcgcgttaaacgagaactgtacatcgatgtaacagtcagtccatgatgtttttcctccctttttttttagttactcccttcccgggacggcagtatacaagtttgtataagagtatacaagaattacagacagttcaagcaacctggagcttgcggaggtgagaaggtgtttttgccgttgggaatctacattttttttgtcgatcctttttcttttaacagtggatataattaaatcctgttacttgttacagtgtacattaatcgtgttgttattccagtactctgccctttgtggcaaatatacatgagcagttttaccgttgcc

SEQ ID NO: 199959 - DNA, 3626 bp, Zea Mays
ctggaacccgccccagcataacttccaagtcccaaataaactcctcggtgactcgccccaacaccaaacagtaaacgacgcttccctccgccgccgtcagatcggagctcgactccgtgccccgcttctccgccgcgatggcggcgccaccgcgccgctccctccttgtccttctctccgggctcctagtcttcgcctcccttgttgccctcaccacagccatctacgaggaccaggtcggcctcgcggactggcatcagaagtacattggcaaagtaaagcaagcagtttaccacagccagaagagtggaaggagacgagttgtggtcttgacagaggaaaatgtgatctcgtctcttgatctacgttctggagatatattctggcgacatgtcattgacaagaatgaccccttggatcagcttggtctatcacttggaaaatatgttctaactctttcttcggggggaactatattaagggcatggaatcttccagatggactgatgatctgggaaactaaccttcgaacttccacagcatcgaactcacagttgcatgttatgtcaaacaataaagcggccagggacaacttagttttagtttcagctgggcgatggatttatgctgtatcaagcattgatggggcaatttcatgggaaaaggagttttctcttgatgacttggaaatcaagcggattctccaatcacctgaaaatgatgttgtgtatgctttaggacttgctggttcctcgaagctagctttgtatcacttgagtgctaaaactggagagatactaaaagatatccaagagtcattccctggtggattatgtggtaaaacagtacttggttctgataatgtgtttgtagcattagataaggccagatcaagtctgttacttattgaattcaagggtgagagaattagctacaacaaggtgctggtttcagatcttgttcaagacttatcaggatcatttgagcttcaatctttgtccagtgacatcatatctttgcaaacgtcatcttctatttccctcctaaagctcaaaggtaccgatggattggaagtacttcagagatttgaccagccagctgcagtgagtgattccttgccaatcacagaaaaagaaaaagcttttgctgtcgtgcaacatttgggttccgaaattgagtttatcgtaaaatttacaagtgacctaagcagtgagattattagagaaaaggttaatatagaccaaaataagggcaacgttgagagggtcttcttgaatagttatattcgaactgacaagtctcatggttttcgagctttggttgtaatggaggatcattcactcttgttaattcaacaaggtgaggttgtttggagcagagacgatgggctggcttcaattgttgatgtaacaacatcagaattgcctgttgagaaggatggtgtatcagttgccggtgtggaacacaatctctttgagtggcttaagggacacatgctgaaactcaaaggaactctaatgcttgctaatgctgatgaagttgctgcaatccaagcattgagactaaagagctctgagaaaaataagatgacaagagaccataatggatttcgcaaactccttgttgtattgacaaaggctggcaaagtgatgactctgcacactggagatggacgcgttatctggtcaaaattgctgccatctcttcgtgcctccagatttggtggagtgccttctgcattaaggatataccaatggcaggtcccgcatcacagtgtgatgcgggaaaacccatctgtacttgttgttggtagaactggagcagaatcttcagctcctggcgtattctctattcttgattcatattctggagaagaacttaactctatgaaacttgaccattctgttttccaaattatccccttaacactgaaggattcatcagagcagcgactttatctgattcttgattccaattccaatgctcatttatacccgaaatctgcagacaccctcaatatatttcttcatgaaatgtcaaacctgtatttctactctgtagatattcaagcaaatgttattaaagggtattcattacagaaatcatgtgatctcaattttggtgatgactactgcttcagtacgaaggagttatggtccatcatctttccttctgattctgaaaggattgttatctctgaaacgcgaaatatgaatgaggttgttcatacccaagctaagacaattggtgatcatgatgtgatgtacaagtacttgtcaaagaatttagtttttgttgctactttgtctcctaaagctgctggtgatattggatctgtgctacctgaagaagcttcacttgttgcatatcttattgatgcagtcactggacgcatacttcatcgtgtaactcatcatggtgcacaaggccctgtacatgcagtcttgagcgagaactgggttgtttatcattattttaatctgcgagctcacagatttgaaatggcggtgattgagatatatgatcaatctagggcggacaataaagatgtcatgaagctcatacttgggaagcataatctttcagcaccaattacatcatacgcccgccctgaggtggcagtaaaatcccagtcatactttttcacccattcagtaaaagcaatggcagttacacaaacggctaaggggatcacttccaagcagcttctgattggtactattggtgaccaggttttggcacttgataagcgctatcttgatccacgccgttcagtgaacccgacacaacaagaaaaagaagagggcattataccattaacagattctttgcctataatacctcagtcctttgtgacgcactctcaccaagtggaggccctgcgagggatcgtttctattcctgcgaagctggagtccacgactcttgttttcacatacggcgtcgatctgttctacacccagcttgccccgtcaaggacctacgattccctcaccgacgaattcagctacgcgctgcttctaatcacgatcgcagtcctggttgctgccatcatcgtcacatggatttggtccgagaagaaggagttgggggacaagtggaggtgagcgaggtctcaaagttgttacgcggaagaaaatttcgggccccagtcagctagctcctttgttttggtcccccccttttttcattttagtgctagagttcacttcacctttgactataggcattttatttatgtaaccattcgacaagaagaaagcctatctgctgtgaaccgacacactgccgaagcagccacctgtgcagctgaaaatttctggagatggcatcaaaggatattagcagagcgcagatggcgagagaatggtttgcttataatgtgtaagctgtgtaccccgactgcaaccgaactctttagcagattatagcaattgctgttgatatagcgtttctgcttctcttataactttaatggcaggaactgtattttgccttcctctcctgccattaccattctgttgtcagcctgtgataggctgggctacaagatgctctttgctgtggtttgcgcaacactcagttctattgctattttctgatccgatcgttcatgtattaatgac

SEQ ID NO: 199960 - DNA, 1309 bp, Zea Mays
tattatatcatcgtacaagtttcttggtgatgtcacagttaatgatgtgtgaagggctgaaacacatgcacagctttgatcctccatacgctcataatgatgttaagcctggtaatgttcttataacctggcgtaaaggacaagcacctgttgcaactttaatggattttggaagtgcaaggcctgcaagaaaggaaatccgttctcgttctgaggcactacagttgcaggaatgggccgctgagcattgctctgctccttaccgggcccctgaattatgggactgcccaagccatgccgatattgatgagaggacagacatctggtctctaggatgcactctttttgctatcatgtacaatgtttcaccatttgagtatgctcttggtgaatctggaggaagtctgcaacttgccattgtaaacgggcagttgaaatggccagcaggacccaaacctccttatcctgatgagcttcgccattttgttatctggatgcttcaacctgaagctgtaatgcgccctcacatttctgatgtggttcttcatgttgacaagctcattgcaaaatacttgccctagatcaccctggagttcctctcatttctttgttatacagtacagagccaatatgatgtaaaattggcccatgcttgacgtcattcagtccttggataggctcaatattgattcttttgtagaactttcaggatattacatcagtctaatgtctgtggatctttgatactcatggagtcacggtgtcatgtaaaaatgtcaaactgaacatcaaagcagctatatgatatccttgcacttgggctacttctctgtgctcttattaaaataataggagaaataacagtacatagtgtcacattcttgttgtgaacttcccaagactcccatttacatcataatggatgatacaccaagtaatcaactaagctgatgtagcaaattacatgatttgaaatcaaatcaactgtctagttacaagaatggatgaacaagcgattattctgtatcttttacaaacgacggttgactgggaaaaaaatacaattcacttctgttttcatgcaaacatccaagagcacagacggcttcagtggcaactcgcaaatgatagttgtcatctttgatgctgaaagaatgatatgatctaataaaatctaatatctgcaaatcttctttagaaggaaaaaggtggtttcagaaggtgtgccttgctgtaggtatcacacaacatagttcttcagttaagcattcaacctaaaaagttaatcttcatgttcctcttcgccttc

SEQ ID NO: 199961 - DNA, 1049 bp, Zea Mays
ctcccgacgaccaaaactctccccgcggaataaaagaagagatattttttttgtcacgccctcggccctccccgcggaataaaagctttttctctggcctcccttcctccgaatccatccatccatccatctattgtctcccttccaattcgatgcctttgtagcgctgctgcctcgccgcgtcgtcgcgggtccccgatttccgcttgctgctgcgcttccaacaccatggacggcgggggatccggcaatgcctccggcggcagcggcggcgcatcgacgtgctgctactacgcgctcctcggcatccgcaagaacgcctccgccaccgacatacgcgccgcttaccggaggctcgcgatgaagtggcacccggaccggtgggccagcgaccccggcgcggccggcgaggccaatcagcggttccagcggatccaggaggcatactccgttctgtcggacaaggggaagaaggccatgtacgacgccgggctcttcgaccccctcgacgacgacgaccaggatttctccgacttcatgcaggagatgctggtgatgatggatagcgtgaaaaacgagaagccggacacgctggaggacctgcagaagatgctggaggacatcgtgaagggcgacggcgggggcgggagcggcgcaggcgggcgggcgccgacggacggtgctcgacggacgcgcgttgcgccctacccgcagccgcagcgtgcgcgcaggtgaccggcgagcccgtgtacgagcgacgtacgcttcccttttggcgaaagggaccggaccccagcaacggacgggaggctctggaaaagaagaataaaaagtttcacctttctttttagttttaggccatcttcggatggtaatctacgcatcctttcatgtagcagtggtcgattgtgtaagctggggtttggggttgggtggtggtggtggtggataccggctgcgccgctgcaataacttgcggacgcgcggcggggactctgatttttttttatctcggcgacatttcgatttcgtgcccaattgtcaaaaaa

SEQ ID NO: 199962 - DNA, 441 bp, Zea Mays
ctcgccgccgcacgcgctctggaaccttcattggccccaaccctcccgacgaccaaaactctccccgcggaataaaagaagagatattttttttgtcacgccctcggccctccccgcggaataaaagctttttctctggcctcccttcctccgaatccatccatccatccatctattgtctcccttccaattcgatgcctttgtagcgctgctgcctcgccgcgtcgtcgcgggtccccgatttccgcttgctgctgcgcttccaacaccatggacggcgggggatccggcaatgcctccggcggcagcggcggcgcatcgacgtgctgctactacgcgctcctcggcatccgcaagaacgcctccgccaccgacatacgcgccgcttaccggaggctcgcgatgacatgctcacacgttccgatctattgccgtgggcgc

SEQ ID NO: 199963 - DNA, 2704 bp, Zea Mays
aaacagcagtgtcattatcgaggtgcctagtgactggttagatttggtatatcaaatcagatcacaggaaacattcagatctcatttaagaaaactaaaacaaaaaacggagaaaaatcaggtgattgcttcctttcctctctctccgttgcccaccacccccaagcccgcgatatattcggcgcagcccacaccttccagcgaatttccgtcacccatctccgcaccgcacccgcaacgcgtctctcttcctctcctggtcctcctgccactccgcctcaacttgctcggctattcccggattgcggctcggggttggtcattggccgtgagggcctttcaagaacgggcggcggcgctttacctgacgcaaattgcgccggtctcctgccttgctgcgcgcttgggggttgggctcaggaatgggggtagagcaggggctgcgtcgcctggctcgattcccatctctctgaacttagatggatgcatctgtaaacaccaagaagaaggttagtttctgtgggaacactggccacagccgctgcggtgaagttcatttagctgctgtgtgctcaggtttggtttgcatttccgttcaagtataaaggaagtagtatttgccattttggcatagcatttgaatagcacaggaacctagaaaacagtgttccagcagtactacgttacactggtgttatactattatagaaaacatggtggatgtggaactgttttataaggacactagtgatcacagcattagctctgaggaagaagatatgcttgtcaggagctgtagcaatctcaatgtgagctttggatatcattgtgattcttatcagagcttttctcctgaaaatgatcatggaaatgacatttctcctaagaacatgtttgggactaatacgatgatggggtcacggaatggctcatttacttgtttgtccggtgctgctattagtgcaaattttacattggcaaatacaaatatttgcaatggtcttattggcgaagaaattttaccagaactagattctccaaactccttcagaaaaattatttcatctccatcaatgtcaagattggactcgttctctacctcacaaggcagtcctgtgtcaactgagagctcaatatttgagatcagtaaaaatatttggaggtccagtgccccaacaactgtatcatccaattttctgactaatacagaggtgaaaatggctggcggagctgctggagaggatagagtccaagctgtgtgctcagagaaaaatggatggctgatttgtgggatatatgatgggtttaatgggagggatgcagctgattttcttgcggtaactctatatgataacatagtatattacttatacctgctggagaatcggataaggcaacaaaatggtttgtacaattcatcagaaagctctcttaatggtctcaaaagtgagttaacactagccatgagaaattcagaaaatgaaggcataaaattttctgaaacatttcgatctggtgtactgaattgcctttctactgctgttgagcaagctgagaatgactttttatgcatggttgaacaagagatggatgatagaccagatttagtttcggtagggtcttgtatcctggttgttcttcttcaaggaacagatctgtgcatcttaaatatgggggacagtagagctgtgcttgcttccatgccatatgtagaaaatggtgctttgaaggctactcaactgacagagacccactcgcttgaaaatcctttggagtaccaaaaacttttagctgaacatcccaatgattcttcagttgtcaggggtaacaaaataaaaggaaagctgaaggttactcgtgcttttggagttggctatctaaagcagaggaagttcaacgacgcactcatgggcattctgcgagtccgcgatttgagcagccctccatatgtttacacaaatccacacacattgagtcacaaagttacagatgatgatttgtttgttgtgcttggtagtgatggcttatttgatttcttcagcaatgatgaagttgttcggttggtttatcaatttatgcatgataatccaatgggggatcctgcaaaatatcttattgagcaacttatactcaaagcagccaaggaagcagctctaacagccgaagaattgatgaggatacctgttgggagtaggagaaagtaccacgatgatgtgactgtcattgttatcatccttggaaatgcacagaggacgatgactgcatcaacttccttgtgaaagaatggagaggtagagagacgggggctatcagctggtaaatttttgtgggttttttgcatacatgtattccaaaatacaattttttttcctgggaatcgcgtggtagtcaataaaaccaaataaaaatgtatatattgtttcgaaatttgggaagtgaacagaaccttttgttaaatcacagggtgcacctgggttcgtttgacctacttctgtacatgaatcaaacatggaggctcgtacttgagctaatgagtccatgagcagagtggtagatcgtttcagtttccgtctgccaattttttttctctgctaataagtatgtgctgtttgtgttgatcttagaattatgactcatggtccgaactcacttgaattgaagtctggttttctattttcttgccccgacaatattgtcaaatgtt

SEQ ID NO: 199964 - DNA, 2525 bp, Zea Mays
ggtgcctagtgactggttagatttggtatatcaaatcagatcacaggaaacattcagatctcatttaagaaaactaaaacaaaaaacggagaaaaatcaggtgattgcttcctttcctctctctccgttgcccaccacccccaagcccgcgatatattcggcgcagcccacaccttccagcgaatttccgtcacccatctccgcaccgcacccgcaacgcgtctctcttcctctcctggtcctcctgccactccgcctcaacttgctcggctattcccggattgcggctcggggttggtcattggccgtgaggtaaacaccaagaagaaggttagtttctgtgggaacactggccacagccgctgcggtgaagttcatttagctgctgtgtgctcaggtttggtttgcatttccgttcaagtataaaggaagtagtatttgccattttggcatagcatttgaatagcacaggaacctagaaaacagtgttccagcagtactacgttacactggtgttatactattatagaaaacatggtggatgtggaactgttttataaggacactagtgatcacagcattagctctgaggaagaagatatgcttgtcaggagctgtagcaatctcaatgtgagctttggatatcattgtgattcttatcagagcttttctcctgaaaatgatcatggaaatgacatttctcctaagaacatgtttgggactaatacgatgatggggtcacggaatggctcatttacttgtttgtccggtgctgctattagtgcaaattttacattggcaaatacaaatatttgcaatggtcttattggcgaagaaattttaccagaactagattctccaaactccttcagaaaaattatttcatctccatcaatgtcaagattggactcgttctctacctcacaaggcagtcctgtgtcaactgagagctcaatatttgagatcagtaaaaatatttggaggtccagtgccccaacaactgtatcatccaattttctgactaatacagaggtgaaaatggctggcggagctgctggagaggatagagtccaagctgtgtgctcagagaaaaatggatggctgatttgtgggatatatgatgggtttaatgggagggatgcagctgattttcttgcggtaactctatatgataacatagtatattacttatacctgctggagaatcggataaggcaacaaaatggtttgtacaattcatcagaaagctctcttaatggtctcaaaagtgagttaacactagccatgagaaattcagaaaatgaaggcataaaattttctgaaacatttcgatctggtgtactgaattgcctttctactgctgttgagcaagctgagaatgactttttatgcatggttgaacaagagatggatgatagaccagatttagtttcggtagggtcttgtatcctggttgttcttcttcaaggaacagatctgtgcatcttaaatatgggggacagtagagctgtgcttgcttccatgccatatgtagaaaatggtgctttgaaggctactcaactgacagagacccactcgcttgaaaatcctttggagtaccaaaaacttttagctgaacatcccaatgattcttcagttgtcaggggtaacaaaataaaaggaaagctgaaggttactcgtgcttttggagttggctatctaaagcagaggaagttcaacgacgcactcatgggcattctgcgagtccgcgatttgagcagccctccatatgtttacacaaatccacacacattgagtcacaaagttacagatgatgatttgtttgttgtgcttggtagtgatggcttatttgatttcttcagcaatgatgaagttgttcggttggtttatcaatttatgcatgataatccaatgggggatcctgcaaaatatcttattgagcaacttatactcaaagcagccaaggaagcagctctaacagccgaagaattgatgaggatacctgttgggagtaggagaaagtaccacgatgatgtgactgtcattgttatcatccttggaaatgcacagaggacgatgactgcatcaacttccttgtgaaagaatggagaggtagagagacgggggctatcagctggtaaatttttgtgggttttttgcatacatgtattccaaaatacaattttttttcctgggaatcgcgtggtagtcaataaaaccaaataaaaatgtatatattgtttcgaaatttgggaagtgaacagaaccttttgttaaatcacagggtgcacctgggttcgtttgacctacttctgtacatgaatcaaacatggaggctcgtacttgagctaatgagtccatgagcagagtggtagatcgtttcagtttccgtctgccaattttttttctctgctaataagtatgtgctgtttgtgttgatcttagaattatgactcatggtccgaactcacttgaattgaagtctggttttctattttcttgccccgacaatattgtcaaatgtt

SEQ ID NO: 199965 - DNA, 2448 bp, Zea Mays
ggtgcctagtgactggttagatttggtatatcaaatcagatcacaggaaacattcagatctcatttaagaaaactaaaacaaaaaacggagaaaaatcaggtgattgcttcctttcctctctctccgttgcccaccacccccaagcccgcgatatattcggcgcagcccacaccttccagcgaatttccgtcacccatctccgcaccgcacccgcaacgcgtctctcttcctctcctggtcctcctgccactccgcctcaacttgctcggctattcccggattgcggctcggggttggtcattggccgtgagtattgcaggtttggtttgcatttccgttcaagtataaaggaagtagtatttgccattttggcatagcatttgaatagcacaggaacctagaaaacagtgttccagcagtactacgttacactggtgttatactattatagaaaacatggtggatgtggaactgttttataaggacactagtgatcacagcattagctctgaggaagaagatatgcttgtcaggagctgtagcaatctcaatgtgagctttggatatcattgtgattcttatcagagcttttctcctgaaaatgatcatggaaatgacatttctcctaagaacatgtttgggactaatacgatgatggggtcacggaatggctcatttacttgtttgtccggtgctgctattagtgcaaattttacattggcaaatacaaatatttgcaatggtcttattggcgaagaaattttaccagaactagattctccaaactccttcagaaaaattatttcatctccatcaatgtcaagattggactcgttctctacctcacaaggcagtcctgtgtcaactgagagctcaatatttgagatcagtaaaaatatttggaggtccagtgccccaacaactgtatcatccaattttctgactaatacagaggtgaaaatggctggcggagctgctggagaggatagagtccaagctgtgtgctcagagaaaaatggatggctgatttgtgggatatatgatgggtttaatgggagggatgcagctgattttcttgcggtaactctatatgataacatagtatattacttatacctgctggagaatcggataaggcaacaaaatggtttgtacaattcatcagaaagctctcttaatggtctcaaaagtgagttaacactagccatgagaaattcagaaaatgaaggcataaaattttctgaaacatttcgatctggtgtactgaattgcctttctactgctgttgagcaagctgagaatgactttttatgcatggttgaacaagagatggatgatagaccagatttagtttcggtagggtcttgtatcctggttgttcttcttcaaggaacagatctgtgcatcttaaatatgggggacagtagagctgtgcttgcttccatgccatatgtagaaaatggtgctttgaaggctactcaactgacagagacccactcgcttgaaaatcctttggagtaccaaaaacttttagctgaacatcccaatgattcttcagttgtcaggggtaacaaaataaaaggaaagctgaaggttactcgtgcttttggagttggctatctaaagcagaggaagttcaacgacgcactcatgggcattctgcgagtccgcgatttgagcagccctccatatgtttacacaaatccacacacattgagtcacaaagttacagatgatgatttgtttgttgtgcttggtagtgatggcttatttgatttcttcagcaatgatgaagttgttcggttggtttatcaatttatgcatgataatccaatgggggatcctgcaaaatatcttattgagcaacttatactcaaagcagccaaggaagcagctctaacagccgaagaattgatgaggatacctgttgggagtaggagaaagtaccacgatgatgtgactgtcattgttatcatccttggaaatgcacagaggacgatgactgcatcaacttccttgtgaaagaatggagaggtagagagacgggggctatcagctggtaaatttttgtgggttttttgcatacatgtattccaaaatacaattttttttcctgggaatcgcgtggtagtcaataaaaccaaataaaaatgtatatattgtttcgaaatttgggaagtgaacagaaccttttgttaaatcacagggtgcacctgggttcgtttgacctacttctgtacatgaatcaaacatggaggctcgtacttgagctaatgagtccatgagcagagtggtagatcgtttcagtttccgtctgccaattttttttctctgctaataagtatgtgctgtttgtgttgatcttagaattatgactcatggtccgaactcacttgaattgaagtctggttttctattttcttgccccgacaatattgtcaaatgtt

SEQ ID NO: 199966 - DNA, 1935 bp, Zea Mays
ggtgcctagtgactggttagatttggtatatcaaatcagatcacaggaaacattcagatctcatttaagaaaactaaaacaaaaaacggagaaaaatcaggtgattgcttcctttcctctctctccgttgcccaccacccccaagcccgcgatatattcggcgcagcccacaccttccagcgaatttccgtcacccatctccgcaccgcacccgcaacgcgtctctcttcctctcctggtcctcctgccactccgcctcaacttgctcggctattcccggattgcggctcggggttggtcattggccgtgagggcctttcaagaacgggcggcggcgctttacctgacgcaaattgcgccggtctcctgccttgctgcgcgcttgggggttgggctcaggaatgggggtagagcaggggctgcgtcgcctggctcgattcccatctctctgaacttagatggatgcatctgtaaacaccaagaagaaggttagtttctgtgggaacactggccacagccgctgcggtgaagttcatttagctgctgtgtgctcaggtcgtatgcgaagcaaccccttctcgcttcagaggtgaaaatggctggcggagctgctggagaggatagagtccaagctgtgtgctcagagaaaaatggatggctgatttgtgggatatatgatgggtttaatgggagggatgcagctgattttcttgcggtaactctatatgataacatagtatattacttatacctgctggagaatcggataaggcaacaaaatggtttgtacaattcatcagaaagctctcttaatggtctcaaaagtgagttaacactagccatgagaaattcagaaaatgaaggcataaaattttctgaaacatttcgatctggtgtactgaattgcctttctactgctgttgagcaagctgagaatgactttttatgcatggttgaacaagagatggatgatagaccagatttagtttcggtagggtcttgtatcctggttgttcttcttcaaggaacagatctgtgcatcttaaatatgggggacagtagagctgtgcttgcttccatgccatatgtagaaaatggtgctttgaaggctactcaactgacagagacccactcgcttgaaaatcctttggagtaccaaaaacttttagctgaacatcccaatgattcttcagttgtcaggggtaacaaaataaaaggaaagctgaaggttactcgtgcttttggagttggctatctaaagcagaggaagttcaacgacgcactcatgggcattctgcgagtccgcgatttgagcagccctccatatgtttacacaaatccacacacattgagtcacaaagttacagatgatgatttgtttgttgtgcttggtagtgatggcttatttgatttcttcagcaatgatgaagttgttcggttggtttatcaatttatgcatgataatccaatgggggatcctgcaaaatatcttattgagcaacttatactcaaagcagccaaggaagcagctctaacagccgaagaattgatgaggatacctgttgggagtaggagaaagtaccacgatgatgtgactgtcattgttatcatccttggaaatgcacagaggacgatgactgcatcaacttccttgtgaaagaatggagaggtagagagacgggggctatcagctgggtgcacctgggttcgtttgacctacttctgtacatgaatcaaacatggaggctcgtacttgagctaatgagtccatgagcagagtggtagatcgtttcagtttccgtctgccaattttttttctctgctaataagtatgtgctgtttgtgttgatcttagaattatgactcatggtccgaactcacttgaattgaagtctggttttctattttcttgccccgacaatattgtcaaatgtt

SEQ ID NO: 199967 - DNA, 2723 bp, Zea Mays
ggtgcctagtgactggttagatttggtatatcaaatcagatcacaggaaacattcagatctcatttaagaaaactaaaacaaaaaacggagaaaaatcaggtgattgcttcctttcctctctctccgttgcccaccacccccaagcccgcgatatattcggcgcagcccacaccttccagcgaatttccgtcacccatctccgcaccgcacccgcaacgcgtctctcttcctctcctggtcctcctgccactccgcctcaacttgctcggctattcccggattgcggctcggggttggtcattggccgtgagggcctttcaagaacgggcggcggcgctttacctgacgcaaattgcgccggtctcctgccttgctgcgcgcttgggggttgggctcaggaatgggggtagagcaggggctgcgtcgcctggctcgattcccatctctctgaacttagatggatgcatctgtaaacaccaagaagaaggttagtttctgtgggaacactggccacagccgctgcggtgaagttcatttagctgctgtgtgctcaggtcgtatgcgaagcaaccccttctcgcttcagtattgcaggtttggtttgcatttccgttcaagtataaaggaagtagtatttgccattttggcatagcatttgaatagcacaggaacctagaaaacagtgttccagcagtactacgttacactggtgttatactattatagaaaacatggtggatgtggaactgttttataaggacactagtgatcacagcattagctctgaggaagaagatatgcttgtcaggagctgtagcaatctcaatgtgagctttggatatcattgtgattcttatcagagcttttctcctgaaaatgatcatggaaatgacatttctcctaagaacatgtttgggactaatacgatgatggggtcacggaatggctcatttacttgtttgtccggtgctgctattagtgcaaattttacattggcaaatacaaatatttgcaatggtcttattggcgaagaaattttaccagaactagattctccaaactccttcagaaaaattatttcatctccatcaatgtcaagattggactcgttctctacctcacaaggcagtcctgtgtcaactgagagctcaatatttgagatcagtaaaaatatttggaggtccagtgccccaacaactgtatcatccaattttctgactaatacagaggtgaaaatggctggcggagctgctggagaggatagagtccaagctgtgtgctcagagaaaaatggatggctgatttgtgggatatatgatgggtttaatgggagggatgcagctgattttcttgcggtaactctatatgataacatagtatattacttatacctgctggagaatcggataaggcaacaaaatggtttgtacaattcatcagaaagctctcttaatggtctcaaaagtgagttaacactagccatgagaaattcagaaaatgaaggcataaaattttctgaaacatttcgatctggtgtactgaattgcctttctactgctgttgagcaagctgagaatgactttttatgcatggttgaacaagagatggatgatagaccagatttagtttcggtagggtcttgtatcctggttgttcttcttcaaggaacagatctgtgcatcttaaatatgggggacagtagagctgtgcttgcttccatgccatatgtagaaaatggtgctttgaaggctactcaactgacagagacccactcgcttgaaaatcctttggagtaccaaaaacttttagctgaacatcccaatgattcttcagttgtcaggggtaacaaaataaaaggaaagctgaaggttactcgtgcttttggagttggctatctaaagcagaggaagttcaacgacgcactcatgggcattctgcgagtccgcgatttgagcagccctccatatgtttacacaaatccacacacattgagtcacaaagttacagatgatgatttgtttgttgtgcttggtagtgatggcttatttgatttcttcagcaatgatgaagttgttcggttggtttatcaatttatgcatgataatccaatgggggatcctgcaaaatatcttattgagcaacttatactcaaagcagccaaggaagcagctctaacagccgaagaattgatgaggatacctgttgggagtaggagaaagtaccacgatgatgtgactgtcattgttatcatccttggaaatgcacagaggacgatgactgcatcaacttccttgtgaaagaatggagaggtagagagacgggggctatcagctggtaaatttttgtgggttttttgcatacatgtattccaaaatacaattttttttcctgggaatcgcgtggtagtcaataaaaccaaataaaaatgtatatattgtttcgaaatttgggaagtgaacagaaccttttgttaaatcacagggtgcacctgggttcgtttgacctacttctgtacatgaatcaaacatggaggctcgtacttgagctaatgagtccatgagcagagtggtagatcgtttcagtttccgtctgccaattttttttctctgctaataagtatgtgctgtttgtgttgatcttagaattatgactcatggtccgaactcacttgaattgaagtctggttttctattttcttgccccgacaatattgtcaaatgtt

SEQ ID NO: 199968 - DNA, 1140 bp, Zea Mays
ggtgcctagtgactggttagatttggtatatcaaatcagatcacaggaaacattcagatctcatttaagaaaactaaaacaaaaaacggagaaaaatcaggtgattgcttcctttcctctctctccgttgcccaccacccccaagcccgcgatatattcggcgcagcccacaccttccagcgaatttccgtcacccatctccgcaccgcacccgcaacgcgtctctcttcctctcctggtcctcctgccactccgcctcaacttgctcggctattcccggattgcggctcggggttggtcattggccgtgagggcctttcaagaacgggcggcggcgctttacctgacgcaaattgcgccggtctcctgccttgctgcgcgcttgggggttgggctcaggaatgggggtagagcaggggctgcgtcgcctggctcgattcccatctctctgaacttagatggatgcatctgtaaacaccaagaagaaggttagtttctgtgggaacactggccacagccgctgcggtgaagttcatttagctgctgtgtgctcaggtcgtatgcgaagcaaccccttctcgcttcagctctaacagccgaagaattgatgaggatacctgttgggagtaggagaaagtaccacgatgatgtgactgtcattgttatcatccttggaaatgcacagaggacgatgactgcatcaacttccttgtgaaagaatggagaggtagagagacgggggctatcagctggtaaatttttgtgggttttttgcatacatgtattccaaaatacaattttttttcctgggaatcgcgtggtagtcaataaaaccaaataaaaatgtatatattgtttcgaaatttgggaagtgaacagaaccttttgttaaatcacagggtgcacctgggttcgtttgacctacttctgtacatgaatcaaacatggaggctcgtacttgagctaatgagtccatgagcagagtggtagatcgtttcagtttccgtctgccaattttttttctctgctaataagtatgtgctgtttgtgttgatcttagaattatgactcatggtccgaactcacttgaattgaagtctggttttctattttcttgccccgacaatattgtcaaatgtt

SEQ ID NO: 199969 - DNA, 2472 bp, Zea Mays
agagctgcctcataaaagctccctgcgtttgctcctgtttgcagcttgcacggaggcggggtagtagaggacggcctcgcaaggtagctctgctcgagcgaggcagcagcactactcccgttcaggagaggaggcgttctccaccgggtcataggaatcctgacgagatggacggcaatgctaggtcgacggcggcgagtcagaagaagtccatcgtcccggacgacgacctcgtggagctgctctggcacaacggaagcgtcgtggcgcagccccaggggcaccacaggccggcgccgccctccgaccgcgactgcccgggcaccagcggccttactgccgaggagaccgccgcgtggttcccggacaccctcgacgactcgctggagaaggacctgtacacgcagctctggtacagcacgatcgccgacgccgccccgcaacacgagggcatgttcccgggccctacctcgcagccttcgccgccgccgcccgttgcgagcagcggcgtcgagtcgagctgggccggcgacatctgctcgaccttctgcggcagcaaccaggtgcccaggacgccggcagggatcagggggaaggacgcggcattgcagccggaggtgccgagcggtgccggcgcgcacgacggcacatcgtcatccggtgggtccggaagcaactatgggggatccgggctgcccagtgacagcgtccatgtccacaagaggaaggggatgtgtagagacgagtcagatagtcggagtgaggtgtctacttttgttttatataacatgtatcctgaacgaactgctagaaaatagagtcgaaatagagatgcttgagtggaatagaattgatgaggaaattgcaggatgccgagtgtgaggaggcaaggagaccaaaccctggcggcggcatgggcggaaacgccggactcgtgcagctgaagtccataatctctcagagaggagaagaagggaccggatcaaagaaaagatgcgtgcgttgcaagagctgatcccacactgcaacaagactgacaaagcatctatactagacgagacgattgagtacctgaagtccctccaaatgcaagttcagatcatgtggatgacttctgggatggtgccaatggtgtttcctggtgctcaccaatacatgccaccaatggctctaggcatgaattcaggttgcatccctgcagcacaaggcctaagtcagatgcgaagattaccatacatgaaccaccccatgccaaatcatatccctctgaactcgtctccagctatgaatccaatgaatccactgaacactgtgaaccagttccaaaacggtcacctcagggaggtaccaagacctggaccccatgtttatggacaccaaatagcacaagccgaagaacacaacagaatactggaagtggcagctagtactgttataccaacttctaaggcagggcaaccacctacttttgatggagtttagagtggtcataaatcctgtaaggtgttgcactgataatctgacgatgcatagcgttggtaccttgagttgtatatctgtgcagtagtgtcagcagcatactctttgacatctaagcttggttctagagttattaataggagcctagtataggtaacaagattgcaagacaactacctgtctaccaccatattctctgtggaagaactggagctgcatactgctgtgcagtacagtgttcaagagagaatggaacagatgagtatttgaagcacaacctgaacaggaaatggtcttctttctggcaatcgctgaaaatactgacgtgatgaggagcagattgcatccctatggctgtattgtaatatatctacatcaacatggcaatacgtgtctggacttggatgctacagttacatgtaaatgcagagttgcaggtttggtcggcaggagcatacatcttcacacgacgtggacagtggactacgggccgagacagtggcccagacacgacacggctcttatatcaggctaggccagacactatttaatgtgtcatgcctcaggccggtccacgagacacggctgaccatctataccacatactctactcctccacggcaacagttcagcatcctcctggcaatggcaacggttcagcatcctccatggcaactgtgcggagccctagactagacctgctgcaagatggcagaccctcatcttcagagcggattgggtttggatcccctgtactcctccttgctcccctgttgctttcagttcgtctcacggttattgttcagacttcagatacatatgtcgttgtgcctggttggctgtatctggacatcagtttccgtgttgctactattttcccccctgtatttctttataacggacattcaccttataaatatacacacaaaacctctatttctatgaagactgtgccgacaaattctcaggattaacgtagtcaccacagtcgcc

SEQ ID NO: 199970 - DNA, 2248 bp, Zea Mays
agagctgcctcataaaagctccctgcgtttgctcctgtttgcagcttgcacggaggcggggtagtagaggacggcctcgcaaggtagctctgctcgagcgaggcagcagcactactcccgttcaggagaggaggcgttctccaccgggtcataggaatcctgacgagatggacggcaatgctaggtcgacggcggcgagtcagaagaagtccatcgtcccggacgacgacctcgtggagctgctctggcacaacggaagcgtcgtggcgcagccccaggggcaccacaggccggcgccgccctccgaccgcgactgcccgggcaccagcggccttactgccgaggagaccgccgcgtggttcccggacaccctcgacgactcgctggagaaggacctgtacacgcagctctggtacagcacgatcgccgacgccgccccgcaacacgagggcatgttcccgggccctacctcgcagccttcgccgccgccgcccgttgcgagcagcggcgtcgagtcgagctgggccggcgacatctgctcgaccttctgcggcagcaaccaggtgcccaggacgccggcagggatcagggggaaggacgcggcattgcagccggaggtgccgagcggtgccggcgcgcacgacggcacatcgtcatccggtgggtccggaagcaactatgggggatccgggctgcccagtgacagcgtccatgtccacaagaggaaggggatgtgtagagacgagtcagatagtcggagtgagagaagaagggaccggatcaaagaaaagatgcgtgcgttgcaagagctgatcccacactgcaacaagacgagacgattgagtacctgaagtccctccaaatgcaagttcagatcatgtggatgacttctgggatggtgccaatggtgtttcctggtgctcaccaatacatgccaccaatggctctaggcatgaattcaggttgcatccctgcagcacaaggcctaagtcagatgcgaagattaccatacatgaaccaccccatgccaaatcatatccctctgaactcgtctccagctatgaatccaatgaatccactgaacactgtgaaccagttccaaaacggtcacctcagggaggtaccaagacctggaccccatgtttatggacaccaaatagcacaagccgaagaacacaacagaatactggaagtggcagctagtactgttataccaacttctaaggcagggcaaccacctacttttgatggagtttagagtggtcataaatcctgtaaggtgttgcactgataatctgacgatgcatagcgttggtaccttgagttgtatatctgtgcagtagtgtcagcagcatactctttgacatctaagcttggttctagagttattaataggagcctagtataggtaacaagattgcaagacaactacctgtctaccaccatattctctgtggaagaactggagctgcatactgctgtgcagtacagtgttcaagagagaatggaacagatgagtatttgaagcacaacctgaacaggaaatggtcttctttctggcaatcgctgaaaatactgacgtgatgaggagcagattgcatccctatggctgtattgtaatatatctacatcaacatggcaatacgtgtctggacttggatgctacagttacatgtaaatgcagagttgcaggtttggtcggcaggagcatacatcttcacacgacgtggacagtggactacgggccgagacagtggcccagacacgacacggctcttatatcaggctaggccagacactatttaatgtgtcatgcctcaggccggtccacgagacacggctgaccatctataccacatactctactcctccacggcaacagttcagcatcctcctggcaatggcaacggttcagcatcctccatggcaactgtgcggagccctagactagacctgctgcaagatggcagaccctcatcttcagagcggattgggtttggatcccctgtactcctccttgctcccctgttgctttcagttcgtctcacggttattgttcagacttcagatacatatgtcgttgtgcctggttggctgtatctggacatcagtttccgtgttgctactattttcccccctgtatttctttataacggacattcaccttataaatatacacacaaaacctctatttctatgaagactgtgccgacaaattctcaggattaacgtagtcaccacagtcgcc

SEQ ID NO: 199971 - DNA, 2404 bp, Zea Mays
ctgcaagctacagagctgcctcataaaagctccctgcgtttgctcctgtttgcagcttgcacggaggcggggtagtagaggacggcctcgcaaggtagctctgctcgagcgaggcagcagcactactcccgttcaggagaggaggcgttctccaccgggtcataggaatcctgacgagatggacggcaatgctaggtcgacggcggcgagtcagaagaagtccatcgtcccggacgacgacctcgtggagctgctctggcacaacggaagcgtcgtggcgcagccccaggggcaccacaggccggcgccgccctccgaccgcgactgcccgggcaccagcggccttactgccgaggagaccgccgcgtggttcccggacaccctcgacgactcgctggagaaggacctgtacacgcagctctggtacagcacgatcgccgacgccgccccgcaacacgagggcatgttcccgggccctacctcgcagccttcgccgccgccgcccgttgcgagcagcggcgtcgagtcgagctgggccggcgacatctgctcgaccttctgcggcagcaaccaggtgcccaggacgccggcagggatcagggggaaggacgcggcattgcagccggaggtgccgagcggtgccggcgcgcacgacggcacatcgtcatccggtgggtccggaagcaactatgggggatccgggctgcccagtgacagcgtccatgtccacaagaggaaggggatgtgtagagacgagtcagatagtcggagtgaggatgccgagtgtgaggaggcaaggagaccaaaccctggcggcggcatgggcggaaacgccggactcgtgcagctgaagtccataatctctcagagagggcgttattggctgctgctgatgtagagaagaagggaccggatcaaagaaaagatgcgtgcgttgcaagagctgatcccacactgcaacaagactgacaaagcatctatactagacgagacgattgagtacctgaagtccctccaaatgcaagttcagatcatgtggatgacttctgggatggtgccaatggtgtttcctggtgctcaccaatacatgccaccaatggctctaggcatgaattcaggttgcatccctgcagcacaaggcctaagtcagatgcgaagattaccatacatgaaccaccccatgccaaatcatatccctctgaactcgtctccagctatgaatccaatgaatccactgaacactgtgaaccagttccaaaacggtcacctcagggaggtaccaagacctggaccccatgtttatggacaccaaatagcacaagccgaagaacacaacagaatactggaagtggcagctagtactgttataccaacttctaaggcagggcaaccacctacttttgatggagtttagagtggtcataaatcctgtaaggtgttgcactgataatctgacgatgcatagcgttggtaccttgagttgtatatctgtgcagtagtgtcagcagcatactctttgacatctaagcttggttctagagttattaataggagcctagtataggtaacaagattgcaagacaactacctgtctaccaccatattctctgtggaagaactggagctgcatactgctgtgcagtacagtgttcaagagagaatggaacagatgagtatttgaagcacaacctgaacaggaaatggtcttctttctggcaatcgctgaaaatactgacgtgatgaggagcagattgcatccctatggctgtattgtaatatatctacatcaacatggcaatacgtgtctggacttggatgctacagttacatgtaaatgcagagttgcaggtttggtcggcaggagcatacatcttcacacgacgtggacagtggactacgggccgagacagtggcccagacacgacacggctcttatatcaggctaggccagacactatttaatgtgtcatgcctcaggccggtccacgagacacggctgaccatctataccacatactctactcctccacggcaacagttcagcatcctcctggcaatggcaacggttcagcatcctccatggcaactgtgcggagccctagactagacctgctgcaagatggcagaccctcatcttcagagcggattgggtttggatcccctgtactcctccttgctcccctgttgctttcagttcgtctcacggttattgttcagacttcagatacatatgtcgttgtgcctggttggctgtatctggacatcagtttccgtgttgctactattttcccccctgtatttctttataacggacattcaccttataaatatacacacaaaacctctatttctatgaagactgtgccgacaaattctcaggattaacgtagtcaccacagtcgcc

SEQ ID NO: 199972 - DNA, 2440 bp, Zea Mays
cttgtgtctgctcatgctgtgccgtggtggccgtgggctgcaagctacagagctgcctcataaaagctccctgcgtttgctcctgtttgcagcttgcacggaggcggggtagtagaggacggcctcgcaaggtagctctgctcgagcgaggcagcagcactactcccgttcaggagaggaggcgttctccaccgggtcataggaatcctgacgagatggacggcaatgctaggtcgacggcggcgagtcagaagaagtccatcgtcccggacgacgacctcgtggagctgctctggcacaacggaagcgtcgtggcgcagccccaggggcaccacaggccggcgccgccctccgaccgcgactgcccgggcaccagcggccttactgccgaggagaccgccgcgtggttcccggacaccctcgacgactcgctggagaaggacctgtacacgcagctctggtacagcacgatcgccgacgccgccccgcaacacgagggcatgttcccgggccctacctcgcagccttcgccgccgccgcccgttgcgagcagcggcgtcgagtcgagctgggccggcgacatctgctcgaccttctgcggcagcaaccaggtgcccaggacgccggcagggatcagggggaaggacgcggcattgcagccggaggtgccgagcggtgccggcgcgcacgacggcacatcgtcatccggtgggtccggaagcaactatgggggatccgggctgcccagtgacagcgtccatgtccacaagaggaaggggatgtgtagagacgagtcagatagtcggagtgaggatgccgagtgtgaggaggcaaggagaccaaaccctggcggcggcatgggcggaaacgccggactcgtgcagctgaagtccataatctctcagagaggcgttattggctgctgctgatgtagagaagaagggaccggatcaaagaaaagatgcgtgcgttgcaagagctgatcccacactgcaacaagactgacaaagcatctatactagacgagacgattgagtacctgaagtccctccaaatgcaagttcagatcatgtggatgacttctgggatggtgccaatggtgtttcctggtgctcaccaatacatgccaccaatggctctaggcatgaattcaggttgcatccctgcagcacaaggcctaagtcagatgcgaagattaccatacatgaaccaccccatgccaaatcatatccctctgaactcgtctccagctatgaatccaatgaatccactgaacactgtgaaccagttccaaaacggtcacctcagggaggtaccaagacctggaccccatgtttatggacaccaaatagcacaagccgaagaacacaacagaatactggaagtggcagctagtactgttataccaacttctaaggcagggcaaccacctacttttgatggagtttagagtggtcataaatcctgtaaggtgttgcactgataatctgacgatgcatagcgttggtaccttgagttgtatatctgtgcagtagtgtcagcagcatactctttgacatctaagcttggttctagagttattaataggagcctagtataggtaacaagattgcaagacaactacctgtctaccaccatattctctgtggaagaactggagctgcatactgctgtgcagtacagtgttcaagagagaatggaacagatgagtatttgaagcacaacctgaacaggaaatggtcttctttctggcaatcgctgaaaatactgacgtgatgaggagcagattgcatccctatggctgtattgtaatatatctacatcaacatggcaatacgtgtctggacttggatgctacagttacatgtaaatgcagagttgcaggtttggtcggcaggagcatacatcttcacacgacgtggacagtggactacgggccgagacagtggcccagacacgacacggctcttatatcaggctaggccagacactatttaatgtgtcatgcctcaggccggtccacgagacacggctgaccatctataccacatactctactcctccacggcaacagttcagcatcctcctggcaatggcaacggttcagcatcctccatggcaactgtgcggagccctagactagacctgctgcaagatggcagaccctcatcttcagagcggattgggtttggatcccctgtactcctccttgctcccctgttgctttcagttcgtctcacggttattgttcagacttcagatacatatgtcgttgtgcctggttggctgtatctggacatcagtttccgtgttgctactattttcccccctgtatttctttataacggacattcaccttataaatatacacacaaaacctctatttctatgaagactgtgccgacaaattctcaggattaacgtagtcaccacagtcgcc

SEQ ID NO: 199973 - DNA, 1512 bp, Zea Mays
ttttgatcaaggttgttgagcgatgataaataatctgtgggagattgtaccagcagaacctggtgataggttcctaagcatgcttccaacatggcatgcatatgagcgtgcttgtgagtacttcatcttctcgtatggtatccagcaagtttacactactgttaagtacctgaagattctagtatacaagaaaattcattcagcaatcgggatttcaaaggctggtattagtggcggtggaagtcttccgatgcatgttgataagttttttgaggccattggcattaaagtacaaaacggctatggccttactgagacttctcctgttgttgctgctagacgaccattctgtaatgttcttgggacagttggtcacccaataaagcatactgaaatcaagatttttgacattgagactggtgaggtccttccagatggttcaaaggggattgtgaaaattaaaggaccacaagtaatgaagggatactataagaacccatcggctacaaatgaagcttttgatcaagagggttggttcagcactggagatgtaggttggatagtacctcatcatgccatggggccaagtcgccagtgtggagggatgattgttcttgaagggcgtgcaaaggatacaatagtcctatctacaggtgaaaatgttgaacctgctgagatcgaggaagcagccagcaggagtaccttgattaatcagatagttgtgatcgggcaggatcaacggcgtcttggtgccataattgttcccaacaatgatgaagttctggcagaagcaaaaaggaagtccatccttggtgaggatggcgagctagcgaaagataaggtcatgaacatgctatatgatgaattgagaacctggacagcgcactgctccttccgtgtcgggccaattctggttgtcgacgaaccattcacgattgacaatggtctgatgacacccaccatgaaaataaggagggacaaagtgacagacaagtacaggagggagatcgaagccttgttcaagtgacacgcggagcgcgtgcgcacccatcagagttcccttttccgagtacaagacggcaaccgtacggcgtacatacagacacctgcaagctgcaatgcgtccatgtaccatgtatacgtacgtacttgcgtacggtcggaagatgactgggttggaactggaagagatgatatggcggagcggccggtgggagaacaccatgagacttgttactagactcgaatgttcgtaggttgcatgagcaaaatgacatgtgttccacaattgcatcattcaataagcgattcactgagccagataaggtcttgttcggttagttctcaatccatatatatggattgagtgagtttaaatcccaaacaagtcaaacttcttcttaatttttttcaatctcatccaatccatatgtaatgacaataaccgaacaaggcatgaatcaataaaattctcccaaaccaccgcaggtaccatgcaattggtaaaaatat

SEQ ID NO: 199974 - DNA, 2821 bp, Zea Mays
atggagtcgaggtacggggtcgtggaacatggtatgctacactacttggaagagtttttttcacttcagatagaacatcaagtacgtaaaaagtgctcacctctactggagagtgctctgctgcctggtggaagtgattcgactctgcatgaatggaaggctgttccagatatttggaggacagcagcagaaaaatatgctgacctcgtagctgtggtagatccttaccatgaaccgccaacggaatggacgtatacacagcttgagcaagaaatattggatttttctcaaggtctaagggccattggtgttgctccggatgaaaagctagcactttttgctgataactcatgtcgttggctagttgcagatcaaggaatcatggcaaccggtgctataaatgttgttaggggaacaagatcatctgatgaagaattgtttcaaatatacactcattcagaaagagtctttcatgtcaaggattaatacaagattcattgttcttctttggggtgacaaatcatgcatagatagccaagctattaaggatataccactttatggatacaaggatatcatcgaacttggtcgagaaagccgcaatgcactgtttctttccgacgagcaaggtcagcaagatgtctttgaatctattagtcctgaagatgtggccacactaatatatactagtggaacaagtggcacaccaaaaggcgtaatgcttacccaccgaaatctcttgcatcaggtgaagatagaaacattacaattttgatcaaggttgttgagcgatggtatgccatgtgtattagttacttttttgttttaccttgatgtgattttctaatatctatgacttgaacataagcactcgtgctattaatattatgtttttccctggaatgtcctgtaattatttcaagcacccttctaaagaatgtgagcctaattgcttaggttttctgtttgatatatccctcgtacacattttgtgctgttcttttccacagataaataatctgtgggagattgtaccagcagaacctggtgataggttcctaagcatgcttccaacatggcatgcatatgagcgtgcttgtgagtacttcatcttctcgtatggtatccagcaagtttacactactgttaagtacctgaaggaagatttgcagcgttaccagcctcaatatattatatcagtaccactggtctacgaaactctgtacatttcaattcataggcagatttcatccagttctgctgctcgaaaaattattgctctttcacttatcaagataagtttcctatatatggaggcaaagaagatctatgagggaacagttttatcaaacaatcttgtcaaaccatcagtcatcgcctatatgatgaagtggctgtgggcaagattggttgctgcatttctttggcctttacataatctggcgaagattctagtatacaagaaaattcattcagcaatcgggatttcaaaggctggtattagtggcggtggaagtcttccgatgcatgttgataagttttttgaggccattggcattaaagtacaaaacggctatggccttactgagacttctcctgttgttgctgctagacgaccattctgtaatgttcttgggacagttggtcacccaataaagcatactgaaatcaagatttttgacattgagactggtgaggtccttccagatggttcaaaggggattgtgaaaattaaaggaccacaagtaatgaagggatactataagaacccatcggctacaaatgaagcttttgatcaagagggttggttcagcactggagatgtaggttggatagtacctcatcatgccatggggccaagtcgccagtgtggagggatgattgttcttgaagggcgtgcaaaggatacaatagtcctatctacaggtgaaaatgttgaacctgctgagatcgaggaagcagccagcaggagtaccttgattaatcagatagttgtgatcgggcaggatcaacggcgtcttggtgccataattgttcccaacaatgatgaagttctggcagaagcaaaaaggaagtccatccttggtgaggatggcgagctagcgaaagataaggtcatgaacatgctatatgatgaattgagaacctggaggaagtgcttaattattttgttcacgcgtttcaggacagcgcactgctccttccgtgtcgggccaattctggttgtcgacgaaccattcacgattgacaatggtctgatgacacccaccatgaaaataaggagggacaaagtgacagacaagtacaggagggagatcgaagccttgttcaagtgacacgcggagcgcgtgcgcacccatcagagttcccttttccgagtacaagacggcaaccgtacggcgtacatacagacacctgcaagctgcaatgcgtccatgtaccatgtatacgtacgtacttgcgtacggtcggaagatgactgggttggaactggaagagatgatatggcggagcggccggtgggagaacaccatgagacttgttactagactcgaatgttcgtaggttgcatgagcaaaatgacatgtgttccacaattgcatcattcaataagcgattcactgagccagataaggtcttgttcggttagttctcaatccatatatatggattgagtgagtttaaatcccaaacaagtcaaacttcttcttaatttttttcaatctcatccaatccatatgtaatgacaataaccgaacaaggcatgaatcaataaaattctcccaaaccaccgcaggtaccatgcaattggtaaaaatat

SEQ ID NO: 199975 - DNA, 2523 bp, Zea Mays
atggagtcgaggtacggggtcgtggaacatggtatgctacactacttggaagagtttttttcacttcagatagaacatcaagtacgtaaaaagtgctcacctctactggagagtgctctgctgcctggtggaagtgattcgactctgcatgaatggaaggctgttccagatatttggaggacagcagcagaaaaatatgctgacctcgtagctgtggtagatccttaccatgaaccgccaacggaatggacgtatacacagcttgagcaagaaatattggatttttctcaaggtctaagggccattggtgttgctccggatgaaaagctagcactttttgctgataactcatgtcgttggctagttgcagatcaaggaatcatggcaaccggtgctataaatgttgttaggggaacaagatcatctgatgaagaattgtttcaaatatacactcattcagaaagagtctttcatgtcaaggattaatacaagattcattgttcttctttggggtgacaaatcatgcatagatagccaagctattaaggatataccactttatggatacaaggatatcatcgaacttggtcgagaaagccgcaatgcactgtttctttccgacgagcaaggtcagcaagatgtctttgaatctattagtcctgaagatgtggccacactaatatatactagtggaacaagtggcacaccaaaaggcgtaatgcttacccaccgaaatctcttgcatcagataaataatctgtgggagattgtaccagcagaacctggtgataggttcctaagcatgcttccaacatggcatgcatatgagcgtgcttgtgagtacttcatcttctcgtatggtatccagcaagtttacactactgttaagtacctgaaggaagatttgcagcgttaccagcctcaatatattatatcagtaccactggtctacgaaactctgtacatttcaattcataggcagatttcatccagttctgctgctcgaaaaattattgctctttcacttatcaagataagtttcctatatatggaggcaaagaagatctatgagggaacagttttatcaaacaatcttgtcaaaccatcagtcatcgcctatatgatgaagtggctgtgggcaagattggttgctgcatttctttggcctttacataatctggcgaagattctagtatacaagaaaattcattcagcaatcgggatttcaaaggctggtattagtggcggtggaagtcttccgatgcatgttgataagttttttgaggccattggcattaaagtacaaaacggctatggccttactgagacttctcctgttgttgctgctagacgaccattctgtaatgttcttgggacagttggtcacccaataaagcatactgaaatcaagatttttgacattgagactggtgaggtccttccagatggttcaaaggggattgtgaaaattaaaggaccacaagtaatgaagggatactataagaacccatcggctacaaatgaagcttttgatcaagagggttggttcagcactggagatgtaggttggatagtacctcatcatgccatggggccaagtcgccagtgtggagggatgattgttcttgaagggcgtgcaaaggatacaatagtcctatctacaggtgaaaatgttgaacctgctgagatcgaggaagcagccagcaggagtaccttgattaatcagatagttgtgatcgggcaggatcaacggcgtcttggtgccataattgttcccaacaatgatgaagttctggcagaagcaaaaaggaagtccatccttggtgaggatggcgagctagcgaaagataaggtcatgaacatgctatatgatgaattgagaacctggacagcgcactgctccttccgtgtcgggccaattctggttgtcgacgaaccattcacgattgacaatggtctgatgacacccaccatgaaaataaggagggacaaagtgacagacaagtacaggagggagatcgaagccttgttcaagtgacacgcggagcgcgtgcgcacccatcagagttcccttttccgagtacaagacggcaaccgtacggcgtacatacagacacctgcaagctgcaatgcgtccatgtaccatgtatacgtacgtacttgcgtacggtcggaagatgactgggttggaactggaagagatgatatggcggagcggccggtgggagaacaccatgagacttgttactagactcgaatgttcgtaggttgcatgagcaaaatgacatgtgttccacaattgcatcattcaataagcgattcactgagccagataaggtcttgttcggttagttctcaatccatatatatggattgagtgagtttaaatcccaaacaagtcaaacttcttcttaatttttttcaatctcatccaatccatatgtaatgacaataaccgaacaaggcatgaatcaataaaattctcccaaaccaccgcaggtaccatgcaattggtaaaaatat

SEQ ID NO: 199976 - DNA, 2575 bp, Zea Mays
atggagtcgaggtacggggtcgtggaacatggtatgctacactacttggaagagtttttttcacttcagatagaacatcaagtacgtaaaaagtgctcacctctactggagagtgctctgctgcctggtggaagtgattcgactctgcatgaatggaaggctgttccagatatttggaggacagcagcagaaaaatatgctgacctcgtagctgtggtagatccttaccatgaaccgccaacggaatggacgtatacacagcttgagcaagaaatattggatttttctcaaggtctaagggccattggtgttgctccggatgaaaagctagcactttttgctgataactcatgtcgttggctagttgcagatcaaggaatcatggcaaccggtgctataaatgttgttaggggaacaagatcatctgatgaagaattgtttcaaatatacactcattcagaaagcacagcattgcacttgttgtggacagtcctcaattctttaaccggcttgcagagtctttcatgtcaaggattaatacaagattcattgttcttctttggggtgacaaatcatgcatagatagccaagctattaaggatataccactttatggatacaaggatatcatcgaacttggtcgagaaagccgcaatgcactgtttctttccgacgagcaaggtcagcaagatgtctttgaatctattagtcctgaagatgtggccacactaatatatactagtggaacaagtggcacaccaaaaggcgtaatgcttacccaccgaaatctcttgcatcagataaataatctgtgggagattgtaccagcagaacctggtgataggttcctaagcatgcttccaacatggcatgcatatgagcgtgcttgtgagtacttcatcttctcgtatggtatccagcaagtttacactactgttaagtacctgaaggaagatttgcagcgttaccagcctcaatatattatatcagtaccactggtctacgaaactctgtacatttcaattcataggcagatttcatccagttctgctgctcgaaaaattattgctctttcacttatcaagataagtttcctatatatggaggcaaagaagatctatgagggaacagttttatcaaacaatcttgtcaaaccatcagtcatcgcctatatgatgaagtggctgtgggcaagattggttgctgcatttctttggcctttacataatctggcgaagattctagtatacaagaaaattcattcagcaatcgggatttcaaaggctggtattagtggcggtggaagtcttccgatgcatgttgataagttttttgaggccattggcattaaagtacaaaacggctatggccttactgagacttctcctgttgttgctgctagacgaccattctgtaatgttcttgggacagttggtcacccaataaagcatactgaaatcaagatttttgacattgagactggtgaggtccttccagatggttcaaaggggattgtgaaaattaaaggaccacaagtaatgaagggatactataagaacccatcggctacaaatgaagcttttgatcaagagggttggttcagcactggagatgtaggttggatagtacctcatcatgccatggggccaagtcgccagtgtggagggatgattgttcttgaagggcgtgcaaaggatacaatagtcctatctacaggtgaaaatgttgaacctgctgagatcgaggaagcagccagcaggagtaccttgattaatcagatagttgtgatcgggcaggatcaacggcgtcttggtgccataattgttcccaacaatgatgaagttctggcagaagcaaaaaggaagtccatccttggtgaggatggcgagctagcgaaagataaggtcatgaacatgctatatgatgaattgagaacctggacagcgcactgctccttccgtgtcgggccaattctggttgtcgacgaaccattcacgattgacaatggtctgatgacacccaccatgaaaataaggagggacaaagtgacagacaagtacaggagggagatcgaagccttgttcaagtgacacgcggagcgcgtgcgcacccatcagagttcccttttccgagtacaagacggcaaccgtacggcgtacatacagacacctgcaagctgcaatgcgtccatgtaccatgtatacgtacgtacttgcgtacggtcggaagatgactgggttggaactggaagagatgatatggcggagcggccggtgggagaacaccatgagacttgttactagactcgaatgttcgtaggttgcatgagcaaaatgacatgtgttccacaattgcatcattcaataagcgattcactgagccagataaggtcttgttcggttagttctcaatccatatatatggattgagtgagtttaaatcccaaacaagtcaaacttcttcttaatttttttcaatctcatccaatccatatgtaatgacaataaccgaacaaggcatgaatcaataaaattctcccaaaccaccgcaggtaccatgcaattggtaaaaatat

SEQ ID NO: 199977 - DNA, 2559 bp, Zea Mays
atggagtcgaggtacggggtcgtggaacatggtatgctacactacttggaagagtttttttcacttcagatagaacatcaagtacgtaaaaagtgctcacctctactggagagtgctctgctgcctggtggaagtgattcgactctgcatgaatggaaggctgttccagatatttggaggacagcagcagaaaaatatgctgacctcgtagctgtggtagatccttaccatgaaccgccaacggaatggacgtatacacagcttgagcaagaaatattggatttttctcaaggtctaagggccattggtgttgctccggatgaaaagctagcactttttgctgataactcatgtcgttggctagttgcagatcaaggaatcatggcaaccggtgctataaatgttgttaggggaacaagatcatctgatgaagaattgtttcaaatatacactcattcagaaagtcctcaattctttaaccggcttgcagagtctttcatgtcaaggattaatacaagattcattgttcttctttggggtgacaaatcatgcatagatagccaagctattaaggatataccactttatggatacaaggatatcatcgaacttggtcgagaaagccgcaatgcactgtttctttccgacgagcaaggtcagcaagatgtctttgaatctattagtcctgaagatgtggccacactaatatatactagtggaacaagtggcacaccaaaaggcgtaatgcttacccaccgaaatctcttgcatcaggtgaagatagaaacattacaattttgatcaaggttgttgagcgatggtatgccatgtgtattagttacttttttgttttaccttgatgtgattttctaatatctatgacttgaacataagcactcgtgctattaatattatgtttttccctggaatgtcctgtaattatttcaagcacccttctaaagaatgtgagcctaattgcttaggttttctgtttgatatatccctcgtacacattttgtgctgttcttttccacagataaataatctgtgggagattgtaccagcagaacctggtgataggttcctaagcatgcttccaacatggcatgcatatgagcgtgcttgtgagtacttcatcttctcgtatggtatccagcaagtttacactactgttaagtacctgaagattctagtatacaagaaaattcattcagcaatcgggatttcaaaggctggtattagtggcggtggaagtcttccgatgcatgttgataagttttttgaggccattggcattaaagtacaaaacggctatggccttactgagacttctcctgttgttgctgctagacgaccattctgtaatgttcttgggacagttggtcacccaataaagcatactgaaatcaagatttttgacattgagactggtgaggtccttccagatggttcaaaggggattgtgaaaattaaaggaccacaagtaatgaagggatactataagaacccatcggctacaaatgaagcttttgatcaagagggttggttcagcactggagatgtaggttggatagtacctcatcatgccatggggccaagtcgccagtgtggagggatgattgttcttgaagggcgtgcaaaggatacaatagtcctatctacaggtgaaaatgttgaacctgctgagatcgaggaagcagccagcaggagtaccttgattaatcagatagttgtgatcgggcaggatcaacggcgtcttggtgccataattgttcccaacaatgatgaagttctggcagaagcaaaaaggaagtccatccttggtgaggatggcgagctagcgaaagataaggtcatgaacatgctatatgatgaattgagaacctggaggaagtgcttaattattttgttcacgcgtttcaggacagcgcactgctccttccgtgtcgggccaattctggttgtcgacgaaccattcacgattgacaatggtctgatgacacccaccatgaaaataaggagggacaaagtgacagacaagtacaggagggagatcgaagccttgttcaagtgacacgcggagcgcgtgcgcacccatcagagttcccttttccgagtacaagacggcaaccgtacggcgtacatacagacacctgcaagctgcaatgcgtccatgtaccatgtatacgtacgtacttgcgtacggtcggaagatgactgggttggaactggaagagatgatatggcggagcggccggtgggagaacaccatgagacttgttactagactcgaatgttcgtaggttgcatgagcaaaatgacatgtgttccacaattgcatcattcaataagcgattcactgagccagataaggtcttgttcggttagttctcaatccatatatatggattgagtgagtttaaatcccaaacaagtcaaacttcttcttaatttttttcaatctcatccaatccatatgtaatgacaataaccgaacaaggcatgaatcaataaaattctcccaaaccaccgcaggtaccatgcaattggtaaaaatat

SEQ ID NO: 199978 - DNA, 2540 bp, Zea Mays
atggagtcgaggtacggggtcgtggaacatggtatgctacactacttggaagagtttttttcacttcagatagaacatcaagtacgtaaaaagtgctcacctctactggagagtgctctgctgcctggtggaagtgattcgactctgcatgaatggaaggctgttccagatatttggaggacagcagcagaaaaatatgctgacctcgtagctgtggtagatccttaccatgaaccgccaacggaatggacgtatacacagcttgagcaagaaatattggatttttctcaaggtctaagggccattggtgttgctccggatgaaaagctagcactttttgctgataactcatgtcgttggctagttgcagatcaaggaatcatggcaaccggtgctataaatgttgttaggggaacaagatcatctgatgaagaattgtttcaaatatacactcattcagaaagcattgcacttgttgtggacagtcctcaattctttaaccggcttgcagagtctttcatgtcaaggattaatacaagattcattgttcttctttggggtgacaaatcatgcatagatagccaagctattaaggatataccactttatggatacaaggatatcatcgaacttggtcgagaaagccgcaatgcactgtttctttccgacgagcaaggtcagcaagatgtctttgaatctattagtcctgaagatgtggccacactaatatatactagtggaacaagtggcacaccaaaaggcgtaatgcttacccaccgaaatctcttgcatcagataaataatctgtgggagattgtaccagcagaacctggtgataggttcctaagcatgcttccaacatggcatgcatatgagcgtgcttatttgcagcgttaccagcctcaatatattatatcagtaccactggtctacgaaactctgtacatttcaattcataggcagatttcatccagttctgctgctcgaaaaattattgctctttcacttatcaagataagtttcctatatatggaggcaaagaagatctatgagggaacagttttatcaaacaatcttgtcaaaccatcagtcatcgcctatatgatgaagtggctgtgggcaagattggttgctgcatttctttggcctttacataatctggcgaagattctagtatacaagaaaattcattcagcaatcgggatttcaaaggctggtattagtggcggtggaagtcttccgatgcatgttgataagttttttgaggccattggcattaaagtacaaaacggctatggccttactgagacttctcctgttgttgctgctagacgaccattctgtaatgttcttgggacagttggtcacccaataaagcatactgaaatcaagatttttgacattgagactggtgaggtccttccagatggttcaaaggggattgtgaaaattaaaggaccacaagtaatgaagggatactataagaacccatcggctacaaatgaagcttttgatcaagagggttggttcagcactggagatgtaggttggatagtacctcatcatgccatggggccaagtcgccagtgtggagggatgattgttcttgaagggcgtgcaaaggatacaatagtcctatctacaggtgaaaatgttgaacctgctgagatcgaggaagcagccagcaggagtaccttgattaatcagatagttgtgatcgggcaggatcaacggcgtcttggtgccataattgttcccaacaatgatgaagttctggcagaagcaaaaaggaagtccatccttggtgaggatggcgagctagcgaaagataaggtcatgaacatgctatatgatgaattgagaacctggaggaagtgcttaattattttgttcacgcgtttcaggacagcgcactgctccttccgtgtcgggccaattctggttgtcgacgaaccattcacgattgacaatggtctgatgacacccaccatgaaaataaggagggacaaagtgacagacaagtacaggagggagatcgaagccttgttcaagtgacacgcggagcgcgtgcgcacccatcagagttcccttttccgagtacaagacggcaaccgtacggcgtacatacagacacctgcaagctgcaatgcgtccatgtaccatgtatacgtacgtacttgcgtacggtcggaagatgactgggttggaactggaagagatgatatggcggagcggccggtgggagaacaccatgagacttgttactagactcgaatgttcgtaggttgcatgagcaaaatgacatgtgttccacaattgcatcattcaataagcgattcactgagccagataaggtcttgttcggttagttctcaatccatatatatggattgagtgagtttaaatcccaaacaagtcaaacttcttcttaatttttttcaatctcatccaatccatatgtaatgacaataaccgaacaaggcatgaatcaataaaattctcccaaaccaccgcaggtaccatgcaattggtaaaaatat

SEQ ID NO: 199979 - DNA, 2366 bp, Zea Mays
ctccgccgccccagtccgccggctccgcgatagaacatcaagtacgtaaaaagtgctcacctctactggagagtgctctgctgcctggtggaagtgattcgactctgcatgaatggaaggctgttccagatatttggaggacagcagcagaaaaatatgctgacctcgtagctgtggtagatccttaccatgaaccgccaacggaatggacgtatacacagcttgagcaagaaatattggatttttctcaaggtctaagggccattggtgttgctccggatgaaaagctagcactttttgctgataactcatgtcgttggctagttgcagatcaaggaatcatggcaaccggtgctataaatgttgttaggggaacaagatcatctgatgaagaattgtttcaaatatacactcattcagaaagtcctcaattctttaaccggcttgcagagtctttcatgtcaaggattaatacaagattcattgttcttctttggggtgacaaatcatgcatagatagccaagctattaaggatataccactttatggatacaaggatatcatcgaacttggtcgagaaagccgcaatgcactgtttctttccgacgagcaaggtcagcaagatgtctttgaatctattagtcctgaagatgtggccacactaatatatactagtggaacaagtggcacaccaaaaggcgtaatgcttacccaccgaaatctcttgcatcagataaataatctgtgggagattgtaccagcagaacctggtgataggttcctaagcatgcttccaacatggcatgcatatgagcgtgcttgtgagtacttcatcttctcgtatggtatccagcaagtttacactactgttaagtacctgaaggaagatttgcagcgttaccagcctcaatatattatatcagtaccactggtctacgaaactctgtacatttcaattcataggcagatttcatccagttctgctgctcgaaaaattattgctctttcacttatcaagataagtttcctatatatggaggcaaagaagatctatgagggaacagttttatcaaacaatcttgtcaaaccatcagtcatcgcctatatgatgaagtggctgtgggcaagattggttgctgcatttctttggcctttacataatctggcgaagattctagtatacaagaaaattcattcagcaatcgggatttcaaaggctggtattagtggcggtggaagtcttccgatgcatgttgataagttttttgaggccattggcattaaagtacaaaacggctatggccttactgagacttctcctgttgttgctgctagacgaccattctgtaatgttcttgggacagttggtcacccaataaagcatactgaaatcaagatttttgacattgagactggtgaggtccttccagatggttcaaaggggattgtgaaaattaaaggaccacaagtaatgaagggatactataagaacccatcggctacaaatgaagcttttgatcaagagggttggttcagcactggagatgtaggttggatagtacctcatcatgccatggggccaagtcgccagtgtggagggatgattgttcttgaagggcgtgcaaaggatacaatagtcctatctacaggtgaaaatgttgaacctgctgagatcgaggaagcagccagcaggagtaccttgattaatcagatagttgtgatcgggcaggacagcgcactgctccttccgtgtcgggccaattctggttgtcgacgaaccattcacgattgacaatggtctgatgacacccaccatgaaaataaggagggacaaagtgacagacaagtacaggagggagatcgaagccttgttcaagtgacacgcggagcgcgtgcgcacccatcagagttcccttttccgagtacaagacggcaaccgtacggcgtacatacagacacctgcaagctgcaatgcgtccatgtaccatgtatacgtacgtacttgcgtacggtcggaagatgactgggttggaactggaagagatgatatggcggagcggccggtgggagaacaccatgagacttgttactagactcgaatgttcgtaggttgcatgagcaaaatgacatgtgttccacaattgcatcattcaataagcgattcactgagccagataaggtcttgttcggttagttctcaatccatatatatggattgagtgagtttaaatcccaaacaagtcaaacttcttcttaatttttttcaatctcatccaatccatatgtaatgacaataaccgaacaaggcatgaatcaataaaattctcccaaaccaccgcaggtaccatgcaattggtaaaaatat

SEQ ID NO: 199980 - DNA, 2249 bp, Zea Mays
gccgcgtctccgccgccccagtccgccggctccgcgatagaacatcaagtacgtaaaaagtgctcacctctactggagagtgctctgctgcctggtggaagtgattcgactctgcatgaatggaaggctgttccagatatttggaggacagcagcagaaaaatatgctgacctcgtagctgtggtagatccttaccatgaaccgccaacggaatggacgtatacacagcttgagcaagaaatattggatttttctcaaggtctaagggccattggtgttgctccggatgaaaagctagcactttttgctgataactcatgtcgttggctagttgcagatcaaggaatcatggcaaccggtgctataaatgttgttaggggaacaagatcatctgatgaagaattgtttcaaatatacactcattcagaaagcattgcacttgttgtggacagtcctcaattctttaaccggcttgcagagtctttcatgtcaaggattaatacaagattcattgttcttctttggggtgacaaatcatgcatagatagccaagctattaaggatataccactttatggatacaaggatatcatcgaacttggtcgagaaagccgcaatgcactgtttctttccgacgagcaaggtcagcaagatgtctttgaatctattagtcctgaagatgtggccacactaatatatactagtggaacaagtggcacaccaaaaggcgtaatgcttacccaccgaaatctcttgcatcagataaataatctgtgggagattgtaccagcagaacctggtgataggttcctaagcatgcttccaacatggcatgcatatgagcgtgcttgtgagtacttcatcttctcgtatggtatccagcaagtttacactactgttaagtacctgaagattctagtatacaagaaaattcattcagcaatcgggatttcaaaggctggtattagtggcggtggaagtcttccgatgcatgttgataagttttttgaggccattggcattaaagtacaaaacggctatggccttactgagacttctcctgttgttgctgctagacgaccattctgtaatgttcttgggacagttggtcacccaataaagcatactgaaatcaagatttttgacattgagactggtgaggtccttccagatggttcaaaggggattgtgaaaattaaaggaccacaagtaatgaagggatactataagaacccatcggctacaaatgaagcttttgatcaagagggttggttcagcactggagatgtaggttggatagtacctcatcatgccatggggccaagtcgccagtgtggagggatgattgttcttgaagggcgtgcaaaggatacaatagtcctatctacaggtgaaaatgttgaacctgctgagatcgaggaagcagccagcaggagtaccttgattaatcagatagttgtgatcgggcaggatcaacggcgtcttggtgccataattgttcccaacaatgatgaagttctggcagaagcaaaaaggaagtccatccttggtgaggatggcgagctagcgaaagataaggtcatgaacatgctatatgatgaattgagaacctggacagcgcactgctccttccgtgtcgggccaattctggttgtcgacgaaccattcacgattgacaatggtctgatgacacccaccatgaaaataaggagggacaaagtgacagacaagtacaggagggagatcgaagccttgttcaagtgacacgcggagcgcgtgcgcacccatcagagttcccttttccgagtacaagacggcaaccgtacggcgtacatacagacacctgcaagctgcaatgcgtccatgtaccatgtatacgtacgtacttgcgtacggtcggaagatgactgggttggaactggaagagatgatatggcggagcggccggtgggagaacaccatgagacttgttactagactcgaatgttcgtaggttgcatgagcaaaatgacatgtgttccacaattgcatcattcaataagcgattcactgagccagataaggtcttgttcggttagttctcaatccatatatatggattgagtgagtttaaatcccaaacaagtcaaacttcttcttaatttttttcaatctcatccaatccatatgtaatgacaataaccgaacaaggcatgaatcaataaaattctcccaaaccaccgcaggtaccatgcaattggtaaaaatat

SEQ ID NO: 199981 - DNA, 2229 bp, Zea Mays
cgccgcgtctccgccgccccagtccgccggctccgcgatagaacatcaagtacgtaaaaagtgctcacctctactggagagtgctctgctgcctggtggaagtgattcgactctgcatgaatggaaggctgttccagatatttggaggacagcagcagaaaaatatgctgacctcgtagctgtggtagatccttaccatgaaccgccaacggaatggacgtatacacagcttgagcaagaaatattggatttttctcaaggtctaagggccattggtgttgctccggatgaaaagctagcactttttgctgataactcatgtcgttggctagttgcagatcaaggaatcatggcaaccggtgctataaatgttgttaggggaacaagatcatctgatgaagaattgtttcaaatatacactcattcagaaagtcctcaattctttaaccggcttgcagagtctttcatgtcaaggattaatacaagattcattgttcttctttggggtgacaaatcatgcatagatagccaagctattaaggatataccactttatggatacaaggatatcatcgaacttggtcgagaaagccgcaatgcactgtttctttccgacgagcaaggtcagcaagatgtctttgaatctattagtcctgaagatgtggccacactaatatatactagtggaacaagtggcacaccaaaaggcgtaatgcttacccaccgaaatctcttgcatcagataaataatctgtgggagattgtaccagcagaacctggtgataggttcctaagcatgcttccaacatggcatgcatatgagcgtgcttgtgagtacttcatcttctcgtatggtatccagcaagtttacactactgttaagtacctgaagattctagtatacaagaaaattcattcagcaatcgggatttcaaaggctggtattagtggcggtggaagtcttccgatgcatgttgataagttttttgaggccattggcattaaagtacaaaacggctatggccttactgagacttctcctgttgttgctgctagacgaccattctgtaatgttcttgggacagttggtcacccaataaagcatactgaaatcaagatttttgacattgagactggtgaggtccttccagatggttcaaaggggattgtgaaaattaaaggaccacaagtaatgaagggatactataagaacccatcggctacaaatgaagcttttgatcaagagggttggttcagcactggagatgtaggttggatagtacctcatcatgccatggggccaagtcgccagtgtggagggatgattgttcttgaagggcgtgcaaaggatacaatagtcctatctacaggtgaaaatgttgaacctgctgagatcgaggaagcagccagcaggagtaccttgattaatcagatagttgtgatcgggcaggatcaacggcgtcttggtgccataattgttcccaacaatgatgaagttctggcagaagcaaaaaggaagtccatccttggtgaggatggcgagctagcgaaagataaggtcatgaacatgctatatgatgaattgagaacctggacagcgcactgctccttccgtgtcgggccaattctggttgtcgacgaaccattcacgattgacaatggtctgatgacacccaccatgaaaataaggagggacaaagtgacagacaagtacaggagggagatcgaagccttgttcaagtgacacgcggagcgcgtgcgcacccatcagagttcccttttccgagtacaagacggcaaccgtacggcgtacatacagacacctgcaagctgcaatgcgtccatgtaccatgtatacgtacgtacttgcgtacggtcggaagatgactgggttggaactggaagagatgatatggcggagcggccggtgggagaacaccatgagacttgttactagactcgaatgttcgtaggttgcatgagcaaaatgacatgtgttccacaattgcatcattcaataagcgattcactgagccagataaggtcttgttcggttagttctcaatccatatatatggattgagtgagtttaaatcccaaacaagtcaaacttcttcttaatttttttcaatctcatccaatccatatgtaatgacaataaccgaacaaggcatgaatcaataaaattctcccaaaccaccgcaggtaccatgcaattggtaaaaatat

SEQ ID NO: 199982 - DNA, 2600 bp, Zea Mays
ccgccgccgccgcgtctccgccgccccagtccgccggctccgcgatagaacatcaagtacgtaaaaagtgctcacctctactggagagtgctctgctgcctggtggaagtgattcgactctgcatgaatggaaggctgttccagatatttggaggacagcagcagaaaaatatgctgacctcgtagctgtggtagatccttaccatgaaccgccaacggaatggacgtatacacagcttgagcaagaaatattggatttttctcaaggtctaagggccattggtgttgctccggatgaaaagctagcactttttgctgataactcatgtcgttggctagttgcagatcaaggaatcatggcaaccggtgctataaatgttgttaggggaacaagatcatctgatgaagaattgtttcaaatatacactcattcagaaagcattgcacttgttgtggacagtcctcaattctttaaccggcttgcagagtctttcatgtcaaggattaatacaagattcattgttcttctttggggtgacaaatcatgcatagatagccaagctattaaggatataccactttatggatacaaggatatcatcgaacttggtcgagaaagccgcaatgcactgtttctttccgacgagcaaggtcagcaagatgtctttgaatctattagtcctgaagatgtggccacactaatatatactagtggaacaagtggcacaccaaaaggcgtaatgcttacccaccgaaatctcttgcatcagataaataatctgtgggagattgtaccagcagaacctggtgataggttcctaagcatgcttccaacatggcatgcatatgagcgtgcttgtgagtacttcatcttctcgtatggtatccagcaagtttacactactgttaagtacctgaagaagatgctgaagttccttagggcattttgacatcttcttctatcttctttgataggaagatttgcagcgttaccagcctcaatatattatatcagtaccactggtctacgaaactctgtacatttcaattcataggcagatttcatccagttctgctgctcgaaaaattattgctctttcacttatcaagataagtttcctatatatggaggcaaagaagatctatgagggaacagttttatcaaacaatcttgtcaaaccatcagtcatcgcctatatgatgaagtggctgtgggcaagattggttgctgcatttctttggcctttacataatctggcgaagattctagtatacaagaaaattcattcagcaatcgggatttcaaaggctggtattagtggcggtggaagtcttccgatgcatgttgataagttttttgaggccattggcattaaagtacaaaacggctatggccttactgagacttctcctgttgttgctgctagacgaccattctgtaatgttcttgggacagttggtcacccaataaagcatactgaaatcaagatttttgacattgagactggtgaggtccttccagatggttcaaaggggattgtgaaaattaaaggaccacaagtaatgaagggatactataagaacccatcggctacaaatgaagcttttgatcaagagggttggttcagcactggagatgtaggttggatagtacctcatcatgccatggggccaagtcgccagtgtggagggatgattgttcttgaagggcgtgcaaaggatacaatagtcctatctacaggtgaaaatgttgaacctgctgagatcgaggaagcagccagcaggagtaccttgattaatcagatagttgtgatcgggcaggatcaacggcgtcttggtgccataattgttcccaacaatgatgaagttctggcagaagcaaaaaggaagtccatccttggtgaggatggcgagctagcgaaagataaggtcatgaacatgctatatgatgaattgagaacctggacagcgcactgctccttccgtgtcgggccaattctggttgtcgacgaaccattcacgattgacaatggtctgatgacacccaccatgaaaataaggagggacaaagtgacagacaagtacaggagggagatcgaagccttgttcaagtgacacgcggagcgcgtgcgcacccatcagagttcccttttccgagtacaagacggcaaccgtacggcgtacatacagacacctgcaagctgcaatgcgtccatgtaccatgtatacgtacgtacttgcgtacggtcggaagatgactgggttggaactggaagagatgatatggcggagcggccggtgggagaacaccatgagacttgttactagactcgaatgttcgtaggttgcatgagcaaaatgacatgtgttccacaattgcatcattcaataagcgattcactgagccagataaggtcttgttcggttagttctcaatccatatatatggattgagtgagtttaaatcccaaacaagtcaaacttcttcttaatttttttcaatctcatccaatccatatgtaatgacaataaccgaacaaggcatgaatcaataaaattctcccaaaccaccgcaggtaccatgcaattggtaaaaatat

SEQ ID NO: 199983 - DNA, 2557 bp, Zea Mays
gcgacctccgccccgccgccgccgcgtctccgccgccccagtccgccggctccgcgatagaacatcaagtacgtaaaaagtgctcacctctactggagagtgctctgctgcctggtggaagtgattcgactctgcatgaatggaaggctgttccagatatttggaggacagcagcagaaaaatatgctgacctcgtagctgtggtagatccttaccatgaaccgccaacggaatggacgtatacacagcttgagcaagaaatattggatttttctcaaggtctaagggccattggtgttgctccggatgaaaagctagcactttttgctgataactcatgtcgttggctagttgcagatcaaggaatcatggcaaccggtgctataaatgttgttaggggaacaagatcatctgatgaagaattgtttcaaatatacactcattcagaaagcattgcacttgttgtggacagtcctcaattctttaaccggcttgcagagtctttcatgtcaaggattaatacaagattcattgttcttctttggggtgacaaatcatgcatagatagccaagctattaaggatataccactttatggatacaaggatatcatcgaacttggtcgagaaagccgcaatgcactgtttctttccgacgagcaaggtcagcaagatgtctttgaatctattagtcctgaagatgtggccacactaatatatactagtggaacaagtggcacaccaaaaggcgtaatgcttacccaccgaaatctcttgcatcagataaataatctgtgggagattgtaccagcagaacctggtgataggttcctaagcatgcttccaacatggcatgcatatgagcgtgcttgtgagtacttcatcttctcgtatggtatccagcaagtttacactactgttaagtacctgaaggaagatttgcagcgttaccagcctcaatatattatatcagtaccactggtctacgaaactctgtacatttcaattcataggcagatttcatccagttctgctgctcgaaaaattattgctctttcacttatcaagataagtttcctatatatggaggcaaagaagatctatgagggaacagttttatcaaacaatcttgtcaaaccatcagtcatcgcctatatgatgaagtggctgtgggcaagattggttgctgcatttctttggcctttacataatctggcgaagattctagtatacaagaaaattcattcagcaatcgggatttcaaaggctggtattagtggcggtggaagtcttccgatgcatgttgataagttttttgaggccattggcattaaagtacaaaacggctatggccttactgagacttctcctgttgttgctgctagacgaccattctgtaatgttcttgggacagttggtcacccaataaagcatactgaaatcaagatttttgacattgagactggtgaggtccttccagatggttcaaaggggattgtgaaaattaaaggaccacaagtaatgaagggatactataagaacccatcggctacaaatgaagcttttgatcaagagggttggttcagcactggagatgtaggttggatagtacctcatcatgccatggggccaagtcgccagtgtggagggatgattgttcttgaagggcgtgcaaaggatacaatagtcctatctacaggtgaaaatgttgaacctgctgagatcgaggaagcagccagcaggagtaccttgattaatcagatagttgtgatcgggcaggatcaacggcgtcttggtgccataattgttcccaacaatgatgaagttctggcagaagcaaaaaggaagtccatccttggtgaggatggcgagctagcgaaagataaggtcatgaacatgctatatgatgaattgagaacctggacagcgcactgctccttccgtgtcgggccaattctggttgtcgacgaaccattcacgattgacaatggtctgatgacacccaccatgaaaataaggagggacaaagtgacagacaagtacaggagggagatcgaagccttgttcaagtgacacgcggagcgcgtgcgcacccatcagagttcccttttccgagtacaagacggcaaccgtacggcgtacatacagacacctgcaagctgcaatgcgtccatgtaccatgtatacgtacgtacttgcgtacggtcggaagatgactgggttggaactggaagagatgatatggcggagcggccggtgggagaacaccatgagacttgttactagactcgaatgttcgtaggttgcatgagcaaaatgacatgtgttccacaattgcatcattcaataagcgattcactgagccagataaggtcttgttcggttagttctcaatccatatatatggattgagtgagtttaaatcccaaacaagtcaaacttcttcttaatttttttcaatctcatccaatccatatgtaatgacaataaccgaacaaggcatgaatcaataaaattctcccaaaccaccgcaggtaccatgcaattggtaaaaatat

SEQ ID NO: 199984 - DNA, 910 bp, Zea Mays
ctcctctgagaagaaaagaaaacatcctgttgctccctcgtcaagtcgtcatcccaccaacgcagatgcaaaatggggagacggggtttaagcaaataatagtcgaggaaggagaggttctcctcactacacctcggctcgctggagccgataaggctgccgcgccctccctctctcctgcggtgctcccatggaatcggcggcgattgggtcgcagtccccgctctccttcccctccaacctctgcgaatcaaaagtatcctctggtttaccaatatacaatgtgaagatcaagggcaatcataggcttgacgtggtgtgccgtgggatgtttctacaagaaagtttatgcaaaggaaaaagaaagaagttttcaaggacgctgatgacgaggccgagcagatgaattggaggagaatgatgagagagatagaggaggcgggatcagctgtacgtacccattctgaagacccagcgaagcgggaaagagccacttccaagggatgctattcttgggactcttgtgcggttcaaacaattgaaaaaatgggatattgtcagtgagattcttgaatggctcagaacacagcattggtggaacttcagtgagatggacttcttgatgcttgtgacagcttatgggaagttgggggattttagcagggcagaaagggtcctcaagtacatgaaaaaaaaggttaacagccatgcgtcatgtcaaaactggtctgatggaggcgtatggaagagggaccgaattttttgtattttagcccttaaacagaagtaaaatcacgtttagacctaaaaaaattttaaatgcagttttggacccttagctcggcgccatagcttgtggcgccgagctaacacagctcggcgccacagcctatggcgccgagcggtgacg

SEQ ID NO: 199985 - DNA, 2881 bp, Zea Mays
gagaaaagtaactacaccacgtccccacagcaggcaaaaggaagctgccccacctgtcggcgacaggcgagtaggcacggccggggacggctcctccttgccaccgcggcgtgcgcggaccgtgcgtccgtgccctccggctccggcgcaccgctccgctccgctcattccatctccatccaccgcgccccaaatcgcacggcctcgcctccccattcgcgccgatcgaatcccgaatcggcggccatgagcgtggtcggcttcgacgtcggcaacgacaccctggtggcggcggcggcgcggcagcggggcattgatgtgctcctcaacgccgagtccaagcgcgagtcacccgccgccgtcgccttctcccacaacgcgcgcctcatcggctgccacgccgcgtccgcctcgtccgcccacgcccccttctccagcgtcaaacgcctctcctgggcgccacggggaggaacccggactcctccctcctccgcgacctcccccgcctccctttctccgtctcccacgcctccggtggcggcgccgtcgtccacgttgaccacatcgggccgccgcatcgcgctctctccgacccatctcctctccatgctgctcgcctacctcaagcagctcgcggaggccgacctcggaggcgcccccgtcgccgactgcgtgatctccgtgccctgctacttcactcaagcgcaacgccgcgcctacctcgacgccgccgccgtcgcggggctcaggccgctccgcctcatgcacgacctcgccgccgccgcgcttggctacggcctctaccgctccgacctcggcggcgccgggggccccacctgcgtcgccttcgtggacgtcggccaatgcgacacgcaggtcgcagttgtctccttcgacatgtcggggatgaaggtgctgtcccacggcttcgatgcagacctcgggggcagggatttcgacgaggtgctgttcgagcatttcgccgaggagttcagggacaggtataggattgatgtcgtgaggaatgtgaaggccagtatgaggttgagggcagcctgtgagaaggccaagaaggttctgagcgcgaatgcagaggccgtggtgaacatcgagtgcctgatggaagagaaggatgtgaggggggtgatccgaagggaggactttgagaagctatgtgccagactgctggagagggttgttgaaccttgcaagagggcggtggaagattcagggattggattggagaggctgcattctgtggaactcgtcgggtcaggttctcgggttcctgccattaccaaggtgcttgcgggattctttagaagggaacctagtcgcacactcaatgctagtgagtgtgtggctcgggggtgcgcgttgcaatgtgcaatgcttagtcctacgttccgtgttcgggaatacgaggtgcaggatgcaatccctgcttccataggatttaacactagtgacggcccagtttcaacattgtcaagtgatgcattgttccggagaggcctgcactttcccagtgttaagatcattactctagagaagaatgacagttttagttttgatgcatattatgtggatgctaatgaattgcctcctggtacctcaacagacatcggtagttttcagattggcccattccaagcacataccgaagcttctaaagtcaaagtaaaaattcgcttgaatctacatggtttggtttcagtcgaatctgccgttttgataaatgattatcaaaggaatggaagttctactgatcatatggaggtggatagcagtggtgatgacatgcagggtcacaagtcaagaagtgaaaggtctatccagcggcaggagttgccaatcactgagtacatatatggtgcaatgagcaagcatgaattgctggaagctcaagagcaagaacagcaattggcttatcaggataaacttgtggaatggacaaaggacaggaagaatgcattagaatcttatgtatatgacacccgtaacaagctttctgagaggtaccggagctttgctactgattcagaaagggaacaaatctcagttaatttacaacagactgaagattggctttacgaagaaggtgatgatgagacagaagcagtttacagtagcaaacttgaggagctgaaaaagcttgtagatccaattgaaaatcgttgtaaagatgacgaagtgagagctgaagccatgagagatcttttgaagtgcattgttgaccacagaaatgctgccaagtcattatccacacctgaaagagatgctgttgacaatgagtgcaataaagctgagcagtggctaagggaggggtcccaacttcaagaatccttgcccaagaatgtggacccagtactttggtcctgtgaaatcaagagaaaggaagaagagctggatacgttctgtcgaaacataacaaggcacaagggctctccagcaaggacagatggcagcaggggttcagattacatgcctacacctgatagagattaaatattttcacgatcacgaggcccgccattgggtgaccgcttcttggttctccaaggtgcagttgtcacttgagagcctactgatcatgattgtcgatacctgtgaattcttttccggtacttggatcaaggttgtctgcttcagtttgttctgaatggaaaggataattaaaaggaaattgtatgcaatagatattgttgacgccgttttttagcttggcagatttatgcttcagtttgttgatcccaggaagttacccattatttaattttgtttgttaataccttgtatggtgtacattgatgatagttccttcgcacacatttttttttcttatgatgaaacaatacatttgaattttattggccaaaag

SEQ ID NO: 199986 - DNA, 3113 bp, Zea Mays
gagaaaagtaactacaccacgtccccacagcaggcaaaaggaagctgccccacctgtcggcgacaggcgagtaggcacggccggggacggctcctccttgccaccgcggcgtgcgcggaccgtgcgtccgtgccctccggctccggcgcaccgctccgctccgctcattccatctccatccaccgcgccccaaatcgcacggcctcgcctccccattcgcgccgatcgaatcccgaatcggcggccatgagcgtggtcggcttcgacgtcggcaacgacaccctggtggcggcggcggcgcggcagcggggcattgatgtgctcctcaacgccgagtccaagcgcgagtcacccgccgccgtcgccttctcccacaacgcgcgcctcatcggctgccacgccgcgtccgcctcgtccgcccacgcccccttctccagcgtcaaacgcctctcctgggcgccacggggaggaacccggactcctccctcctccgcgacctcccccgcctccctttctccgtctcccacgcctccggtggcggcgccgtcgtccacgttgaccacatcgggccgccgcatcgcgctctctccgacccatctcctctccatgctgctcgcctacctcaagcagctcgcggaggccgacctcggaggcgcccccgtcgccgactgcgtgatctccgtgccctgctacttcactcaagcgcaacgccgcgcctacctcgacgccgccgccgtcgcggggctcaggccgctccgcctcatgcacgacctcgccgccgccgcgcttggctacggcctctaccgctccgacctcggcggcgccgggggccccacctgcgtcgccttcgtggacgtcggccaatgcgacacgcaggtcgcagttgtctccttcgacatgtcggggatgaaggtgctgtcccacggcttcgatgcagacctcgggggcagggatttcgacgaggtgctgttcgagcatttcgccgaggagttcagggacaggtataggattgatgtcgtgaggaatgtgaaggccagtatgaggttgagggcagcctgtgagaaggccaagaaggttctgagcgcgaatgcagaggccgtggtgaacatcgagtgcctgatggaagagaaggatgtgaggggggtgatccgaagggaggactttgagaagctatgtgccagactgctggagagggttgttgaaccttgcaagagggcggtggaagattcagggattggattggagaggctgcattctgtggaactcgtcgggtcaggttctcgggttcctgccattaccaaggtgcttgcgggattctttagaagggaacctagtcgcacactcaatgctagtgagtgtgtggctcgggggtgcgcgttgcaatgtgcaatgcttagtcctacgttccgtgttcgggaatacgaggtgcaggatgcaatccctgcttccataggatttaacactagtgacggcccagtttcaacattgtcaagtgatgcattgttccggagaggcctgcactttcccagtgttaagatcattactctagagaagaatgacagttttagttttgatgcatattatgtggatgctaatgaattgcctcctggtacctcaacagacatcggtagttttcagattggcccattccaagcacataccgaagcttctaaagtcaaagtaaaaattcgcttgaatctacatggtttggtttcagtcgaatctgccgttttgataaatgattatcaaaggaatggaagttctactgatcatatggaggtggatagcagtggtgatgacatgggtcacaagtcaagaagtgaaaggtctatccagcggcaggagttgccaatcactgagtacatatatggtgcaatgagcaagcatgaattgctggaagctcaagagcaagaacagcaattggcttatcaggataaacttgtggaatggacaaaggacaggaagaatgcattagaatcttatgtatatgacacccgtaacaagctttctgagaggtaccggagctttgctactgattcagaaagggaacaaatctcagttaatttacaacagactgaagattggctttacgaagaaggtgatgatgagacagaagcagtttacagtagcaaacttgaggagctgaaaaagcttgtagatccaattgaaaatcgttgtaaagatgacgaagtgagagctgaagccatgagagatcttttgaagtgcattgttgaccacagaaatgctgccaagtcattatccacacctgaaagagatgctgttgacaatgagtgcaataaagctgagcagtggctaagggaggggtcccaacttcaagaatccttgcccaagaatgtggacccagtactttggtcctgtgaaatcaagagaaaggaagaagagctggatacgttctgtcgaaacataacaaggcacaagggctctccagcaaggacagatggcagcaggggttcagattacatgcctacacctgatagagattaaatattttcacgatcacgaggtttctttactgtacggccacacatgtcttagaccttgttcgtttacgtcggattgcacccggaatcgttccagctaatcaaagtttatataaattagagaagcaatccggctaggaatcgttccgacccaccaatccggtagaaacgaacaaggccttaatcattttgtagcatatatatgaatgaacgagttcctgctaacaccgtcatataatcgactctgtacaacactaggcccgccattgggtgaccgcttcttggttctccaaggtgcagttgtcacttgagagcctactgatcatgattgtcgatacctgtgaattcttttccggtacttggatcaaggttgtctgcttcagtttgttctgaatggaaaggataattaaaaggaaattgtatgcaatagatattgttgacgccgttttttagcttggcagatttatgcttcagtttgttgatcccaggaagttacccattatttaattttgtttgttaataccttgtatggtgtacattgatgatagttccttcgcacacatttttttttcttatgatgaaacaatacatttgaattttattggccaaaag

SEQ ID NO: 199987 - DNA, 3119 bp, Zea Mays
gagaaaagtaactacaccacgtccccacagcaggcaaaaggaagctgccccacctgtcggcgacaggcgagtaggcacggccggggacggctcctccttgccaccgcggcgtgcgcggaccgtgcgtccgtgccctccggctccggcgcaccgctccgctccgctcattccatctccatccaccgcgccccaaatcgcacggcctcgcctccccattcgcgccgatcgaatcccgaatcggcggccatgagcgtggtcggcttcgacgtcggcaacgacaccctggtggcggcggcggcgcggcagcggggcattgatgtgctcctcaacgccgagtccaagcgcgagtcacccgccgccgtcgccttctcccacaacgcgcgcctcatcggctgccacgccgcgtccgcctcgtccgcccacgcccccttctccagcgtcaaacgcctctcctgggcgccacggggaggaacccggactcctccctcctccgcgacctcccccgcctccctttctccgtctcccacgcctccggtggcggcgccgtcgtccacgttgaccacatcgggccgccgcatcgcgctctctccgacccatctcctctccatgctgctcgcctacctcaagcagctcgcggaggccgacctcggaggcgcccccgtcgccgactgcgtgatctccgtgccctgctacttcactcaagcgcaacgccgcgcctacctcgacgccgccgccgtcgcggggctcaggccgctccgcctcatgcacgacctcgccgccgccgcgcttggctacggcctctaccgctccgacctcggcggcgccgggggccccacctgcgtcgccttcgtggacgtcggccaatgcgacacgcaggtcgcagttgtctccttcgacatgtcggggatgaaggtgctgtcccacggcttcgatgcagacctcgggggcagggatttcgacgaggtgctgttcgagcatttcgccgaggagttcagggacaggtataggattgatgtcgtgaggaatgtgaaggccagtatgaggttgagggcagcctgtgagaaggccaagaaggttctgagcgcgaatgcagaggccgtggtgaacatcgagtgcctgatggaagagaaggatgtgaggggggtgatccgaagggaggactttgagaagctatgtgccagactgctggagagggttgttgaaccttgcaagagggcggtggaagattcagggattggattggagaggctgcattctgtggaactcgtcgggtcaggttctcgggttcctgccattaccaaggtgcttgcgggattctttagaagggaacctagtcgcacactcaatgctagtgagtgtgtggctcgggggtgcgcgttgcaatgtgcaatgcttagtcctacgttccgtgttcgggaatacgaggtgcaggatgcaatccctgcttccataggatttaacactagtgacggcccagtttcaacattgtcaagtgatgcattgttccggagaggcctgcactttcccagtgttaagatcattactctagagaagaatgacagttttagttttgatgcatattatgtggatgctaatgaattgcctcctggtacctcaacagacatcggtagttttcagcagattggcccattccaagcacataccgaagcttctaaagtcaaagtaaaaattcgcttgaatctacatggtttggtttcagtcgaatctgccgttttgataaatgattatcaaaggaatggaagttctactgatcatatggaggtggatagcagtggtgatgacatgcagggtcacaagtcaagaagtgaaaggtctatccagcggcaggagttgccaatcactgagtacatatatggtgcaatgagcaagcatgaattgctggaagctcaagagcaagaacagcaattggcttatcaggataaacttgtggaatggacaaaggacaggaagaatgcattagaatcttatgtatatgacacccgtaacaagctttctgagaggtaccggagctttgctactgattcagaaagggaacaaatctcagttaatttacaacagactgaagattggctttacgaagaaggtgatgatgagacagaagcagtttacagtagcaaacttgaggagctgaaaaagcttgtagatccaattgaaaatcgttgtaaagatgacgaagtgagagctgaagccatgagagatcttttgaagtgcattgttgaccacagaaatgctgccaagtcattatccacacctgaaagagatgctgttgacaatgagtgcaataaagctgagcagtggctaagggaggggtcccaacttcaagaatccttgcccaagaatgtggacccagtactttggtcctgtgaaatcaagagaaaggaagaagagctggatacgttctgtcgaaacataacaaggcacaagggctctccagcaaggacagatggcagcaggggttcagattacatgcctacacctgatagagattaaatattttcacgatcacgaggtttctttactgtacggccacacatgtcttagaccttgttcgtttacgtcggattgcacccggaatcgttccagctaatcaaagtttatataaattagagaagcaatccggctaggaatcgttccgacccaccaatccggtagaaacgaacaaggccttaatcattttgtagcatatatatgaatgaacgagttcctgctaacaccgtcatataatcgactctgtacaacactaggcccgccattgggtgaccgcttcttggttctccaaggtgcagttgtcacttgagagcctactgatcatgattgtcgatacctgtgaattcttttccggtacttggatcaaggttgtctgcttcagtttgttctgaatggaaaggataattaaaaggaaattgtatgcaatagatattgttgacgccgttttttagcttggcagatttatgcttcagtttgttgatcccaggaagttacccattatttaattttgtttgttaataccttgtatggtgtacattgatgatagttccttcgcacacatttttttttcttatgatgaaacaatacatttgaattttattggccaaaag

SEQ ID NO: 199988 - DNA, 3141 bp, Zea Mays
ctcaaaattgctcatgaggagccaagagaaaagtaactacaccacgtccccacagcaggcaaaaggaagctgccccacctgtcggcgacaggcgagtaggcacggccggggacggctcctccttgccaccgcggcgtgcgcggaccgtgcgtccgtgccctccggctccggcgcaccgctccgctccgctcattccatctccatccaccgcgccccaaatcgcacggcctcgcctccccattcgcgccgatcgaatcccgaatcggcggccatgagcgtggtcggcttcgacgtcggcaacgacaccctggtggcggcggcggcgcggcagcggggcattgatgtgctcctcaacgccgagtccaagcgcgagtcacccgccgccgtcgccttctcccacaacgcgcgcctcatcggctgccacgccgcgtccgcctcgtccgcccacgcccccttctccagcgtcaaacgcctctcctgggcgccacggggaggaacccggactcctccctcctccgcgacctcccccgcctccctttctccgtctcccacgcctccggtggcggcgccgtcgtccacgttgaccacatcgggccgccgcatcgcgctctctccgacccatctcctctccatgctgctcgcctacctcaagcagctcgcggaggccgacctcggaggcgcccccgtcgccgactgcgtgatctccgtgccctgctacttcactcaagcgcaacgccgcgcctacctcgacgccgccgccgtcgcggggctcaggccgctccgcctcatgcacgacctcgccgccgccgcgcttggctacggcctctaccgctccgacctcggcggcgccgggggccccacctgcgtcgccttcgtggacgtcggccaatgcgacacgcaggtcgcagttgtctccttcgacatgtcggggatgaaggtgctgtcccacggcttcgatgcagacctcgggggcagggatttcgacgaggtgctgttcgagcatttcgccgaggagttcagggacaggtataggattgatgtcgtgaggaatgtgaaggccagtatgaggttgagggcagcctgtgagaaggccaagaaggttctgagcgcgaatgcagaggccgtggtgaacatcgagtgcctgatggaagagaaggatgtgaggggggtgatccgaagggaggactttgagaagctatgtgccagactgctggagagggttgttgaaccttgcaagagggcggtggaagattcagggattggattggagaggctgcattctgtggaactcgtcgggtcaggttctcgggttcctgccattaccaaggtgcttgcgggattctttagaagggaacctagtcgcacactcaatgctagtgagtgtgtggctcgggggtgcgcgttgcaatgtgcaatgcttagtcctacgttccgtgttcgggaatacgaggtgcaggatgcaatccctgcttccataggatttaacactagtgacggcccagtttcaacattgtcaagtgatgcattgttccggagaggcctgcactttcccagtgttaagatcattactctagagaagaatgacagttttagttttgatgcatattatgtggatgctaatgaattgcctcctggtacctcaacagacatcggtagttttcagattggcccattccaagcacataccgaagcttctaaagtcaaagtaaaaattcgcttgaatctacatggtttggtttcagtcgaatctgccgttttgataaatgattatcaaaggaatggaagttctactgatcatatggaggtggatagcagtggtgatgacatgcagggtcacaagtcaagaagtgaaaggtctatccagcggcaggagttgccaatcactgagtacatatatggtgcaatgagcaagcatgaattgctggaagctcaagagcaagaacagcaattggcttatcaggataaacttgtggaatggacaaaggacaggaagaatgcattagaatcttatgtatatgacacccgtaacaagctttctgagaggtaccggagctttgctactgattcagaaagggaacaaatctcagttaatttacaacagactgaagattggctttacgaagaaggtgatgatgagacagaagcagtttacagtagcaaacttgaggagctgaaaaagcttgtagatccaattgaaaatcgttgtaaagatgacgaagtgagagctgaagccatgagagatcttttgaagtgcattgttgaccacagaaatgctgccaagtcattatccacacctgaaagagatgctgttgacaatgagtgcaataaagctgagcagtggctaagggaggggtcccaacttcaagaatccttgcccaagaatgtggacccagtactttggtcctgtgaaatcaagagaaaggaagaagagctggatacgttctgtcgaaacataacaaggcacaagggctctccagcaaggacagatggcagcaggggttcagattacatgcctacacctgatagagattaaatattttcacgatcacgaggtttctttactgtacggccacacatgtcttagaccttgttcgtttacgtcggattgcacccggaatcgttccagctaatcaaagtttatataaattagagaagcaatccggctaggaatcgttccgacccaccaatccggtagaaacgaacaaggccttaatcattttgtagcatatatatgaatgaacgagttcctgctaacaccgtcatataatcgactctgtacaacactaggcccgccattgggtgaccgcttcttggttctccaaggtgcagttgtcacttgagagcctactgatcatgattgtcgatacctgtgaattcttttccggtacttggatcaaggttgtctgcttcagtttgttctgaatggaaaggataattaaaaggaaattgtatgcaatagatattgttgacgccgttttttagcttggcagatttatgcttcagtttgttgatcccaggaagttacccattatttaattttgtttgttaataccttgtatggtgtacattgatgatagttccttcgcacacatttttttttcttatgatgaaacaatacatttgaattttattggccaaaag

SEQ ID NO: 199989 - DNA, 2777 bp, Zea Mays
aaaaccgcccccggttaaaaattccgaacgcatcacgcaatcgagaaaaacacaaaccgaaaaacctcctctacagtcccatctaggcgcccctcctcggctccgatccagtttcgccggcggccatgtcgcagccggcggcgacggtggccgcggcggcgcagccgcagggtcgcggccccgcggggcgccagggcggcctggggcagagcatcgcaggcatcgtgcggatggcggtgttctggtactttgcgtccaagttcttcgggcccaagcgcccacccgcggaccccgggatgctcatgtccaacctcttccagaagggcgagccaatggatatgtggatgtatttgtcagagaacgagaagttcaacgattttgctaatgaggatgcacttatttggcacgaggcaaacataccatatgcagtctggggacctaccagtactagaacacggtcattaacgtactatccgtcagaggctctcaagcataatggctctttgtatgctcatgtttacttcgccccgttcggggttatcctgtggaccctacagatccagaatatgagcagaaatcttcgtttgggaggacccatcgtatctgttgtggcattcttgccaaaatcaaaagctggtaaaaagaagagcttgcttggagattcagaagagcctgaagagaaagcaccgcgcaataaggagaataaagaatctgaggataaagatgagggtccgactgaatatatatcttattggaaaccaaatgtaacaataaatcttgttgaagatttcacacggtatcccaacaataatgtacctcccattgttgctccatgtatccttaaactgtaacagatagtaacatatatcatttttgttttgtgatagttccacttttacacttacagcatagatattgttcttactggcttactgtttttttcttcaaaaatttcattgtttgaactttgaatccaactaatgttgaaagctggaatatagaaaagttacatgttttgagaatggttttggttttcctttacaatagcttgacagatctgaatgtggatccagttacgggcgattattatcctacagtattcttcaatgagttttggctattgaaggataaattaatagcgctcaacgagactgtggaggaattgcccttaaaccttgaagttggtcctattagcatgaccaagtggcaattatttttacagattgagcagtccttccaggttcatcgtagttatggaagtatgcttgaaggcgaggctgatgaactcaagagggtttttcttgaaggaaatccttatcttcttggattgactatggtcgtttctctattacactccctgtttgattttctggccttcaaaaatgatatccagttctggaacaagaacaagtccatggaaggtctatcggcaaaatctgtggttctgaattttgtgtgtcaactagttgttttcctgtaccttcttgacaatgacacttcatggatgatccttgctagctctggagttggtgtgtgcattgaattttggaagattggaaaggcaatgcatattgaggttgatagaagtggaaaaattcccatgttgaggttccgagaccgtgaatcatatgcacagaataagactaaagagtacgatgccattgcaatgaagtaccttacctatgtacttttcctccttgtggtcggtttctctatctattcacttaagtatgaaaagcacaagagctggtactcatggatactttcttctatgacaagctgtgtgtacatgtttggtttcattatgatgtgcccccaattgtttatcaactacaagctgaagtctgttgctcatatgccatggagacaaatgacctacaagttcctcaacactataatcgatgacctttttgcatttgtcatcaaaatgccaatgcttcatcgtctctcagttttcagagatgatgttatcttcttgatatacctctatcagaggtggaagtatccggtcgacaagaagcgtgttaacgagtttggcttcgggggcgaggacgaaccggcagcccaggaggctgtggaaggaagtgattcagctgcagcaccccagctaacggaggccgggtccgagacgagtacggaggacaagaaaaccaagtgatctccaatcttttgatcatccaaatacaagcatacatctctgcaacatctgccttcccagcgggcgtgaaatttctttgctgaaactggatgctggactcttgcggtcttgtcttaccgagacgtgctgaccataagataaggcgtgtaacaagggacacgatagtcttttgtctagagcagcgggcgaacaggcacacactgtcacaattacgtttccagttcgtcttttagcagccattactagttgatatgcttgtttgattggtttgtgtacaaattttgtgcatttttcttaaaacacacaattggcggctcgtagtttcatcgtgatgtgttttccctaatattagtgttgcaacgagtgtccactagtgagtgcacacaacggtgcggttctaaactgttcctcacaagaaacaattgaatccctgccaagagaagtagagaagcatgttggtaaccaaattattagatctataggccatatttggttgcaaggatgggttctgattcttgctaggggatggaagcgggttctgttgttagtctccggtgaatcattttatgtgaagcggttgttttgaattagagaaagaaaagagagagatcatttccca

SEQ ID NO: 199990 - DNA, 1933 bp, Zea Mays
ccataaaccaccgacttccaggagtacttccagcgacccagcaccccaccacaaaggcacaaatccacaatcccctcttcggtacctttctccgagtcgtcttcccgttgatcggcaaagagactttagggttttagcggcttctatttctgagcgagggtttatccgccaggggcggcgcgacgcggcggcagttgagctgggatttccttcccatcccgttcccttccaggcgaggcgatggacgaggcggcggtcgacgacctcatccggcggctcctcgaggcccgcggcgggcgcacccccgcgcaacgcgcaggtgaccgacgctgagatccggcgcctctgcgccgccgccaaggatgtgttcctctcccagcccaacctcctggagctcgaggcccccatcaagatatgcggggatgtccatggtcagtattcagaccttcttcgattatttgagtatggtggctatccaccagatgcaaattatctgttcctcggtgactatgttgatagggggaaacagagcatagaaacaatatgccttctcttggcatacaagataaagtacccagaaaacttctttcttctcaggggaaaccatgaatgcgcctcaatcaaccgaatatatgggttttttgatgagtgtaagaggagattcaatgttcgtatctggaagatattcaccgagtgttttaactgcctcccagtggctgcgcttattgatgacaagatcttttgcatgcatggagggttgtctcctgagctaaagagcatggaccaaatacgtaacatttctcgtcctgtggatgttcctgatgttggtctcctatgtgatctgttatggtcggaccctgataaggagattgataggtggggtgagaatgacaggggtgtttcctacacctttggagctgacgtagttgccgagtttcttcagaaacatgatctagatttgatctgcagggcccaccaggtcgtagaggatggttatgaatttttcgcaaaacgccagcttgtaacaatattctcagcaccgaactactgtggagagttcgacaatgctggtgcactgatgagcattgacaactccctagtatgctcgttccagatactcaagccttctgagaagaaaggaaaagcaggaaatgggaacatgccaaagcccggtacacctcccaggaagataaaaataagtgttacccatatttagccaggttctcgctatcaatctgcatttgcgaagttgtgattaagtgctcccccaaacttgtgtatcccattttctaagaacaaaggacattctctttgctggatgatggttttttgtcattattgtggtctacatatactccggctgaaacacagcgccaatcgaccgcccattgcaatgtcgcaagataaactgtattgtcttaacgagtccctagcaaaatgctctgccactgcggattcagtttgggaaggaacaggcagtggagtatgtaatgcggtccacacagccacgttggcaagtggtatgctggatctaggtggcactgaatcatgattcaaatgctaattcataaaatagtaggacactaaataaatgttagtttaaaaataaatagagatatagttcgattcaattcttaaattttatagtggaaaatttagagctcattataatgcccagttttgcttgcacggaacagtaaaagttcgagcactcattgctggtttctgagagttgtgtgatttgttacaaaataacatattacaaagttatatgtgatatagtgaacaatgacatattacaaagttatatgtgataaaagggagcgcgggcctcgacgtctccgggcgcacgagcctcgacggctcacgggcgggcgcgcgaccccgaccatgccggctgcgggcgctgcccggttgcggccggcgcacggcg

SEQ ID NO: 199991 - DNA, 4300 bp, Zea Mays
ccagctagctcgtagcccattatctgctagtagcctggcagttccgacgctgcttgcggcggcgcttggcaaggccgacaaacggcgaccaggcaggcgagctcgtcgcctcgggggcagggaggaccggagcccctcgcctcggaggaagggaggacctgagctttatgatcaagcaggagctctgattaacagaattttttgaattctccccaaattgaagggtgcacctgaagggagttatggatcggaagaatcaaactcctcaaggtcaaatagcacaggtggttgtggaatttcttgaggtagcaatcagctgcatcgtcttcctcaaaggcttctatcctcctcgtgcctttgagaggagaaggtacatgaatgtggtggtccagaaagcactgcatcctgagcttactagctatattcactctgtgactttcggtcttctacctttcattcagaagggattggtagagagggtcgtggtcatcttctatgacaaagggcatgtaccgaccgagaagttcgtcttcaagcttgcagtcaaccagtcataccgttccaagttagaggaggcgaacctggagttcgctctgcgagcattcttgatcaagctgactgttgctgagcctgttaccagaccccttccaccagatggtagctgggaggtgaccgcctacttccggtccctccccggcgacggtgaccgagaagctcagctgtggattcctacggacgccgagctgtggatgcagcctccgcagatcacccccatcaagtcagtcagctgtgaccctctgacgatgcagctctacttggagcaccctagcgtcacggaaccgaaggagccaccggcataatgacaggagcctgcacctgtgggctgtgatacactgcaatagcaagctgggactagacgacagcatgacgaggcaggcaatgcagcttttcaatgagaccaagaacatcaagtccagcatgtcttccttgggcggtggatcgcccgaggaggtcgagaggttctggtctgcctgtgttatgtactgtgtgtcaaggctcagcaaagcgcggaggtcgaaggaaagtggcagtgtctcactttgccagattttgagggcatctaagctgaacattgtggattttttcaaggagatgccgcaattctgcataaaggttgcacacattttgactggcctatatggttcagattgggaaaagaggcttgagttgaaggaactgcaagcgaatgttgtccatttaagcttgctaagcaggcactacaagcgtgcatatcaggagctattcttgccaaatgatggaaagtgttcagacagctcttcagaatcaaacaaccaagaggtttctgattattatcgctttggatggttgctctttttagtcctaagaatccaaacattcagcagattcaaggatcttgtgacatctacgaatgaactagtttctgtgttggctgtacttatcattcatattcctgtgcggctaaggaatttcgatataaaggattcatcctactttggtaagaaatcagataggggagtcagtcttattgcttctctgtgtgaaaaatatcatacctcagaagatgagttgagcaaagcactggagaagacaaatactctcatactggatattttgaaaaagaagccatggacagctacttcagcatgccaacaggataatttgactttcattgatccagaagggttgacagtttttaaggatttgcttcagggaggctcattgaaatcaagtcttctaatcctggaaaaagaatatgaaaatgcaattaacacaagaggcgagctagatgagcgcatgtttgctaatgatgaggacagtttacttggcagtggaagcctttcaggtggagccattaatttaccaggcacaaagagaaagtatgatgttatggcctcacctgcaaaatcaatatcaagcccaaatccaatgtctcctccacgtttttgtctatctcctaaaggaaacagcttttgcaactcaaagatggctcctatcactccagtgagcacagccatgacaactgccaagtggcttcggagtacagtatctccgcttccatcaaaaccttctggggaactattgcgcttcttctcagcatgtgataaggatgtaacagatgacattgtacacagagctgggattatacttggagccatattcacgagcagttcttttggtgaacagatctgtactaatatgcgaagcgctaataggatggatgctatttggacagagcaaagaaaaatggaagcccttaagctatattatagggttctggaatctatgtgtagggcagagtcacagatcttgagtgggaacaatcttacattacttttgtctaatgaacgtttccatcggtgtatgattgcatgttctgcggagttagttcttgcaactcacaagactgtcactttgatgttcccagctgtgttggagaagactggcattacagcctttgacttgagtaaagtcatagagggttttgttcggcatgaagatacactccccagagagttaaagcgtcatctgaattctcttgaggaacggcttctggaaagcatgtcatgggagaaagggtcatcaatgtacaattctttgattgttgctaggccagtactatctatcgaaataaatcggttaggtttactggctgaaccgatgccatcacttgatgcaattgcagcacatcataatatctcaatgggtggcctgccgcctcttcccttccagaaacaggagcgtttgcaagataaagatgaaatcaggtctcccaaaagggcgtgcactgagaggagacatgtgccggtggacagcaattcatttcgatcacaagtgaaggacagtattaaattgaagctaccacctcctcttcaatcagcttttgcaagtccaacaagaccgaatcctgcagcaggaggtgaaacatgcgcagagacaggaatagctgtgttctttagcaagatatcaaaacttgcagccattagaatcagaagtctctgtgaaagactgcaactttctcagcaagttctggagcgagtatattcccttgtccagcaaatccttagccaacagactggtctcttcttcaacaggcacattgatcagatcatactatgcagcatatatggagttgccaagatctctcaactgcaactttcattcaaggagattgtttttgggtataggaaacaacctcaatgcaagccacaagtttttcgaagtgtttatgttcattggcccccaacaagccataatgggaaaacaggagaagatcatgttgatattatcactttctacaatgaagtatttattcctgctgtcaagcctttgttagtggaggttggacctggtgctagtccaaagaggaaagaagagggaaaaggtccatacccagaatcccctcggctagctcggtttccgaaccttcctgacatgtctccaaagaaggtttctgctactcataatgtatatgtctcgccactacgatcatcaaagatggatactttactctcaccaagcccaaagagctattatgcatgtgtcggcgagagtacctatgcgttccaaagcccctccaaggacctgaaggctatcaacaaccgcctaaatagttggaagaaagttagcggacgattgaacttcgacattgtcagcgatctggtcgttgccagtagcctcaacggcgttcaaaatgccaagcccgcagccacggaagtggttcccaccaagacaccggtgaagtgcgagccatctgaatcgtgatctactctgatgctgcatcaccaatccagtgtaacatattataaatggttaggtgtcagatgttctgatttaggagtgtttgaatgcactagagataatagttagttagctaaaaattgttagtggaattagctagctaactattacctaatttgctaaaagtagttgatagctaaaatattagctagactgtttagatgtctcaattttagcagctaactattagttctagtgcattcaaacattcccttagatattaggtggccttatttctgtttgtatttttgacatgtaaacatctttgtgagcagctctaccatctgtaaaatataagaaagctgctctaagagctcccataacccaactctctttgtaagagatagataagtacgatagtcatgtaactttataagttttgaaaaggtctgtaaatacaaatgatcattgtcaattccgtacagttgtgaattgcttgttcatggctgtttactatcag

SEQ ID NO: 199992 - DNA, 1179 bp, Zea Mays
ctttccgcaaagcgaagaggctgcttcaaacttgatgaccccaaatctagggagctaattgctttgagggctgtgattaagtgtatcgaagagcataagcttcagaaggagtgttcacttggacctctccagaagcgtgtttctgagctgaagcccaagggtgagaaaaggccatcaagtgatgctgggcgtacttatgcaaagaagcctcgaggccctggcatttcatttcctaggagacctgccggttctgttggttcagctgctcgcaggcctccatttccgggctatacctggcagcgtgctcctgcgccgatgccctcccgtggtcctgctccagtgccctcccgtgcccctcttcctgcccctcttcctgatagatatggagctgctgaccggtaccattacacaccaccagccccagcatacgactctggtgcattttcgtcttacagtgaacctttcagtgccccaaaaccattccagtacactccagggtcagtggcagcatcatacaattcaagcccctataaagtcgcttatggtggcccaggagcaccagtcagaagcacctatccaggttatgccagcgcatctgggccggctgcttccagcagctatgcaaattatatgggatccgtatatcgccctccccagcaaccatagattcgactcctccctcaaaaaatgttgtgctggtgatgcaagacatggaaaccagtccctcccatccaactcccatggcggagatgtaaacttgagctattttcttgtttcatcgtccacaacagtggggtttggaggtgtatactgatgctctcatgtccagctacatctacaatgtaccttgcactcttgtttgcttttagctgtgcttattcctgagtcgttgaatgttttatattttctttccacaagtctgtctcatgtagggaactgtctcatctaggaatataactcctttacttgctaccgttgcgattgagttggaaacgccgattgagttggaaacgccaaaacgtggcttgagtttaacagcttgcttatccctatctcatttcatttttcactttgtaatagtcaaatagtgcgtcttacattttaaattccaagtgtctctcattttaaactattctgtaacagtatgtaacagtcaacagtacaaaacacggatttgca

SEQ ID NO: 199993 - DNA, 1203 bp, Zea Mays
caagggtagacccggaggccaccacatgagtggggtatgggaaaggaataaactgaggatgaccccaaatctagggagctaattgctttgagggctgtgattaagtgtatcgaagagcataagcttcagaaggagtgttcacttggacctctccagaagcgtgtttctgagctgaagcccaagggtgagaaaaggccatcaagtgatgctgggcgtacttatgcaaagaagcctcgaggccctggcatttcatttcctaggagacctgccggttctgttggttcagctgctcgcaggcctccatttccgggctatacctggcagcgtgctcctgcgccgatgccctcccgtggtcctgctccagtgccctcccgtgcccctcttcctgcccctcttcctgatagatatggagctgctgaccggtaccattacacaccaccagccccagcatacgactctggtgcattttcgtcttacagtgaacctttcagtgccccaaaaccattccagtacactccagggtcagtggcagcatcatacaattcaagcccctataaagtcgcttatggtggcccaggagcaccagtcagaagcacctatccaggttatgccagcgcatctgggccggctgcttccagcagctatgcaaattatatgggatccgtatatcgccctccccagcaaccatagattcgactcctccctcaaaaaatgttgtgctggtgatgcaagacatggaaaccagtccctcccatccaactcccatggcggagatgtaaacttgagctattttcttgtttcatcgtccacaacagtggggtttggaggtgtatactgatgctctcatgtccagctacatctacaatgtaccttgcactcttgtttgcttttagctgtgcttattcctgagtcgttgaatgttttatattttctttccacaagtctgtctcatgtagggaactgtctcatctaggaatataactcctttacttgctaccgttgcgattgagttggaaacgccgattgagttggaaacgccaaaacgtggcttgagtttaacagcttgcttatccctatctcatttcatttttcactttgtaatagtcaaatagtgcgtcttacattttaaattccaagtgtctctcattttaaactattctgtaacagtatgtaacagtcaacagtacaaaacacggatttgca

SEQ ID NO: 199994 - DNA, 1840 bp, Zea Mays
gaacaattggcttggcagtattcaaagaactcaggcacaagaaattcagaattgcaaatttactacagcataaagggaaaaaacatagattattattggtttgttgcaaaatgtctacggaagcgactttgaacaattctggtggttctgaatctgcattgctgttactggaacagcttgctgaagtttttggaaagttaaaaactcacaccgaaacatttctgcatttgcaaaatggcataaaatgggaagatattgaagggcatttcctcagccttgatgagtcgtacagaagcaagtttgatgaactggtagagaaggagaaggcattagaagaaaagaaagctgaagcttgtaggttgattgcagagaaagaggctaaagtttctacaaaagagcatgcctcactgaatcagcttcaggagctaagggatgctgctgtctcttctctagcagaggttcgacaaaaatataaggtggagcttgctgagatacttgaagcaagtggaagcaaagacaaaaaggtatcattgaggagttggttaagcggcacaggcaaattgatgcagttcatttcatacaagcttttgggctttcggagacattcccccctgcacctctgctgaagacatatgttgaggaacaaaaggatacaattgaaaataatggcgatgcaactgcgatctcattaacggatgaccccaaatctagggagctaattgctttgagggctgtgattaagtgtatcgaagagcataagcttcagaaggagtgttcacttggacctctccagaagcgtgtttctgagctgaagcccaagggtgagaaaaggccatcaagtgatgctgggcgtacttatgcaaagaagcctcgaggccctggcatttcatttcctaggagacctgccggttctgttggttcagctgctcgcaggcctccatttccgggctatacctggcagcgtgctcctgcgccgatgccctcccgtggtcctgctccagtgccctcccgtgcccctcttcctgcccctcttcctgatagatatggagctgctgaccggtaccattacacaccaccagccccagcatacgactctggtgcattttcgtcttacagtgaacctttcagtgccccaaaaccattccagtacactccagggtcagtggcagcatcatacaattcaagcccctataaagtcgcttatggtggcccaggagcaccagtcagaagcacctatccaggttatgccagcgcatctgggccggctgcttccagcagctatgcaaattatatgggatccgtatatcgccctccccagcaaccatagattcgactcctccctcaaaaaatgttgtgctggtgatgcaagacatggaaaccagtccctcccatccaactcccatggcggagatgtaaacttgagctattttcttgtttcatcgtccacaacagtggggtttggaggtgtatactgatgctctcatgtccagctacatctacaatgtaccttgcactcttgtttgcttttagctgtgcttattcctgagtcgttgaatgttttatattttctttccacaagtctgtctcatgtagggaactgtctcatctaggaatataactcctttacttgctaccgttgcgattgagttggaaacgccgattgagttggaaacgccaaaacgtggcttgagtttaacagcttgcttatccctatctcatttcatttttcactttgtaatagtcaaatagtgcgtcttacattttaaattccaagtgtctctcattttaaactattctgtaacagtatgtaacagtcaacagtacaaaacacggatttgca

SEQ ID NO: 199995 - DNA, 1779 bp, Zea Mays
ctcactcactcttctctgacgccgctgattattattggtttgttgcaaaatgtctacggaagcgactttgaacaattctggtggttctgaatctgcattgctgttactggaacagcttgctgaagtttttggaaagttaaaaactcacaccgaaacatttctgcatttgcaaaatggcataaaatgggaagatattgaagggcatttcctcagccttgatgagtcgtacagaagcaagtttgatgaactggtagagaaggagaaggcattagaagaaaagaaagctgaagcttgtaggttgattgcagagaaagaggctaaagtttctacaaaagagcatgcctcactgaatcagcttcaggagctaagggatgctgctgtctcttctctagcagaggttcgacaaaaatataaggtggagcttgctgagatacttgaagcaagtggaagcaaagacaaaaaggtatcattgaggagttggttaagcggcacaggcaaattgatgcagttcatttcatacaagcttttgggctttcggagacattcccccctgcacctctgctgaagacatatgttgaggaacaaaaggatacaattgaaaataatggcgatgcaactgcgatctcattaacggatgaccccaaatctagggagctaattgctttgagggctgtgattaagtgtatcgaagagcataagcttcagaaggagtgttcacttggacctctccagaagcgtgtttctgagctgaagcccaagggtgagaaaaggccatcaagtgatgctgggcgtacttatgcaaagaagcctcgaggccctggcatttcatttcctaggagacctgccggttctgttggttcagctgctcgcaggcctccatttccgggctatacctggcagcgtgctcctgcgccgatgccctcccgtggtcctgctccagtgccctcccgtgcccctcttcctgcccctcttcctgatagatatggagctgctgaccggtaccattacacaccaccagccccagcatacgactctggtgcattttcgtcttacagtgaacctttcagtgccccaaaaccattccagtacactccagggtcagtggcagcatcatacaattcaagcccctataaagtcgcttatggtggcccaggagcaccagtcagaagcacctatccaggttatgccagcgcatctgggccggctgcttccagcagctatgcaaattatatgggatccgtatatcgccctccccagcaaccatagattcgactcctccctcaaaaaatgttgtgctggtgatgcaagacatggaaaccagtccctcccatccaactcccatggcggagatgtaaacttgagctattttcttgtttcatcgtccacaacagtggggtttggaggtgtatactgatgctctcatgtccagctacatctacaatgtaccttgcactcttgtttgcttttagctgtgcttattcctgagtcgttgaatgttttatattttctttccacaagtctgtctcatgtagggaactgtctcatctaggaatataactcctttacttgctaccgttgcgattgagttggaaacgccgattgagttggaaacgccaaaacgtggcttgagtttaacagcttgcttatccctatctcatttcatttttcactttgtaatagtcaaatagtgcgtcttacattttaaattccaagtgtctctcattttaaactattctgtaacagtatgtaacagtcaacagtacaaaacacggatttgca

SEQ ID NO: 199996 - DNA, 2017 bp, Zea Mays
gttgttgcgaaacggtgccgcttcgagccaggtgcgggagggaccgagggaggcggagcaagtgggagctctggagctggagcgggtggaagtgggctgggactgggagccctagcaaagggccatcgcatcccctcttgcatactctctctctctctctcgtgattctcccgtgccccggtctctctgtctctagtggcgacgactgcgctgcgccgccgccctacgcaggtgcccaagtgtctatcttcgggactgcgccggcgacgagcacccaccagaaattgttggacctgggtctgcccctggactcgagcttggggccaagctaattcgagctctgagcatttgatttctagcatcttacatgcaaaaagctagtacttggaatccgagcaagatctaacccagacagtgcagtggcagattgtagtatcctctaagatggacggaagagaatcagtcttatggtaaatcctggtgaatattcatgggaggtcagcaagttctggcctgactaagtctggtaaaaaaagttgcttcatctcagatcatcaatggtgagaatgaggttcccgaaacgttatctcatagtattgctgacattcatctgcacaaatgtttgctacattgagcgcgtgggtttctcgattgcttacactgttgcagccgatgccattggtgtgaatcaggccaacaagggcatgatactctctatgttctattatggttatgttttatcacagattcctggtggatgggcagcacagagaataggaggcagacgtgttctgctactgtcatttgtattgtggtctatgatatgtggtttaatcccactcgaccccaacagagtaaccattctggtcctttctcgcctatttgtcggtgtagcacaaggtttcatattccctgccattcacactgttctggcgcagtgggtgccaccgcaggagcgctctcgctcggtatctctcactacctcggggatgtatcttggtgcagctggtggcatgcttttcttcccaagtctggtgaagcacacgggaccccagtcagttttctttgtcgaagcagtgctgggagtagcatggtctgtcatatggttgaaattttccagcgacccacctcgtaccgatcttccaaaggtatcgatgccgaaagtggcatctcgggacatgattaaggcacaagcaggaggggttgttgcacctcgcacagtaaagatcccgtggcgaaggataatattcagtctacctgtttgggcaatcgttgtaaacaacttcaccttccactatgccctgtatgttcttatgaactggctccctacctattttgagcttggcctcaagcttagcctccaggacatgggttcctcaaagatgctcccttatttcaacatgttcattttctccaacatcggtggtgtgatcgccgatcacttgattacaaggaggattctgtctgttaccaagacgaggaagcttctgaacaccatcggattcatcgtctcagcatttgcactcatggcccttcctttattcagcacaccctcaggcactgtaacgtgttcggcgatatccctcggttttcttgccctgggaagagcagggtttgccgtaaaccacatggatgttgctccgaagtttgcagggatagtgatgggcgtctctaacacggcggggacactggctgggattattggcgtcggcctcactggtaatatcctggaggcggcgaaggcttctaacaaggatctaacagactcggaaacctggaaaacagtcttctttgttccggcatacctttgtatcttcagctctgtcatttttttaatcttttcgactggcgaaaagatattcgagtagatggtgattatattttttgtttctcatttacagtgaggcaggatagcagaacgggaatctcacatgtacccgtagcatttgttacaaaatttcatactgtatcatacacatgatctaaagctatgtcaggaaatctcacatttttcatt

SEQ ID NO: 199997 - DNA, 2010 bp, Zea Mays
gttgttgcgaaacggtgccgcttcgagccaggtgcgggagggaccgagggaggcggagcaagtgggagctctggagctggagcgggtggaagtgggctgggactgggagccctagcaaagggccatcgcatcccctcttgcatactctctctctctctctcgtgattctcccgtgccccggtctctctgtctctagtggcgacgactgcgctgcgccgccgccctacgcaggtgcccaagtgtctatcttcgggactgcgccggcgacgagcacccaccagaaattgttggacctgggtctgcccctggactcgagcttggggccaagctaattcgagctctgagcatttgatttctagcatcttacatgcaaaaagctagtacttggaatccgagcaagatctaacccagacagtgcagtggcaggtcttttcagttcagcgcagcatatcaagattgtctctgttaatttgtgtatgagatcagttaactgataaggatatgtaaagaaccaatgatcagtaatttttacactccagattgtagtatcctctaagatggacggaagagaatcagtcttatggtaaatcctggtgaatattcatgggaggtcagcaagttctggcctgactaagtctggtaaaaaaagttgcttcatctcagatcatcaatgattcctggtggatgggcagcacagagaataggaggcagacgtgttctgctactgtcatttgtattgtggtctatgatatgtggtttaatcccactcgaccccaacagagtaaccattctggtcctttctcgcctatttgtcggtgtagcacaaggtttcatattccctgccattcacactgttctggcgcagtgggtgccaccgcaggagcgctctcgctcggtatctctcactacctcggggatgtatcttggtgcagctggtggcatgcttttcttcccaagtctggtgaagcacacgggaccccagtcagttttctttgtcgaagcagtgctgggagtagcatggtctgtcatatggttgaaattttccagcgacccacctcgtaccgatcttccaaaggtatcgatgccgaaagtggcatctcgggacatgattaaggcacaagcaggaggggttgttgcacctcgcacagtaaagatcccgtggcgaaggataatattcagtctacctgtttgggcaatcgttgtaaacaacttcaccttccactatgccctgtatgttcttatgaactggctccctacctattttgagcttggcctcaagcttagcctccaggacatgggttcctcaaagatgctcccttatttcaacatgttcattttctccaacatcggtggtgtgatcgccgatcacttgattacaaggaggattctgtctgttaccaagacgaggaagcttctgaacaccatcggattcatcgtctcagcatttgcactcatggcccttcctttattcagcacaccctcaggcactgtaacgtgttcggcgatatccctcggttttcttgccctgggaagagcagggtttgccgtaaaccacatggatgttgctccgaagtttgcagggatagtgatgggcgtctctaacacggcggggacactggctgggattattggcgtcggcctcactggtaatatcctggaggcggcgaaggcttctaacaaggatctaacagactcggaaacctggaaaacagtcttctttgttccggcatacctttgtatcttcagctctgtcatttttttaatcttttcgactggcgaaaagatattcgagtagatggtgattatattttttgtttctcatttacagtgaggcaggatagcagaacgggaatctcacatgtacccgtagcatttgttacaaaatttcatactgtatcatacacatgatctaaagctatgtcaggaaatctcacatttttcattatgaggactcatctcattggcacggtctcgagtgagtgcagatgtagaagcaatagaatctccaaa

SEQ ID NO: 199998 - DNA, 2234 bp, Zea Mays
cgctacggcccaagagacgcgcaatgggaatccgactcgagatcgctttccattcccatcgcttctcatctcttctccacacgaactcgccctctcgactctcgagagatagagcgaggcaccaagaagggaaaaaaaaagagggacaggaaaaaaaatcattctcgtttcgctctccgctagaccccgcccgaatcaatggagattagggctccgccgacgagcctgaggctcgcgccgccgcccgccgccgccagcttccgccgaaccccgcttaggacctccttccttcgcggcagcgtgtcacttaaagttgtgcaagtacggcagtcaaatgtcaacagatttaagtgcaatagcatacgaagtaacctctttgataggctaacaagggttgtcaggtcctacgcaaatgcagttctaagttcgtttgaagaccctgagaagattctagaccaggcagttctggagatgaatgatgacttgacaaagatgcggcaggccactgcacaggtcttggcatctcaaaagcggcttgagaataaatataaagctgcagaacaagcttctgctgattggtatcggagggctcaacttgctcttcaaaagggtgacgaggatcttgctcgtgaagcccttaagcggcgtaaatcatatgctgacaatgcaagctccttaagatcccagcttgatcagcagaagggtgtagttgaaaatctgatttcaaatacccggcttcttgagagcaagatagcagaggccaagcagaaaaaggataccctaaaagctcgtgctcaatcagcaaagactgctacaaaagtgagtgaaatgttgggcaacgtgaatacaagtagcgccctttctgcatttgagaaaatggaggaaaaagttatggcgatggaatcccaagcagaggcactcggccagttagcaactgatgatttagaaggaaagtttgcactgcttgagacttcatctgttgatgatgatctttcacaactgaaaaaggaattgtctggaagctctttgtaacagttaacaattgaagctaatgcgatatctgcttgttcacgaaatagaacaacatgatgttattttggtgcacatttactggatatatttttgttctaaaaaagacattgattaaatgtacagagtatgaagtacaatctgtagacagccagcaatttttttgtccttccacaatattttactctattcatctgctatagtccccattgattcagagttacttttgctgttttggtcaatccccatgaggtggagttcacctttagaatttattccttttgagttcatgttatactgggtcataacctaatgcttaattgggtgtttggttgggcggaactaaatttaagtctaactagtccatgattcaatcatttaatgctacagtaaatatttgctaatcatggcttaattaggcttaaaaatttgtctcgccgtttaatctttatctaagtaattagttttataattagattatatttaatactcgtaataatcattcaaacatacaatgtgacccagtttatactttagtccttagaagcaaacacctagtatgtaaggccgtctccggcagctcccctatctcatccactactattttaaacgtcactgtgtgtcgtctacagtcagatattcggtggacaaagtccatgttagcctgctgacattacacccattatctttatttctttattagagcaaaggcagttgaagaatgataagcatatgtactgccttacaaatgaattgattgctcatctattcaatacaaaatgaatttatttgcttgacaccgacagaaaggagagcttcctccaggcagaacagcagtcagcaactcaggtgctgggcgccctttccccgacctagagattgagagcgagctaaacgagctgcggaggaaagccaaggaatattaggttcattccttgtcgattcagcaggcctgacggaatctcatttccaagaaaatatagtgcagctgcagattgctccattgcgcgtttcgaaagttgaaacacaagtgcgcattgactgtttgttaaagagtatggaatcggctaatttctcggcattttccccctcgagtgacatttgtacagctatccataaaattgttgtaaatcactactctctctagagcctttttttcatactatatataaagtcaaagttcgaagttcccacgccgtggtttt

SEQ ID NO: 199999 - DNA, 1316 bp, Zea Mays
gtggtgacacccaatcacatggcgttcccatgtgatgggctctgatcatatccaggagaaggctgagctgctatacgctttgattaacgggaggcaactctgtactcttccaaaattgacccagccgacgcttataatctggggagagcaagatcgggtgttcccaatggagctggctcacagattgaacgggcatctagaggggaattctcgattagttgtcataaaaaatgctgggcacgcggtcaatatcgagaagcccaaggaagtgtgccggagcatcattgagttcttcaaggagcctgtcgctggagctgcaaatgcggacgacaaggtgggaacctttcatctctaaccaagacagtgagctctatcagttggaggactaatttatgatttttttcactcgctcgatccttggattgctcaacagatgatgcactagccatcattcaaaacacgcacttgcacgcaaatagacgtagatcatggaggctactatactatacacgcatgttggctgactggtttccggcggcaaatcttagaacgctgtgctgtggttcgtctcgcaggtgtagtagcttccaccaatggcggacgtggataggttttcgctgggcatcggcagacggcacacccgcttgtggaacgcaaacacaaggcagatacgtggcattgtacatctacatccctctgccattgttctgatgtacttaaagggtgtatgtagagtcattgcagtagcgattcataaagcatgtaacggggaacagagggaaaccatagtggctcaaatccgagtgaaaccactgtgttgttgccgttctcggatccctgcccgtatcgcatttctcctgccatgacgaccacatggcaaatcgcgggtgacatccggcactcatgcggcaagcaggcaacgtgtcgcagaaactatggagtgttggtgcatggaatggaagcatacgagtacgatttgatcggtccctgtctaaaatccagcatatgatcccagcgactacaacgcgaccctcgcgtagtcgcgtgtaagagcagtcttttattcatgggccgccgcagtccattgttcgttgaacacacccgaccccacggcccgtcagcccaacaaagttaagctggaggacaaaaaaattatggggtgagagaggctcgaactctcgacctcaggataaactcaacttagctatgagacctacgcgctagccaactgcgccaccacccctttgtgataaagtgtactataaatttaatgtaactatataacaggccggagacattatgcttcagttaactcc

SEQ ID NO: 200000 - DNA, 1935 bp, Zea Mays
ctttttctgtagaattccaacatgagcaagtaatgcgtttagatgattccgacttgaacaggcctgctatgtggtgtttatgtgattggttcggatggctatgcgaaaagaaaaccctgtgcttaatgcttgtcaagcatccaatggccggatcacgcgagctcaagctgctgcaaatcgtcgaagctttggaactttcccttctgttccattgcctgcaaaaaccgaacgaaaacagactgcacaagggaaggcaaaacgaggttcttcatatgacaacaccagtgcaagtgttgcactttcaggcccccagcctaaaaggcgcacagtactcagggatgtgaccaatttgagcaatgctaactctaacaaaagttttgctgctgcaccgaagcttcagacaaagccctctctaaggactggaagaaccgtgagcaaaagcaagccgtgcgcaaaaaagattcctaaaaaaccaccaccagctggtaatggaagtgcattgactaatgttttgaacattgctgaagaaacacaagcggagaagattttggcagagagagtggaacccgttctgttgcttgagaacagggggccactttcattgcagaatgttgaaaggaacagggacagtgcttgtcatgaggtattctttgaggaaagaaacctcagggataaatgtgaaccttctgtgtcaaagaatggggactcttatgtgttagacattgtagatatcgacaaagataatggcaatcctcaaatgtgtgcttcctacgttgtggagatatactcaaacctaatggcttcagagcttatgagaagaccaagtccaaattacatggagggtttgcaacgggacatcacaaagggcatgagagaaatactcattgattggcttgtggaggtttctgaagaatacaagcttgttccagacacgctgtacctaactgtatatcttattgaccggtttctttctcggaactacattgaaagacagagactacaacttgtgggaataacaagcatgcttgttgcctcgaaatatgaagagatatgtgctcctcgagtagaagagttctgtttcataaccgacaatacatacacaaaagcagaggtgctgaaaatggagagccagctgctgaatgacctgggatttaacctttctgttccaactacaaaaacatttctcaggagattccttagagcggcacaagcatctcgtaaaactccttctatgactttaggatttctggccaattatctcgcggagttgactttgaccgaatatgagttcttgaaatttcttccgtcgttggtggcagcatcggccgtgtttcttgctagatggacgcttgaccaatccgacctcccatggaaccagactctagagcactacacctcttacaaatgctctgacattcaattgtgtgtctgtgctctacgggaactccagcataacaccagtaactgccctcttaacgccatccgcgagaagtacaggcatcaaaagtttgaatgcgtagcgaacctaacttcaccggagttccctcggtcgttcttcagctgacacgccaatggcaccgattgcctggcctttttcgagtcgcaagtgagatgaagaaggacagagagatggctccttggcttttcttttgtttgtttgacgtaaaaggttcacccggttgtaaacaacactgtgtgtagggctttttgcttgggctgttgttaattaactgtaaggggagatggtccggctggcttgtatgacgacaaacgacgggatgatgtttgtgttgacacaattcgttcattggtagcctcggaatggaaattagtttattgccagtgattactctggatggaatgactgattgagtgtttgttatatatacatgtgcctgattttacaggatctgtaaagtttttttggatgactag

SEQ ID NO: 200001 - DNA, 925 bp, Zea Mays
ttggcataagttctgattggtcactaaaactttgtggctcttctgaggaggatcaagaaggtagcggaggagagaccgagctccctgaagttgatgcacatggtgtggaccaagagctgaagcaccatctcctgaagaaatacagtggctatctaagctcgctcaagcaagaactgtcaaagaagaagaagaaagggaagctccccaaggaggctcgccagcagctccttagctggtgggatcagcactacaaatggccttacccctcagagactcagaaggtggcactggctgagtctaccgggcttgacctgaagcagatcaacaactggttcatcaaccagcggaagcggcactggaagccatccgaggagatgcaccacctgatgatggacgggtaccacaccaccaatgccttctacatggacggccacttcatcaacgacggcgggctgtaccggctcggctagccaccggtatctcgcttccatttcacaccccacggcctagctataaagactaatggttccaggtgtctgaagtactgaagacaggggggctagctatctaatgtttgtgccgcacgcatgagctgtaaggaggccatgcttaattattctgttgccgttgctactctatctatatgcgcctatgcctccgtgcatgaactatgctttaggtggttgctgctccacactgtggtggtgtgcttttgcttttgtgtggtcgtattgtatgcgtaacctgacagatggatccctgattgctacatgtttgaataatttgcatgatctagctagtttctgcctaatctaatggtacggctcatgtcttgtcaggtggatttgttatgtgttttttttttcaaattgaggcttgtttgttttgctctcaatccatccatgtgaattgggtggaattaaat

SEQ ID NO: 200002 - DNA, 920 bp, Zea Mays
ccgggtgtcacgagtttccgtttgtctcgaggctcttctgaggaggatcaagaaggtagcggaggagagaccgagctccctgaagttgatgcacatggtgtggaccaagagctgaagcaccatctcctgaagaaatacagtggctatctaagctcgctcaagcaagaactgtcaaagaagaagaagaaagggaagctccccaaggaggctcgccagcagctccttagctggtgggatcagcactacaaatggccttacccctcagagactcagaaggtggcactggctgagtctaccgggcttgacctgaagcagatcaacaactggttcatcaaccagcggaagcggcactggaagccatccgaggagatgcaccacctgatgatggacgggtaccacaccaccaatgccttctacatggacggccacttcatcaacgacggcgggctgtaccggctcggctagccaccggtatctcgcttccatttcacaccccacggcctagctataaagactaatggttccaggtgtctgaagtactgaagacaggggggctagctatctaatgtttgtgccgcacgcatgagctgtaaggaggccatgcttaattattctgttgccgttgctactctatctatatgcgcctatgcctccgtgcatgaactatgctttaggtggttgctgctccacactgtggtggtgtgcttttgcttttgtgtggtcgtattgtatgcgtaacctgacagatggatccctgattgctacatgtttgaataatttgcatgatctagctagtttctgcctaatctaatggtacggctcatgtcttgtcaggtggatttgttatgtgttttttttttcaaattgaggcttgtttgttttgctctcaatccatccatgtgaattgggtggaattaaat

SEQ ID NO: 200003 - DNA, 1008 bp, Zea Mays
tgacaaacaagtaaaatgttgggatcttgaacaaaacaaggtcctaccatgggcatctgagtggtgtttactgcctagctctccatccaacaattgatatcttactgactggtggccgggattcagtttgcagggtgtgggacatcagaacaaaagcacatgtttctgctttaacagggcatgacaacactgtctgttcagtgtttgctcgtcctacggatcctcaagttgttactggttcacatgatacaactattaaattctgggatcttgtagctgggaggactatgtgtacccttactcaccataaaaagtctgtccgagctatggcgcttcatccaaaggagaaagcatttgcatcagcatcagcagacaacgtaaagaagtttaaccttcccaaaggcgaatttctgcacaacatgctgtcgcagcagaaaacaataatcaattcaatggctgtaaatgaggatggtgtcttggcaactggaggggataatggaagcctgtggttttgggactggaagagtggtcataactttcaacaagatcagactatagtccagcctggatcactggagagtgaggcatgcatatatgccctctcatatgacgtgagcggatcaaggcttgtgagctgtgaggcggataagactataaagatgtggaaagaggacttgacagcgacgccagagactcatcccatcaatttcaagcccccaaaggacatccgaagatattgatgctcaaatcccacaagtagcaagctagtggatggttggagcctccacaattgtgtgacccaaactcgcttcttccctgagcccaattgaaattttgctagggtttgctctattgtgtaatctgatgcatgtactccaccagtctgatgccttggtccaacgctttgaaacccttagactgtttctttgtgatctttgcgttcgatttgattatatcctaccttagtaccttggactcttgcactaataggtctttaacatgtcttct

SEQ ID NO: 200004 - DNA, 1467 bp, Zea Mays
cttcaatttctagagcaattgaatacggaacacaagatacaaaagatgctcacggagaaggctctaggaatgccattgtccctgcaccacttatgctgccaaaagcacctgaatctaccatacctggcaaaaatacaactctgtcaattcctggatcatctgacagattttctacatccgcactgatggaaaggatacctagtagatggccacggcctacatggcatgctccttggaagaactatcgggtcatcagtggtcacttgggatgggttcgatctattgcatttgatccagcgaatgaatggttctgcactggttctgccgataggacaataaagatatgggatcttgcatcaggaaccctgaagcttacactgactggtcatattgagcaaattcgtggacttgctgtcagccaacgtcacacttatttattttctgctggtgatgacaaacaagtaaaatgttgggatcttgaacaaaacaaggttattaggtcctaccatgggcatctgagtggtgtttactgcctagctctccatccaacaattgatatcttactgactggtggccgggattcagtttgcagggtgtgggacatcagaacaaaagcacatgtttctgctttaacagggcatgacaacactgtctgttcagtgtttgctcgtcctacggatcctcaagttgttactggttcacatgatacaactattaaattctgggatcttgtagctgggaggactatgtgtacccttactcaccataaaaagtctgtccgagctatggcgcttcatccaaaggagaaagcatttgcatcagcatcagcagacaacgtaaagaagtttaaccttcccaaaggcgaatttctgcacaacatgctgtcgcagcagaaaacaataatcaattcaatggctgtaaatgaggatggtgtcttggcaactggaggggataatggaagcctgtggttttgggactggaagagtggtcataactttcaacaagatcagactatagtccagcctggatcactggagagtgaggcatgcatatatgccctctcatatgacgtgagcggatcaaggcttgtgagctgtgaggcggataagactataaagatgtggaaagaggacttgacagcgacgccagagactcatcccatcaatttcaagcccccaaaggacatccgaagatattgatgctcaaatcccacaagtagcaagctagtggatggttggagcctccacaattgtgtgacccaaactcgcttcttccctgagcccaattgaaattttgctagggtttgctctattgtgtaatctgatgcatgtactccaccagtctgatgccttggtccaacgctttgaaacccttagactgtttctttgtgatctttgcgttcgatttgattatatcctaccttagtaccttggactcttgcactaataggtctttaacatgtcttct

SEQ ID NO: 200005 - DNA, 1632 bp, Zea Mays
gatatttcgtccacaataatttctcccaaagacaggacaatgagaataacctctcaattgtgtcattttgttgtattttcatcaggagaatcaattgatggtcaacatggggattagtccgaggcggagtgctccgtcgacctcaagctcggcgggctaggcgagatcggggcggcggacggcacaaccacgaaggagccggtggctgcaaccgcagctccgtccgccaccccgatgaagcgcccgcgcttgcggcccggcggcgccggcggggcgcagtgcccgtcgtgcgcggtggacggctgcaaggccgacctgagcaagtgccgcgactaccaccgccgccacaaggtctgtgagacgcactccaagacgcccatcgttgtcgtcaccggccgcgagatgcgcttctgccagcagtgcagcagacacccaaatctctcttcagcacacaataaagcaggagctgttcaagaacgctggctatgtcgaaggctgtttgtagagggccatggcatcatggcatgggaggaagaagaagaggatgcaacaataaattaatcttaagtagcggtggaagcaacaacagtagtatcagttcaggtccagtagcggaaaaggcaggcagggcaaagatttgggaggccttttcaatccatctcccccatcataacccactttgatctatccatgttagcagtacatgttcgtccatcctatagcatcatgcaggatgcaaagggttctatattcataagcatgttgttgcaccacacaacctttttgttttatatgttgtcatctgatctctggtgaaaaggagggagatgagctacggaggaaatctgatgttatggaattctaagaaaagtctagatttccacaggtccagtggtgccactgatgtcaagtcagcagaaacgattcttgagcatgagtatgcgtcgatgctctttttccctgaggcaatgctactcctatgcacagtgatgtagtagcaacggagaactgtcattaattggatacttcttatcctaattgcagtcgtatcatttagcttggggtttgaattatcggattgccctaccatactgcttagctaaagcccttgtcaaaatgcataattagaagcaactattaaagaaagatcagcttcagatagagtgaagacgcgagtgcattttccagggatggaaagaaggcatgatttattttcctccgacatataaatactcattcaactcggatcgttactctggtgtgcggcccaaataaaatcggaggacacatgcttggtgcgatcacattccgtggcctcttgcagtcgtcctacatccgcggagagtctcgcttctttgaccacggaccagtgtacaatcttttcatggctaaggttgggagtgtccaccacagaagatcgaacttaaccttgatcatgatctctagcgctgagggaacagtgatagattgatatgaggtttgtaggtgtaattatgtgtataataaccttttttttattttccttgcccctatggtgtagtacctgaaaagcaaaatgatgtatgtatttgttgttaaatacttttctaattctaacagtaagaaattaaggttgtgccgatgcacactgcc

SEQ ID NO: 200006 - DNA, 2156 bp, Zea Mays
caacaccgcactagcctagcctccccccgccgctcggccgaatagaatcgattccccctcctccgtcgctgtccggccgaccgcggagagcggagtcgatcgggggcgacaacgatggtggttagcgtggccgcgaccgggcccggcacggacgccgagccggtgagctccaccttcttcgcgtcccgctacgtccgcgacccactcccacggtaccggatgccggagcggtcgatcccgcgggaggcggcgcagcagatcatcagcgacgagctcatgctggacggcaacccgcgcctgaacctggcgtccttcgtcaccacgtggatggagcccgagtgcgacaagctcatcatggactccatcaacaagaactacgtcgacatggacgagtaccccgtcaccactgagctccagaaccgctgcgtaaacatgatagctcacctgttcaacgcgccgatcaaggaggacgagacagctattggggtcggaacagtgggatcctcggaagcgatcatgcttgcaggtctggcgttcaagaggaaatggcagaacaagaggaaggagcaggggaaaccgtgtgacagacccaacatcgtcaccggtgccaacgttcaggtctgctgggagaagtttgcaaggtattttgaggtggagctgaaggaggttaagctatcagaagggtactacgtcatggaccccgtcaaggctgttgagatggtggacgagaacactatctgtgtcgcggcgatcttggggtcgactctcaccggagagttcgaggatgtcaagcagttgaacgaccttcttacagagaagaacaaggaaactgggtgggacgtgcctatccacgtcgacgccgcgagcggagggttcatagcgcctttcctctaccctgagctcgagtgggacttcaggctgcctctggtgaagagcatcaatgtcagcgggcacaagtacggcctcgtctaccctggtgttggctgggtcatctggcggagcaaggatgatctgcctgaggagctcatcttccatatcaactacctggggacggaccagcctacgttcacgctcaacttctccaaaggttcctgtcagatcattgcgcagtactatcaactcattcgcctaggcttcgaggtactactgttcttcgatcggttcttcctcctcttgatcgaacattctgaatatatatgtgcaggggaacaaaagggggtgctgtctgatacgtttcttgagggcgagtcgtttttgtttctgttctcgctttgtgctgccgtaacagcctcccaatctggtcgggttttttttttttggtgccgcttctatctggtgtgtaggggtacagaaacatcatggagaactgccaggagaacgcggcgatactgcgggagggcatcgcggcgacgggccggttcgacgtcctgtccaaggacgccggggtgccgctggtggccttctcgctcagggacagcagccggttcagcgtgttcgacgtctccgagaacctgcggcggttcggctggatcgtgccggcgtacacgatgccggccgacgcggagcacgtggcggtgctccgagtcgtcgtcagggaggacttcagccgcagcctcgccgaacggctggtctcggacgtccgcaagatcctgcgcgagctggacgcgcgcgcgacccacgccgtgagggtcgccaccgccaccgccgagcagtcgggcgacggcgtcgtggccaagaaaagcgtgctggagatcgagcgggaggtcgccgcgcgctggatgaacgccgtgaacaagaagaagacgggggtctgttgatgcgtcgtgggtcggagactgggaggtttcgccatggtagcttcgtctatatgtcgcgtgcttgtttgtgtctgtgcagggcgcttggatgcgttggtccagttccgcgtatgtgaacaaggtgtcgtatgcagtatgcaaatgttcaggatccaggaaccacaaataatggatgtaaatgttgggtttggtgccgtatgttgggtgtggagtatatttcttcgccaggtatttgctgtaatcctgtccctttacgttcgtgcactgcaatgagaataaaaaaaaaataagtgtcgttcacggaacaggaactgtgactatcgttttcgaaaaaaagag

SEQ ID NO: 200007 - DNA, 2025 bp, Zea Mays
caacaccgcactagcctagcctccccccgccgctcggccgaatagaatcgattccccctcctccgtcgctgtccggccgaccgcggagagcggagtcgatcgggggcgacaacgatggtggttagcgtggccgcgaccgggcccggcacggacgccgagccggtgagctccaccttcttcgcgtcccgctacgtccgcgacccactcccacggtcagtcagttgctgtgctggctgtggcacttctttgatgatacgagtactagcaaataatgaagagctctggtaccggatgccggagcggtcgatcccgcgggaggcggcgcagcagatcatcagcgacgagctcatgctggacggcaacccgcgcctgaacctggcgtccttcgtcaccacgtggatggagcccgagtgcgacaagctcatcatggactccatcaacaagaactacgtcgacatggacgagtaccccgtcaccactgagctccagaaccgctgcgtaaacatgatagctcacctgttcaacgcgccgatcaaggaggacgagacagctattggggtcggaacagtgggatcctcggaagcgatcatgcttgcaggtctggcgttcaagaggaaatggcagaacaagaggaaggagcaggggaaaccgtgtgacagacccaacatcgtcaccggtgccaacgttcaggtctgctgggagaagtttgcaaggtattttgaggtggagctgaaggaggttaagctatcagaagggtactacgtcatggaccccgtcaaggctgttgagatggtggacgagaacactatctgtgtcgcggcgatcttggggtcgactctcaccggagagttcgaggatgtcaagcagttgaacgaccttcttacagagaagaacaaggaaactgggtgggacgtgcctatccacgtcgacgccgcgagcggagggttcatagcgcctttcctctaccctgagctcgagtgggacttcaggctgcctctggtgaagagcatcaatgtcagcgggcacaagtacggcctcgtctaccctggtgttggctgggtcatctggcggagcaaggatgatctgcctgaggagctcatcttccatatcaactacctggggacggaccagcctacgttcacgctcaacttctccaaaggttcctgtcagatcattgcgcagtactatcaactcattcgcctaggcttcgaggggtacagaaacatcatggagaactgccaggagaacgcggcgatactgcgggagggcatcgcggcgacgggccggttcgacgtcctgtccaaggacgccggggtgccgctggtggccttctcgctcagggacagcagccggttcagcgtgttcgacgtctccgagaacctgcggcggttcggctggatcgtgccggcgtacacgatgccggccgacgcggagcacgtggcggtgctccgagtcgtcgtcagggaggacttcagccgcagcctcgccgaacggctggtctcggacgtccgcaagatcctgcgcgagctggacgcgcgcgcgacccacgccgtgagggtcgccaccgccaccgccgagcagtcgggcgacggcgtcgtggccaagaaaagcgtgctggagatcgagcgggaggtcgccgcgcgctggatgaacgccgtgaacaagaagaagacgggggtctgttgatgcgtcgtgggtcggagactgggaggtttcgccatggtagcttcgtctatatgtcgcgtgcttgtttgtgtctgtgcagggcgcttggatgcgttggtccagttccgcgtatgtgaacaaggtgtcgtatgcagtatgcaaatgttcaggatccaggaaccacaaataatggatgtaaatgttgggtttggtgccgtatgttgggtgtggagtatatttcttcgccaggtatttgctgtaatcctgtccctttacgttcgtgcactgcaatgagaataaaaaaaaaataagtgtcgttcacggaacaggaactgtgactatcgttttcgaaaaaaagag

SEQ ID NO: 200008 - DNA, 2148 bp, Zea Mays
ccacaccccacgtccccgtcgcggcgggccaggctgcagcgacaacaccgcactagcctagcctccccccgccgctcggccgaatagaatcgattccccctcctccgtcgctgtccggccgaccgcggagagcggagtcgatcgggggcgacaacgatggtggttagcgtggccgcgaccgggcccggcacggacgccgagccggtaccggatgccggagcggtcgatcccgcgggaggcggcgcagcagatcatcagcgacgagctcatgctggacggcaacccgcgcctgaacctggcgtccttcgtcaccacgtggatggagcccgagtgcgacaagctcatcatggactccatcaacaagaactacgtcgacatggacgagtaccccgtcaccactgagctccagaaccgctgcgtaaacatgatagctcacctgttcaacgcgccgatcaaggaggacgagacagctattggggtcggaacagtgggatcctcggaagcgatcatgcttgcaggtctggcgttcaagaggaaatggcagaacaagaggaaggagcaggggaaaccgtgtgacagacccaacatcgtcaccggtgccaacgttcaggtctgctgggagaagtttgcaaggtattttgaggtggagctgaaggaggttaagctatcagaagggtactacgtcatggaccccgtcaaggctgttgagatggtggacgagaacactatctgtgtcgcggcgatcttggggtcgactctcaccggagagttcgaggatgtcaagcagttgaacgaccttcttacagagaagaacaaggaaactgggtgggacgtgcctatccacgtcgacgccgcgagcggagggttcatagcgcctttcctctaccctgagctcgagtgggacttcaggctgcctctggtgaagagcatcaatgtcagcgggcacaagtacggcctcgtctaccctggtgttggctgggtcatctggcggagcaaggatgatctgcctgaggagctcatcttccatatcaactacctggggacggaccagcctacgttcacgctcaacttctccaaaggttcctgtcagatcattgcgcagtactatcaactcattcgcctaggcttcgaggtactactgttcttcgatcggttcttcctcctcttgatcgaacattctgaatatatatgtgcaggggaacaaaagggggtgctgtctgatacgtttcttgagggcgagtcgtttttgtttctgttctcgctttgtgctgccgtaacagcctcccaatctggtcgggttttttttttttggtgccgcttctatctggtgtgtaggggtacagaaacatcatggagaactgccaggagaacgcggcgatactgcgggagggcatcgcggcgacgggccggttcgacgtcctgtccaaggacgccggggtgccgctggtggccttctcgctcagggacagcagccggttcagcgtgttcgacgtctccgagaacctgcggcggttcggctggatcgtgccggcgtacacgatgccggccgacgcggagcacgtggcggtgctccgagtcgtcgtcagggaggacttcagccgcagcctcgccgaacggctggtctcggacgtccgcaagatcctgcgcgagctggacgcgcgcgcgacccacgccgtgagggtcgccaccgccaccgccgagcagtcgggcgacggcgtcgtggccaagaaaagcgtgctggagatcgagcgggaggtcgccgcgcgctggatgaacgccgtgaacaagaagaagacgggggtctgttgatgcgtcgtgggtcggagactgggaggtttcgccatggtagcttcgtctatatgtcgcgtgcttgtttgtgtctgtgcagggcgcttggatgcgttggtccagttccgcgtatgtgaacaaggtgtcgtatgcagtatgcaaatgttcaggatccaggaaccacaaataatggatgtaaatgttgggtttggtgccgtatgttgggtgtggagtatatttcttcgccaggtatttgctgtaatcctgtccctttacgttcgtgcactgcaatgagaataaaaaaaaaataagtgtcgttcacggaacaggaactgtgactatcgttttcgaaaaaaagag

SEQ ID NO: 200009 - DNA, 2663 bp, Zea Mays
cacgagtccgggaccggctcctcagaaaccggccgcctatctctcccccttccctccgtgttcgtcggccccggccccatattttctctagccttgctcgtgtggctggaagagtggagatcggggaagcgtttgtgttggcactctggacggccgagcccgacatggaccgcgacgaggaggtgggccacggcgaccgctcgctcctattcatcggcgatgaggacgatctcggcgtcgaccgggacggcggatccccgccgacctcctccgacgatggatcattctccgaccggagcgacgccgagacacgcgccggccatgtccggcgtcgcgacggcggcgagcgtgaggacacgcccgaggacggccagaatggcgcgtggccgcagagttacaggcagtcgatcgacatgctgagcgcggtgccgtcgccgacgatgaactcgatcatggcagcgagcccgagcctgaccagattcggcagctccttcctcaaggccgggagctccttcttcctgaggaaaggcgagggctcggggctgccgctcaccaggccgctgctgccgccctcgctcccgcagctgtcgcagtcgtcgttgcacccgcagccgcggcccgtgaagcagtccacggacagcctcgcccaggcgccgcggtggccggctgcgcacgaggcggagctgcccgagagaccctccaggcaatgcctgaaatccgattatatcgagcttcctccgcctgctagcaagtgcagcaggaaccaatcaatcatcaatgggttcaatgtgctgtgcggcgttggaattctcaccacggcttatggaatcaaggaagggggatggctaagcctcctgctgctccccttgctgggtggcagctcgtgctacacgggcttgcttctcaagaggtgcatagacagttcgcccaacattgagacatacccagacattggacaagtcgctttcggaatctttggtcggatctttgtatcggttgtcctgtacatggagctttatgcaagctgcgtggagtacattacgctgctaggagacagcttgtcgtcagtgtttccctcagcgcatttagctttcactggcatcgacctgaacgcgcacaatctctttgcaaccacaatggccttggcaatcctcccatcagtctggctcaggaacctcagtctcctctcatatctttctgctggaggcgtgatcgcgacgatcacggtcatcgtctgcctatgctgggttggcatcggagaaggaattgggtttcgcttttccggtgctgtagtgaacgtgacccaccttccagtggcactcggcctgtatgggtactgctactcaggacactcggtgttcccaaacatctactcgtccatgaaggagcgctcgcagtttccattcgtgctcatgttctgcttcacggtggtaacgcttgtgtacgccggagttgcggtctcagggttcctgatgttcggcgagtccactatgtcacagttcaccctaaacttgccacagcagtacatcccatccaagattgccatttggatgacggttgtgaatccttacacaaagtatgcactgacgatgacgccggtcgccttgtcgatagaggaagccctaccaaagaagatgcagagttacctggtcggaatgctcgttaggacatgcctcgtcctctcaaccgttgcggtggctctgcttttcccttactttgccctggtgatggcactgcttggatccgtgttcacaatgctcgtggccttgatactcccatgcgcatgctacctctccatcaagaagggcgcagtgcccttgtgggagatcatcctgtgcataatcatcatagcgattggcgttgtgtgcgcgtgcatcggctcatttacctcgatcaaccagatgattagcagcagatagtgtctgcgtagctgttgcagattctttctttccaatgttgacagagctgaaactagcagtctgtcgttttttttttgtttttttgtttttgcagctacgtttatttgttccttctttttgacagaaaaaagaaactcggtaagaaagtttttctgtaacagggtgaagttatatttcaggcaatcatgatagtaattcttttgcgtacaattatgaaccacaggatgaagttatactaatttttccgacagctatggacacatatgaaccacaggatggccacacaacaggcacatctccgatctctcaccatgacacttttttttgttttgttttggggttgctgttgttgggaaactagtcagtatatatggcacatgtgatggacatcacgtcctcacctaccagggcgctacagctccagcacacgagcatggtgacgcagcggcgcatgatgtagaacctggccctctgctccttcaccaggcccgccaggcggcccggcaccgacctgcccgcggcggccctggacggccggctcttcagccccgccgccgccgacgccgacgccgacctccggctccccttcttggaaagcggcgtcttgctcttgtcgtccatgtgcatctccatctcttcctgtacgagctctctgcagtggcagttgttcttggaaatggtggaagcttgcaatgtgtggctctctctctctctctctggagtctggttgcggttggcttgttg

SEQ ID NO: 200010 - DNA, 2160 bp, Zea Mays
gttagtttgcgtgttctggagtagatagtgctttgcaagctaatcgtttcgtattagcgtgtccggaggcgcctcgtcccgctcctccgccgccaccggatggcgctgctcacggcgccggcggtggccgcgctgctgctgctcttctggtccgcggcgtacggcggtgacgcccaggaccagggcgtgccgccgccgtaccaggacgccagcaaggacgtggaggtccgcgtcagggacctgctcgcgcggatgacgctggccgagaaggtcggccagatgacgcagatagagcggatcgtcgcgtcgccgcaggcgctcagggactactacatcggcagcctgctcagcggcggcggcagcgtgccgcggaagcaggcgacggcggcggagtgggtcaccatggtcagcgacttccagaaggcgtgcctgtccacgcgcctcggcatcccgatgatctacggcatcgacgccgtccacggccacaacaacgtgtacggcgccaccatcttcccccacaacgtcggcctcggagccaccagggatccaaacctggtgaagaggatcggcgccgcgaccgcgcttgaagtgagagccaccggcatccagtacgcgttcgcgccatgcattgcggtgtgccgtgatccgaggtggggccggtgctacgagagctacagcgaggaccaccgtatcgtgcaggccatgactgagctcatcccgggcctgcagggcgacgtcccgcagaacttcaccagcggcatgcccttcgccgccggaaaggacaaggtcgcggcgtgcgccaagcacttcgtcggcgacggtggcacgcagaacggcatcaacgagaacaacaccatcatcgaccagcagggcctgatgagcatccacatgccggcctacctggacgcgctccgcaagggcgtctccaccgtcatgatctcctactccagctggaacgggctcaagatgcacgccaaccacgacctcatcacaggcttcctcaagggcaggctcaacttccagggcttcacgatctcggattgggagggcatcgacaggatcaccagccctccaggggcgaactactcctactctgtgcaggcttcgattcttgctggcattgacatgcggcctgatcccgatgagcaggatcgacgacgccgtgactcggattctgcgcgtcaagttcaccatgggcctgttcgagaaccccatgccggaccccagcctcgcggaccagctggggaagcaggagcacagggacctggcgcgggaggcggtgcgcaagtcgctggtgctcctcaagaacggcaagccgggcgacgcgccgctgctgcccctgcccaagaaggccgccaggatcctggtcgcagggagccacgccgacaacctggggtaccagtgcggcgggtggacgatcgagtggcagggcgacacggggcgcaccaccgtcggcaccacggtcctggacgccgtgaaggcggccgtggacccgtcgacggaggtggtgttcgcggagagccccgacgccgagttcgtcaggagcggcggcttctcgtacgcgatcgtggccgtgggcgagcacccgtacacggagaccaagggcgacagcatgaacctgacgatcccggaccccgggccgagcaccgtacagacggtgtgcgccgccgtgcggtgcgtgaccgtgctcatcagcggccgccccgtggtgatacagccgttcctgggcgccatggacgcggtcgtggcggcctggctgccggggaccgagggccagggtgtcaccgacgtgctgttcggggactacgggttcacggggaagctgccgcggacgtggttcaggtcggtggaccagctgccgatgaactacggcgacgcgcactacgacccgctgttcccgctcgggttcgggctcaccacacagggcaagatgtaccagaactagaagaaggcggagcgaggggaaaggggtagtacttggtaaagataataggaaattgaattaagcagtgctctgccgaggaaacgtgaacctgtagttcttgtttccctcaattctatgtcgattaattttgatgtatgctcagttctcactgtggagtagcatccacacatgagccatctcattcttatatgataatcatgatttgattttgctca

SEQ ID NO: 200011 - DNA, 2905 bp, Zea Mays
atggacgcgcccaaccctggagcggctgctggcccaggaatgcctagtgacgccctgtaccaggagctgtggcatgcgtgtgctggcccgttggtcacagtacctagacaaggcgagcgtgtctattacttccctcagggccatatggagcagctcgaggcgtctgcacaccaccagcagcttgatcagtacttaccgatgttcgatctaccacccaagatcctatgcagagtagtcaacgtggaactacgggccgaagctgattcagatgaagtttatgctcaaattatgttgcagccagaagctgatcaaaatgaactcaccagcctggacgctgaaccacaagaacgtgaaaaatgcactgcccattccttctgcaagacactgacagcttcagatacgagcactcacggcgggttttctgttcttcggaggcatgctgaggaatgtcttcctcagctggacatgtctcaaaatccaccttgccaagaactggttgccaaagatctccatggcactgaatggcattttcggcacatttttcgagggcaacccaagaggcatctccttaccaccggctggagtgtctttgttagctcaaaaagattggtttctggggatgcattcatcttcatgagaggtgaaaatggtgagctacgggttggtgtaaggaggctcatgagacaagtaaatagcatgccgtcatctgtcatatcaagccacagcatgcatcttggagtattggccacagcctcccatgccatctccactggaaccctcttttctgttttctacaaaccaaggtttgatgttgttttgctttatctatacatatgtctgcagtgcacttcttattaatggatgtgcaactgtcctgatttgactgtactttctgtttgctaatttcactctgtttcaaatttcaaagtcagttctgtactctgctttagttgtaaacaagctttttgattgtagctactgcatccattgagtgatgtcttatcccttgccccttcctttgcaccaaagatacacactatggttgtcctagttagcattatcgtgtgcatgttttgtttccttcataatcttgctcgctaaactttatgctccttttatgtgttcccagaactagtcgctctgattttattgtgagtgtgaacaagtaccttgaagctaagaagcagaaaatatctgttggaatgaggtttaagatgagatttgaaggtgatgatgctcctgaaagaaggttcagcggaacaatcattggcatcgggagtttgccggcaatgtcaaaatctctgtgggcagattctgactggagatctctaaaggttcaatgggatgaaccttcatccattcttcgtccagatagaatctcaccatgggaagtggagccactggatgcagctaatccacaatcccctcaacctccactaagggctaagcgtccacgacccccagcttcaccttgtatggtttcggaactgccttcaggttttggactctggaaatccccaattgaatcatcctgtacactctcattttcggaacctcaacgggctcgagagttatttccttcaatccccacgtcaaccttgtcatcttcatcaaatgtcagttttaattcaaagaatgagccgtccatgctaaccagtcagttctactggtcagcaaggcatacaagagctgactcctgcgctgctagcaccaacacagtcgtaattgaaaagaagcaagagccaagttctggtggttgtagattgtttggaattaatatatgctcagctgaggaagaagtattacctgaggttactgctccaggtgttggttatgagcagactgctgcctctgtagagttgaactcggataagctctcacagccatctgatgtcaacaattctgatgccctagcagctagcagtgaacgttcacctcttgaatcccaaagccggcaagtgaggagctgtaccaaggtaattatgcaaggaatggcagtaggaagggctgtagacctgacaaagcttagtggctacagcgatctttgccagaagctggaggagatgtttgacatccagggggagctgggttccacactaaagaaatggcgggtcattttcactgatgatgaggatgacatgatgcttgttggagatgatccttgggatgagttttgcaggatggtgaaaaggatttacatttacacatacgaggaggcaaagaagctgacatccaagtcaaagttaccggttagcagtgacagcagcaagctgagcgctgcgaactcactgtctgaatgactatgaacaaaaactgcagagtgctaacgtccctctaattttgttatttccatcatttgattatgggggtgaatgctcacggttgctccgtgggctgaagttgtggttggcattcaactgccttgagttttggaggcttttggactgccttgccagcatgagcctcctggaagaggcaccctggcatctgcgtgccatttcccatttgttcgtgccgtttggtaggagtatccattggcttatttagcaggtccctggtttgaagaaagaagcggtcagctgcaagatggacggtgccttgcctcttcttcgactacttagctagtaattaggactatgtatgtaatgaatgtatatagtgccattaagacgcccatgccctggtattgaggtcccggcatttgtatgaatcaattgttcggaaattgttacctttagcagcaacgaacctgagggtgtagggtggccaggtgggagaagttgtatgtttctttcagtaacaatctttgtgcaagtgatctgtatatagtctactgttttaataagcaatgttgtgcaacttgcgctcctacaccctacagtacagtggggcttttcttgtgctt

SEQ ID NO: 200012 - DNA, 12808 bp, Zea Mays
gctgagtccccatgttcattgatctgccatttcagggataacttctcccgcttaatcacgattacacttaggcaagtgctaattctctgtcaagagcactgtcattcctagccgctgctcagcaatagaaaaacatattcacagaggggcagaggaaaggtcggtataaagaccaccagcttttcgagataccaccggcctttttcagggagaagccactccatctttctttttttcctttttccaactttcttcttcttcctcctccttctcattctgatctggaacaatggcgacagaagacgaagagcgagaagcagcagatgggacggaagtcccagtggaagctgtggttttgggaacattccatttgcatgcacacccagaaggcaagctttcatctctgatggatatcaagagcatgggagaaaccatcgattcaactgaaggaacgttgaagattccagaggatcaagttttagtagaagcaccctctgatgtccaacttcctccagaacataatctaaatggtgaagcatcttctttgaatggccatacagacaaagaagagaaggtttcagtcgagcagccacatgacaatgatcaggaagaagcagaactagatcagaacaacagaatcaacaaagaagatgcggctgatggtttaagtcatggagagagcacaacagaagacagctgccttctgaagcacaagaaagatgaagaatccaagggtgatgaacaacaagatttaggtgttacagtggatgatgacttggtgcaggaagacacgctgaaaactgacaatgctattgagcaaacagatgatggtcagcaagaccaggatcaagaacctgaaaaggcaaacgagaacacagaacctgcaagcatcgcaaacaatgacgatgttgagattgtagctgagacacctactggactccaagctcctgtggagtcacgtatgaatgattctgatggcattccggagactattgatgaagagacagaaacagatgaaccagctcaggcagatggcgttgttcatcctgaagacgtggccaaagtagaagatcaacagagtcaacaagatgacacggtggatgcagatgtggccccagaagaggttaaatgtgaagaaactgatcagcaggaagagaagcccaaatctgaagctcatgagccaacgattgatactcgagaagcgttgaatcaagaacctgctgaagaaactgatgactcgatgaataaaaagattgaagaaactgcacaccagaggaacatggcagctccaaaggagacaacactagaacatgaagcaacaatgagtgctacaccagtaaatacacaagtgcaggaccaggaaccattagaagaaatagaagataccgaaaaaggaatccaaccaagcagtggttctggggatgcaattccagaagatcaatctaatttaagtgttactatagacaatgacactgtgaatgaggatacagtgataggtattgagcaacaggatgatggtcagcaagatgaggatctagaaccagaaaaggcaactgaggatacacaacctgcaagcatgacaaacattccccaggttgaggttgtaactgaagcatcttctggagtccaaactcctggggacctgaatctcaacaactctgatgctgttccagatactattgatgcaaacacagaaacagatgagccatctaaagcacactctgttgttcatcctgaaaagaaagagagatttctagaagacgcaaccactgaggaacctacagaagaggtggtcaaagtagaagctcaacagagccagcaagcagatgtgatggatgcaaacatggtgcaggaagaggtgcctaaatctgaacatgctgatgagccagcaactgatgcttttgaagtgctgaatcaagaatctgttgatgagccagcaattcaagcacctgtaactattcaagtgcagaaccaggaaccattagaagaaatagaacttgctgaagcagttgatactgaagcaacagtgcaacaaagcagtgctgcttttgaggagtcggttccagaacatcaatgtaatttaggtgctacacataacacagagcaggaagacacgctggaagctagtgggcaatcaaaaggaggtcaggaataccaagacctaggaccagaaaatgcaactgaaaacacacaacaagcaagcatgacaaatattcttgatgttgaggttataactgaaacaccctctggaattcaaactcccatggagatcaatctggttatctctgatgccattccagatgcaactgatggaaacacagaaacagatgaaccagctaaagcacacactttcgttcatcctgaaaagaatgaagtctttccagaaaatacatttaccaccaaacctacagcagaggtagtcaaagtagaagatcagcagaaccagcaagatgatgcaatggatgcagaagtggtgctggaagaggtgcctaaatctgaacgtgctgatgagccagcaactgatgctcttgaagtgctggaatctgttgaagaaactgatgacccaatgaatgaaaagactgaagaaacaacccaacagagcaacataccagcatctgaggagacaacggcagaatatgacgcgacaagggagccacctgcaaataatcaagtgcagaacaaggaaccagtagatgaaagagaatctactgtagaagaaagagaagttgctgaagcagttgatactgaagcaccagtgcaacaaagcagtgttgcttttgatgaggcagttccagaagagcaccataatttaggtgttgcaaataacacagtgcaagaagacacaatggaagccactggacaaacacaagaaggtcagcaataccaagatctaggaccagaaaatgcagctgagaacacacaacctgcaagcacggaaaacattcctgatgttgaggttataaccaaagcaccttctgaaattcaaagtcctgtggagatcaatctggacatctctgatgccattccagatactaacgatggaaacacagaaacagatgagccagctaaagcaaacactgtcgctcgtcctgatacggaagagagctttgcagaagatacatctactggacctacagaagaggtggtcacactagaagatcaacagagccaacaagttgatgcaaaggatgcagacgtggtgcaggaagaggtgcctacatcggagcacaccgatgagccagcaaccgatgctgttgaagcgctgaatcaagaatctgatgaagaaacagatggcccagtatatgaaaatactgaagaaacaacacaccagagcaacatgcccgcatctgaggagacactaccagaaaatgatgtgacaacaagggagccatctgtaactattcaagcacagaaccaggaatcattagaagaaagagaagttcatgaagcagttgatactgaagcaacagttcaaccaagcagtgcttcttttgaggagtcagttccagaacatcaacataacttaggtgcgacaaatgacacagtgcagcaagacacactggaagcaactaagcaaacaaaaggaggtcagcaataccaggatctaggaccagaaaatgcaactgagaacacacaacctgcaagcatggcaaacattcctgatgttgatgttataaccaaagcatcttctggaattcaaactcctgttgagatcaaccgggacatctctgatgccattccagatgctactgatggaagcacagaaacaactgaaccagctaaagcgcacagtatcattcatcctgaaaagaaagagagctttcaagaagatacatctaccgcagaacctacagaagaggtgatcaaagtagaagatagacagagccagcaagctgaagcaatggatgcagacgtggtgcaggaagatgtgcctaaatctgaacatgctgatgagccaacagctgatgctcttgaagtgctgaatcaagaatctattgaagaaaccaatagcccagtgaatgaagagactgaagaagcaaccaaccagagcaacatgccagcatctgaggagacaataccaaaatatgacgcggcaacaagggatcaacctgtaaatattcaagcgcagaaccaggaaccagtagatgaaggagaagctactgtagaagaaagagaagtggctgaagcagttcatactgaagcaccagtgcaacaaagcagtgttgcttttgaggaggcagttccagaagaccaacataatttaggtgttgcaaataatacagtgcaagaagacatgatggaagctactgggcaaacaaaagaaggtcagcgataccaagatctaggaccagaaaatgcaatagagaacacacaacctgcaagcacggcaaacattcctgaggttgaggttataaccgaagcaccttctggatttcaaactcctgtggagatcaatctggacatctctgatgccattgcagatactactgatggaaacacaggaacagatgaactagttaaagcagaaggtgttatccatcctgaaaacaaagagagttttctagaagatacatctaccacagaacctttagaagaggtggccaatgtagaagatcagcacagccagcaagctgatgcaatggatgcagacgtggtgcaagaagaggtgcctaaatctaaagccgatgagccagcaactgatacccttgaagtgctcaatcaagaatatgctgaagaaaccagtggcccagcgaatgaaaagattgaagaaacagccaaccagagcaacatgctaacatctgaggagacagtaccagagtatgacacagcaacaagggatccacctgtaaatattcaagcacagaaccaggaatcattagaagaaagagaagctactgtagcagaaaatgaagttgctgaagcagttgatactgaagcaccagtgcaacaaagcagtgttgctcttgaggacgcagttccagaagatcaacataacttaggtgctacaaataacacagcgcaggaagacacgcaggacgctattgggcaaacaaaagaaggtcagcaattccatgatctaggaccagaaaatgcaactgagaacacacaacctgcaagcatggccaacattgctgatgttgatgtaacaaccgaagcaccttctggaattcaaactcctgtggagatcaatctggacatctctgatgccattcctgatactactgatggaaacacagaaacagataaactagttaaaacagaaggtgttatccatcctgaaaagaaagagagttttcctgaagatacatctaccgcagaacctacagaagaggtggccaatgtagaagatcagcaaagccagagagctgatgcaatggatgcagacgtggtggatgaagaggtgcctaaatctgaacatgctgatgagccagcaactgatgctcttgaagtgctgaatcaagattatgctgaagaaaccaatgacccagtgaatgaaaagactgaagaaacaggcaaccagagcaacatgccaccatctgaggagacaacaccagaatatgacacgacaacaagggagccacctgtaaatattcaagcacagaaccaggaatcattagaagaaagagaaccacctgtaaatattcaagaacaaagccgggaatcagtaggagatgctgaagcagtcaatactgaagcagaaatgcaacaaaacagtgttgcttttgaggagacaactccagaaaaccatgtagcaacctcagagccatgttctgaaatccaacatgcacatcatgtggaaccagaggaaatcaatggccctgaagatggcaaagatgatgagatcaccaacatgagcagcagagaatatctagttcgagataatgttctgcagagtggaccaataatagatatacaaccagttcaggagttggaacaaattaaaacggatgaagcttctaaccagactcatgctgttatcttcaatgacctagctcaggaagatgctacagcaacaagtgaaccacaagtgactgaaacagaactaaaggacattgaagccactgaagctgaagaaatcaccaaacttgaccatgttactcattccaaggaacttgcagtagaaaatgattcaacagcagatgaaccacataagggtgaaatccatcaaactcttgaacaagatttagttgaagttaaggacactggaacttaccatgaaaaaacaatatctacttcagaggacacagtacaagataatttgacagaagatgagccaagttttggtagtcaagaagtagatgatgcagagtcaacagaagaaactaagcaaaacatagctgagaatattgcagaagtctctgatgtggcgattgttgatgacgcaattgaacagaatgtgctacagactgaggatatcgttgaaatgcataaacaggagctggaacgagaagaaacagagagaatagaacctgttgaatcagaggaagcttctgatcagaggaatgatgcaccattcgattattcagctcgagaagataatacaaaggaaagtgagatacagcagacagaatcagcaacggaaacaaatgaaattgaacccactgaaattgaagcagttcctcgagaaagcaatacctgtgtttcagaggagccttctcaagaagatcatataaaagaaagtgaaacaagttttgacaatcaagaagtgaacatcacagaatcttcagaagtaaatgatagtcacaaagatataatatctggaggaatctctgacccaagcaacacagcttctgctggggattcatctgaaggaagcaatgtccctgaaggcgagccacctgaacaggctgtgcaggaactgggatcagaggagataaagaacactcaaattgatgaagtgaatgaaacatcccttgaaatgaatgctactgtctttcagataccaagtcaagaagaaaatccagacacaaccaaattgcatgaatcaacagaggtgagcaacattgaagccacagaaatgcacggaaacccccaccaaagtgatctggctgctcagtcagaggagcaaacaacagaaggaatatcaagtggtctgaaaccagaatcaattgaaggtaatgatacagaagccaaaaaatgtcaaagtacctctcaggaaaaaacaatctctgcctctgagtctgtcccagaagatgcaaccactgaaccagatgttgatcaccaacaacttcaggatcaagaatctgccaaactcaaggaaaccgaagctgataaatttcaagaaattgtctcatctaacactctttcttctgaggagttcacatcaacagaaccaagttctgacaccgaagcagacaattcacagttagcagaagaaactgaggacaccgaaattgtgaaaagtaatactgctcttgctgaggcagcagctccagaaacagatgcaactgctgatacatcatctttccatgagacagatctagaagagaacaaggacacaggaacaattgaaacagaggatggtatggtatcaagtgactatacatcagaaaagatggacacggaaaccatggagactgaagcagtccctcatgatagtagtgatgcaaatataaaagaacacactgaagacgatacttcaacaccaaatgccccacatgctggtactgaacctgttcatgagctagaatcagttgaagtcagcgctgacacaacggaacatccaggagagacccatgactctgcttctgatgagcttactccaacagaagaaaatacagcagtaacagaaccatcttttagtacacaggaagtgcagaatctgacatctcaagaaatcaaggacagcgaagatgacaaaactgatgaattctcagatatcaatagctttcctattcctggagaggcagaccaagtaccaagaagtgaaacaactcctgatgtccaagaagtggaagaactgggtttaacagaagaaacaagagacattgaagccatagagcctggagatcagcaagaagacatagtttctacccttgagaagccagaaatagacggtgaaccaagtgctgataatcagcaggttcatgaggacaaactaccagaagtggaagacaataaagcaattgaagctgaagcctccaagcaaagtaatattgccactcctgataatgcagctgaagaaaggaatgaactggaaagtgatccagatccatatgcccagccagcagaacaggtagaattatccaaagacaatgagaacagccagcttgtgaagacagaagaaacctcagaccaaagcaattttgtcgtccttagaaggactacagaagattctgttgcaagagaaattgacccacctgttgccattaaacaagagcaaccagtggaagaaatcaagggtgtcgatgccactgaagctgaagaagactttcgtacaacccaagctgttgcaatagagaaactagcttcagtcaataaaatagcaacagtagaaccgacttatgatattcagcgaatggatgacttggaagcaacagaggaaaagaagcacgctgaagccattaatgaaggagatcaatccaatattgctgtttcagaggaacaaactccaacatataatggagaaacaccagaagatcatcatgtagaatcaaatgaaggaacgatggggaatgaaactgacaatatcattttggcacacggaatcaaagatgaaatacagaagtcagcagaactaaaggacggtccatgtgatttgtctgaaactgttttaacaactcggagaagtgagaacatgattgatgaagataatgttcaaacttatggcaatgatacagtagaggcttcaaacagtatccatcaagtcaaagaagagccagatgctggaaccgaacataattcaagccaaatgataagtgaatgtagtggagagaacgaaactcatgtccaagatagagatgtagacatgtggattctcacagaaggtgtcattgcagaagcatcacaggctttattggaaaatgatcctcaggcagcacaagatactatagaaaaggatgatacaacgaaaagtagtgagccaatcagtgatcacgatagcaggcaacattgtgatgtagaagcacttcaacaacaaagttgtgagacagaggccttatccattttggaacaagatgaggctctgcaaaagattgactcagatcaaaagcagaaagaagttgaggagattgaaagtcagaatgatgaacttcaggtagatgaacagaaacatgaagacaagagggatgatttagccaaagaaccactagtggagtaccagaatttcgaaaacagagcttcaaacaacacaaaagacaatgatgcattcaaggttgaacaaacagaggcagccaatagtgagattctcaagaataaagccctacatatatccaaggaatccaccccaagcattatggctatgaaggttgaaaacattaaggaaacaagtgaaggaactgaagaagatgatgctgccaaaaatgataacaaagatgaacaggagaatgcagaaaatgttgatatagtatcaaaaacttctactaatgaacaaggccaaacaactgatgaaattagaaaagaagaggatcctgttcacatcattcaagcatcagagaaagagatcgcagatgaaatagaagaaagtaaagaaatacatgaagacaatgctatttgtcatgataaattacagacaaattctgaaaaggaagagtcacctcaaccgcattccaatgaaccatacaatgtggatgctaaaattgatgatacaacatctctatgcgaagaaataatccatgacaatacaagtataaatcctagagaaattgaagagataggagaaaacaaaggaccagacttcacttctgaaccttctgtagaatcatccatacagaacaatgttgaagactcaagcagtcatcacaaggttgaagatgaaaagctttcaatgtctgagaaaaatgatgtagatactgaagctatgcaagaaataaatgatgaatctggcgcggatataaaccaaacagaacaatgtcaagaagaaattactgcagatgatgttctgcaacttgaaacagaaggaaattcatttgacaagattgaagagactgcttcaaatgaggaaacagagactagtacagcagccactgaagcagtaacgttcaatgaagatattactgacaaggttagcggagctgatggagcaccgtctaacggaagtctcaagacctttactgacactggaagggatattgatgttccattggtaattacaacatcaaaggaagaaagtgtgaacgacactatggaaaacctcaatcttgaccttcctggacatcaggcacaggatggcaacaccgctgaaaaggtgctcagcttagaggaaagagaaagagagatgccttcatcagagaagctccttcaaactgaaccaggagagaatcaaattcccaatgaacaggatgaaaaggacatacgagatgagaatcaaactctaaaagaaaaggatgaagatgacatgcaagatacagaatttggagaggctaagaaagaagttcaacaagaattacctgtctcccattttctgatgaatctaatattgggaaaagagagcagtgatgcaaatgaagattcagaatctgaggctgcaaggaagcaaggtgaagcgacagaagatgacagctgcacgttcatttctgaacaagaagaaagtctggggtcacttcctacagaaaataaggtggatgacaatcccacctttgttgaacaagaaaaacatgaagttaaatgctctgaagaaacacaggaaatggtcgaagaacaaagtgatgatcagctgcacacagaaagatcaattgaaattgatgaggatatcaaaaagaacactcgtgctttagaaataccagcataccaagacaatccccaggatggaatttctggtgaattgcagacagaagaagcagctggtgtttctacaaaaatggtaactagagatattgatatttcgagtgttgtgctggacaacagaacagttggtactgtgtgtcaggaaaaaatggaggtatcaacaaaaaatgaaaatggaagcttgaggagcagcctgaatgactcaacaaacacaatggctccccaagacgatactctaggagaaggacaatcaaggctcgtgcttgaacctttacctgaagacaaaagtgttgatgtagtttctgagcaagcacctttgttgacagaatcaggaatgactgacgcgaatgacttatctagcgatactacaagtgctcaaaaccctgtgtctacaaaacccactgaatctgccagagttgaggccacatattctactgatattcaactggagaatgaagaagtagataagaaagaagaggaccagcatgcaaacacaaccaaagatgaagtttctaaagagattgtagaaagttcacatataaatctgcagaaaataacaaggcctgaagaaaaatctaatgagctagaaactcaaattaccgaaccagtttgtgacagtcaggcaattttggcccatgaaaaggaaatatctgaagaaaactttccaacagcagtcgaaattcaggctgatggtccaaacatgcagatcaaccaagataagcaagatgaagctgctgacatcgaaactgaaatgaagccagaaaaattaggggaatctaattttcaggaacaccaggacaatggtactgagcaaaagtctcctaaagagactgatgaaggagaccagcaacttgtggccaagaaagagattctgacccaagaaatggatgtgcatgagacagttgaaagacctcagcaagcagttgaaagtcctcagcaaacagtgagcataacatccaatgaagaccaggaactgtttgattcaaaggtccaggaacgtgatctcaatgtagtttcacccagagaagcttctgaggctgaagaaaactttgtggacgtaaccaagccagaattcagcacagatgaagaacaaagtccaaaggctgatgcagaagagaagatttatgacgagaagataaaggacatagagggaactaagaatttaactgatgaagcagcaataaaaactgaagcaccaggagcagcccagaagacacgtaaaaaatatagcctattgtctggcgtgggatcgaaggtaaaacaccaactcgcaaaagtgaagaaagccattgtaggcaaacctgggcacacaaaaccagtatctccgacggcataaaactccagtcaccttagaacatgtacattattgtattgtttgtagtcttgtgagccatttatttcggtggtagtgtttgcgatgggctaggagaaggtcctcttcacaaccatagcattggaattctatgatgttgcacatgaaacaccccccccccccctcgagagtatgttgaagatgtttgtaaatatgtctagtgtgtaaattcaagtttccctgaaactttgaggtagaatcaaggacatgtaattggtcaattgtttgtattcttcgttgaaatgcacaagcagtttgtggtcatgatgcagcttgcagcatattcttcacttcactcaagtgctcctggtctgttcagtccctatctgagtttaaaatgggacaatgcaattccaatcagatcatgatgatgaacaacttgatatgaaaaataaaatgattaaagaatttggcttaaatggatataatgtaatcactaaactaatgaagaagctagataaaagaaaagcaagccttgatgctcaataagac

SEQ ID NO: 200013 - DNA, 13592 bp, Zea Mays
agaaaaggttctgtgggcccatccaagcaagaatgcagacacaatggtccagccaccacaaccatgtgcctcatcacgtaccagttgccattttggcacctaatgctgagtccccatgttcattgatctgccatttcagggataacttctcccgcttaatcacgattacacttaggcaagtgctaattctctgtcaagagcactgtcattcctagccgctgctcagcaatagaaaaacatattcacagaggggcagaggaaaggtcggtataaagaccaccagcttttcgagataccaccggcctttttcagggagaagccactccatctttctttttttcctttttccaactttcttcttcttcctcctccttctcattctgatctggaacaatggcgacagaagacgaagagcgagaagcagcagatgggacggaagtcccagtggaagctgtggttttgggaacattccatttgcatgcacacccagaaggcaagctttcatctctgatggatatcaagagcatgggagaaaccatcgattcaactgaaggaacgttgaagattccagaggatcaagttttagtagaagcaccctctgatgtccaacttcctccagaacataatctaaatggtgaagcatcttctttgaatggccatacagacaaagaagagaaggtttcagtcgagcagccacatgacaatgatcaggaagaagcagaactagatcagaacaacagaatcaacaaagaagatgcggctgatggtttaagtcatggagagagcacaacagaagacagctgccttctgaagcacaagaaagatgaagaatccaagggtgatgaacaacaagatttaggtgttacagtggatgatgacttggtgcaggaagacacgctgaaaactgacaatgctattgagcaaacagatgatggtcagcaagaccaggatcaagaacctgaaaaggcaaacgagaacacagaacctgcaagcatcgcaaacaatgacgatgttgagattgtagctgagacacctactggactccaagctcctgtggagtcacgtatgaatgattctgatggcattccggagactattgatgaagagacagaaacagatgaaccagctcaggcagatggcgttgttcatcctgaagacgtggccaaagtagaagatcaacagagtcaacaagatgacacggtggatgcagatgtggccccagaagaggttaaatgtgaagaaactgatcagcaggaagagaagcccaaatctgaagctcatgagccaacgattgatactcgagaagcgttgaatcaagaacctgctgaagaaactgatgactcgatgaataaaaagattgaagaaactgcacaccagaggaacatggcagctccaaaggagacaacactagaacatgaagcaacaatgagtgctacaccagtaaatacacaagtgcaggaccaggaaccattagaagaaatagaagataccgaaaaaggaatccaaccaagcagtggttctggggatgcaattccagaagatcaatctaatttaagtgttactatagacaatgacactgtgaatgaggatacagtgataggtattgagcaacaggatgatggtcagcaagatgaggatctagaaccagaaaaggcaactgaggatacacaacctgcaagcatgacaaacattccccaggttgaggttgtaactgaagcatcttctggagtccaaactcctggggacctgaatctcaacaactctgatgctgttccagatactattgatgcaaacacagaaacagatgagccatctaaagcacactctgttgttcatcctgaaaagaaagagagatttctagaagacgcaaccactgaggaacctacagaagaggtggtcaaagtagaagctcaacagagccagcaagcagatgtgatggatgcaaacatggtgcaggaagaggtgcctaaatctgaacatgctgatgagccagcaactgatgcttttgaagtgctgaatcaagaatctgttgatgagccagcaattcaagcacctgtaactattcaagtgcagaaccaggaaccattagaagaaatagaacttgctgaagcagttgatactgaagcaacagtgcaacaaagcagtgctgcttttgaggagtcggttccagaacatcaatgtaatttaggtgctacacataacacagagcaggaagacacgctggaagctagtgggcaatcaaaaggaggtcaggaataccaagacctaggaccagaaaatgcaactgaaaacacacaacaagcaagcatgacaaatattcttgatgttgaggttataactgaaacaccctctggaattcaaactcccatggagatcaatctggttatctctgatgccattccagatgcaactgatggaaacacagaaacagatgaaccagctaaagcacacactttcgttcatcctgaaaagaatgaagtctttccagaaaatacatttaccaccaaacctacagcagaggtagtcaaagtagaagatcagcagaaccagcaagatgatgcaatggatgcagaagtggtgctggaagaggtgcctaaatctgaacgtgctgatgagccagcaactgatgctcttgaagtgctggaatctgttgaagaaactgatgacccaatgaatgaaaagactgaagaaacaacccaacagagcaacataccagcatctgaggagacaacggcagaatatgacgcgacaagggagccacctgcaaataatcaagtgcagaacaaggaaccagtagatgaaagagaatctactgtagaagaaagagaagttgctgaagcagttgatactgaagcaccagtgcaacaaagcagtgttgcttttgatgaggcagttccagaagagcaccataatttaggtgttgcaaataacacagtgcaagaagacacaatggaagccactggacaaacacaagaaggtcagcaataccaagatctaggaccagaaaatgcagctgagaacacacaacctgcaagcacggaaaacattcctgatgttgaggttataaccaaagcaccttctgaaattcaaagtcctgtggagatcaatctggacatctctgatgccattccagatactaacgatggaaacacagaaacagatgagccagctaaagcaaacactgtcgctcgtcctgatacggaagagagctttgcagaagatacatctactggacctacagaagaggtggtcacactagaagatcaacagagccaacaagttgatgcaaaggatgcagacgtggtgcaggaagaggtgcctacatcggagcacaccgatgagccagcaaccgatgctgttgaagcgctgaatcaagaatctgatgaagaaacagatggcccagtatatgaaaatactgaagaaacaacacaccagagcaacatgcccgcatctgaggagacactaccagaaaatgatgtgacaacaagggagccatctgtaactattcaagcacagaaccaggaatcattagaagaaagagaagttcatgaagcagttgatactgaagcaacagttcaaccaagcagtgcttcttttgaggagtcagttccagaacatcaacataacttaggtgcgacaaatgacacagtgcagcaagacacactggaagcaactaagcaaacaaaaggaggtcagcaataccaggatctaggaccagaaaatgcaactgagaacacacaacctgcaagcatggcaaacattcctgatgttgatgttataaccaaagcatcttctggaattcaaactcctgttgagatcaaccgggacatctctgatgccattccagatgctactgatggaagcacagaaacaactgaaccagctaaagcgcacagtatcattcatcctgaaaagaaagagagctttcaagaagatacatctaccgcagaacctacagaagaggtgatcaaagtagaagatagacagagccagcaagctgaagcaatggatgcagacgtggtgcaggaagatgtgcctaaatctgaacatgctgatgagccaacagctgatgctcttgaagtgctgaatcaagaatctattgaagaaaccaatagcccagtgaatgaagagactgaagaagcaaccaaccagagcaacatgccagcatctgaggagacaataccaaaatatgacgcggcaacaagggatcaacctgtaaatattcaagcgcagaaccaggaaccagtagatgaaggagaagctactgtagaagaaagagaagtggctgaagcagttcatactgaagcaccagtgcaacaaagcagtgttgcttttgaggaggcagttccagaagaccaacataatttaggtgttgcaaataatacagtgcaagaagacatgatggaagctactgggcaaacaaaagaaggtcagcgataccaagatctaggaccagaaaatgcaatagagaacacacaacctgcaagcacggcaaacattcctgagatactactgatggaaacacaggaacagatgaactagttaaagcagaaggtgttatccatcctgaaaacaaagagagttttctagaagatacatctaccacagaacctttagaagaggtggccaatgtagaagatcagcacagccagcaagctgatgcaatggatgcagacgtggtgcaagaagaggtgcctaaatctaaagccgatgagccagcaactgatacccttgaagtgctcaatcaagaatatgctgaagaaaccagtggcccagcgaatgaaaagattgaagaaacagccaaccagagcaacatgctaacatctgaggagacagtaccagagtatgacacagcaacaagggatccacctgtaaatattcaagcacagaaccaggaatcattagaagaaagagaagctactgtagcagaaaatgaagttgctgaagcagttgatactgaagcaccagtgcaacaaagcagtgttgctcttgaggacgcagttccagaagatcaacataacttaggtgctacaaataacacagcgcaggaagacacgcaggacgctattgggcaaacaaaagaaggtcagcaattccatgatctaggaccagaaaatgcaactgagaacacacaacctgcaagcatggccaacattgctgatgttgatgtaacaaccgaagcaccttctggaattcaaactcctgtggagatcaatctggacatctctgatgccattcctgatactactgatggaaacacagaaacagataaactagttaaaacagaaggtgttatccatcctgaaaagaaagagagttttcctgaagatacatctaccgcagaacctacagaagaggtggccaatgtagaagatcagcaaagccagagagctgatgcaatggatgcagacgtggtggatgaagaggtgcctaaatctgaacatgctgatgagccagcaactgatgctcttgaagtgctgaatcaagattatgctgaagaaaccaatgacccagtgaatgaaaagactgaagaaacaggcaaccagagcaacatgccaccatctgaggagacaacaccagaatatgacacgacaacaagggagccacctgtaaatattcaagcacagaaccaggaatcattagaagaaagagaagctactgtagaagaaagtgaagttgccgaagcagttgatactgaagcaccagtgcaacaaagcagtgttgctcttgaggatgcagttccagaagatcaatataacttaattgctacaaataacacagtacaggaagacacacaagaagctattggacaaacaaaagaaggtcaacaataccatgatctaggaccagaaaatgcaactgagaacacagaacctgcaagcacggccaacactcctgatgttgatgtaataaccgaagcaccttctggaattcaaacttctattgagatcaatctggacatctccgatgccattccagatactaccgatggaaatgcaaaaacagatgaactagttaaagtagatggtgttatccttcctgaccacaaagagagcttttctgaagacacatgtgttgtagaacctacagaagagatgatagaagtagatcaacttggtcaacaagctgatgcgatacatgcagaggtattgcaggaagaggtgcctgagatgatagaagtagatcaacttggtcaacaagctgatgtgatacatgcagaggtattgcaggaagaggtgcataaatctgaacagtctgatgagccaggggtcgatgctcaagaagtgctgaaccaagaatctgctgaagaaactgatggcctggtgaatgtaaagactgatgaaactgagcacaagagcaacatggtggtccctgatgacacaattccagaacatgatgcacaaacgagagagccacctgtaaatattcaagaacaaagccgggaatcagtaggagatgctgaagcagtcaatactgaagcagaaatgcaacaaaacagtgttgcttttgaggagacaactccagaaaaccatgtagcaacctcagagccatgttctgaaatccaacatgcacatcatgtggaaccagaggaaatcaatggccctgaagatggcaaagatgatgagatcaccaacatgagcagcagagaatatctagttcgagataatgttctgcagagtggaccaataatagatatacaaccagttcaggagttggaacaaattaaaacggatgaagcttctaaccagactcatgctgttatcttcaatgacctagctcaggaagatgctacagcaacaagtgaaccacaagtgactgaaacagaactaaaggacattgaagccactgaagctgaagaaatcaccaaacttgaccatgttactcattccaaggaacttgcagtagaaaatgattcaacagcagatgaaccacataagggtgaaatccatcaaactcttgaacaagatttagttgaagttaaggacactggaacttaccatgaaaaaacaatatctacttcagaggacacagtacaagataatttgacagaagatgagccaagttttggtagtcaagaagtagatgatgcagagtcaacagaagaaactaagcaaaacatagctgagaatattgcagaagtctctgatgtggcgattgttgatgacgcaattgaacagaatgtgctacagactgaggatatcgttgaaatgcataaacaggagctggaacgagaagaaacagagagaatagaacctgttgaatcagaggaagcttctgatcagaggaatgatgcaccattcgattattcagctcgagaagataatacaaaggaaagtgagatacagcagacagaatcagcaacggaaacaaatgaaattgaacccactgaaattgaagcagttcctcgagaaagcaatacctgtgtttcagaggagccttctcaagaagatcatataaaagaaagtgaaacaagttttgacaatcaagaagtgaacatcacagaatcttcagaagtaaatgatagtcacaaagatataatatctggaggaatctctgacccaagcaacacagcttctgctggggattcatctgaaggaagcaatgtccctgaaggcgagccacctgaacaggctgtgcaggaactgggatcagaggagataaagaacactcaaattgatgaagtgaatgaaacatcccttgaaatgaatgctactgtctttcagataccaagtcaagaagaaaatccagacacaaccaaattgcatgaatcaacagaggtgagcaacattgaagccacagaaatgcacggaaacccccaccaaagtgatctggctgctcagtcagaggagcaaacaacagaaggaatatcaagtggtctgaaaccagaatcaattgaaggtaatgatacagaagccaaaaaatgtcaaagtacctctcaggaaaaaacaatctctgcctctgagtctgtcccagaagatgcaaccactgaaccagatgttgatcaccaacaacttcaggatcaagaatctgccaaactcaaggaaaccgaagctgataaatttcaagaaattgtctcatctaacactctttcttctgaggagttcacatcaacagaaccaagttctgacaccgaagcagacaattcacagttagcagaagaaactgaggacaccgaaattgtgaaaagtaatactgctcttgctgaggcagcagctccagaaacagatgcaactgctgatacatcatctttccatgagacagatctagaagagaacaaggacacaggaacaattgaaacagaggatggtatggtatcaagtgactatacatcagaaaagatggacacggaaaccatggagactgaagcagtccctcatgatagtagtgatgcaaatataaaagaacacactgaagacgatacttcaacaccaaatgccccacatgctggtactgaacctgttcatgagctagaatcagttgaagtcagcgctgacacaacggaacatccaggagagacccatgactctgcttctgatgagcttactccaacagaagaaaatacagcagtaacagaaccatcttttagtacacaggaagtgcagaatctgacatctcaagaaatcaaggacagcgaagatgacaaaactgatgaattctcagatatcaatagctttcctattcctggagaggcagaccaagtaccaagaagtgaaacaactcctgatgtccaagaagtggaagaactgggtttaacagaagaaacaagagacattgaagccatagagcctggagatcagcaagaagacatagtttctacccttgagaagccagaaatagacggtgaaccaagtgctgataatcagcaggttcatgaggacaaactaccagaagtggaagacaataaagcaattgaagctgaagcctccaagcaaagtaatattgccactcctgataatgcagctgaagaaaggaatgaactggaaagtgatccagatccatatgcccagccagcagaacaggtagaattatccaaagacaatgagaacagccagcttgtgaagacagaagaaacctcagaccaaagcaattttgtcgtccttagaaggactacagaagattctgttgcaagagaaattgacccacctgttgccattaaacaagagcaaccagtggaagaaatcaagggtgtcgatgccactgaagctgaagaagactttcgtacaacccaagctgttgcaatagagaaactagcttcagtcaataaaatagcaacagtagaaccgacttatgatattcagcgaatggatgacttggaagcaacagaggaaaagaagcacgctgaagccattaatgaaggagatcaatccaatattgctgtttcagaggaacaaactccaacatataatggagaaacaccagaagatcatcatgtagaatcaaatgaaggaacgatggggaatgaaactgacaatatcattttggcacacggaatcaaagatgaaatacagaagtcagcagaactaaaggacggtccatgtgatttgtctgaaactgttttaacaactcggagaagtgagaacatgattgatgaagataatgttcaaacttatggcaatgatacagtagaggcttcaaacagtatccatcaagtcaaagaagagccagatgctggaaccgaacataattcaagccaaatgataagtgaatgtagtggagagaacgaaactcatgtccaagatagagatgtagacatgtggattctcacagaaggtgtcattgcagaagcatcacaggctttattggaaaatgatcctcaggcagcacaagatactatagaaaaggatgatacaacgaaaagtagtgagccaatcagtgatcacgatagcaggcaacattgtgatgtagaagcacttcaacaacaaagttgtgagacagaggccttatccattttggaacaagatgaggctctgcaaaagattgactcagatcaaaagcagaaagaagttgaggagattgaaagtcagaatgatgaacttcaggtagatgaacagaaacatgaagacaagagggatgatttagccaaagaaccactagtggagtaccagaatttcgaaaacagagcttcaaacaacacaaaagacaatgatgcattcaaggttgaacaaacagaggcagccaatagtgagattctcaagaataaagccctacatatatccaaggaatccaccccaagcattatggctatgaaggttgaaaacattaaggaaacaagtgaaggaactgaagaagatgatgctgccaaaaatgataacaaagatgaacaggagaatgcagaaaatgttgatatagtatcaaaaacttctactaatgaacaaggccaaacaactgatgaaattagaaaagaagaggatcctgttcacatcattcaagcatcagagaaagagatcgcagatgaaatagaagaaagtaaagaaatacatgaagacaatgctatttgtcatgataaattacagacaaattctgaaaaggaagagtcacctcaaccgcattccaatgaaccatacaatgtggatgctaaaattgatgatacaacatctctatgcgaagaaataatccatgacaatacaagtataaatcctagagaaattgaagagataggagaaaacaaaggaccagacttcacttctgaaccttctgtagaatcatccatacagaacaatgttgaagactcaagcagtcatcacaaggttgaagatgaaaagctttcaatgtctgagaaaaatgatgtagatactgaagctatgcaagaaataaatgatgaatctggcgcggatataaaccaaacagaacaatgtcaagaagaaattactgcagatgatgttctgcaacttgaaacagaaggaaattcatttgacaagattgaagagactgcttcaaatgaggaaacagagactagtacagcagccactgaagcagtaacgttcaatgaagatattactgacaaggttagcggagctgatggagcaccgtctaacggaagtctcaagacctttactgacactggaagggatattgatgttccattggtaattacaacatcaaaggaagaaagtgtgaacgacactatggaaaacctcaatcttgaccttcctggacatcaggcacaggatggcaacaccgctgaaaaggtgctcagcttagaggaaagagaaagagagatgccttcatcagagaagctccttcaaactgaaccaggagagaatcaaattcccaatgaacaggatgaaaaggacatacgagatgagaatcaaactctaaaagaaaaggatgaagatgacatgcaagatacagaatttggagaggctaagaaagaagttcaacaagaattacctgtctcccattttctgatgaatctaatattgggaaaagagagcagtgatgcaaatgaagattcagaatctgaggctgcaaggaagcaaggtgaagcgacagaagatgacagctgcacgttcatttctgaacaagaagaaagtctggggtcacttcctacagaaaataaggtggatgacaatcccacctttgttgaacaagaaaaacatgaagttaaatgctctgaagaaacacaggaaatggtcgaagaacaaagtgatgatcagctgcacacagaaagatcaattgaaattgatgaggatatcaaaaagaacactcgtgctttagaaataccagcataccaagacaatccccaggatggaatttctggtgaattgcagacagaagaagcagctggtgtttctacaaaaatggtaactagagatattgatatttcgagtgttgtgctggacaacagaacagttggtactgtgtgtcaggaaaaaatggaggtatcaacaaaaaatgaaaatggaagcttgaggagcagcctgaatgactcaacaaacacaatggctccccaagacgatactctaggagaaggacaatcaaggctcgtgcttgaacctttacctgaagacaaaagtgttgatgtagtttctgagcaagcacctttgttgacagaatcaggaatgactgacgcgaatgacttatctagcgatactacaagtgctcaaaaccctgtgtctacaaaacccactgaatctgccagagttgaggccacatattctactgatattcaactggagaatgaagaagtagataagaaagaagaggaccagcatgcaaacacaaccaaagatgaagtttctaaagagattgtagaaagttcacatataaatctgcagaaaataacaaggcctgaagaaaaatctaatgagctagaaactcaaattaccgaaccagtttgtgacagtcaggcaattttggcccatgaaaaggaaatatctgaagaaaactttccaacagcagtcgaaattcaggctgatggtccaaacatgcagatcaaccaagataagcaagatgaagctgctgacatcgaaactgaaatgaagccagaaaaattaggggaatctaattttcaggaacaccaggacaatggtactgagcaaaagtctcctaaagagactgatgaaggagaccagcaacttgtggccaagaaagagattctgacccaagaaatggatgtgcatgagacagttgaaagacctcagcaagcagttgaaagtcctcagcaaacagtgagcataacatccaatgaagaccaggaactgtttgattcaaaggtccaggaacgtgatctcaatgtagtttcacccagagaagcttctgaggctgaagaaaactttgtggacgtaaccaagccagaattcagcacagatgaagaacaaagtccaaaggctgatgcagaagagaagatttatgacgagaagataaaggacatagagggaactaagaatttaactgatgaagcagcaataaaaactgaagcaccaggagcagcccagaagacacgtaaaaaatatagcctattgtctggcgtgggatcgaaggtaaaacaccaactcgcaaaagtgaagaaagccattgtaggcaaacctgggcacacaaaaccagtatctccgacggcataaaactccagtcaccttagaacatgtacattattgtattgtttgtagtcttgtgagccatttatttcggtggtagtgtttgcgatgggctaggagaaggtcctcttcacaaccatagcattggaattctatgatgttgcacatgaaacaccccccccccccctcgagagtatgttgaagatgtttgtaaatatgtctagtgtgtaaattcaagtttccctgaaactttgaggtagaatcaaggacatgtaattggtcaattgtttgtattcttcgttgaaatgcacaagcagtttgtggtcatgatgcagcttgcagcatattcttcacttcactcaagtgctcctggtctgttcagtccctatctgagtttaaaatgggacaatgcaattccaatcagatcatgatgatgaacaacttgatatgaaaaataaaatgattaaagaatttggcttaaatggatataatgtaatcactaaactaatgaagaagctagataaaagaaaagcaagccttgatgctcaataagac

SEQ ID NO: 200014 - DNA, 2914 bp, Zea Mays
cagcagcatcactgctagtgccatttggctcggcgcctcctttctccggtccggtccggtccctccctccctttgcttcagagcccagccacctcctccagtccggttcaggcattcagcctgggcggcggcggcggcggcgggccgtcttccactcttcctcctccttccagttccattaacaaattgcttgcctgcctgcctgcccccaaacaagccttgcttgcagccttgtccctgctcccctactcttttccatcacatcgcagtctctgtggacggaaagacaaacagtgccttgcttgtctctacctctcctggctcctaccttagcctcacctggcggtctggccctgcccatctctcactctcgctctcgctcttgctctcgcactgaggacaagatgcatactgtacaggtgaagaacaggaactgagcgatagccattggttggaggttggcctgccggtgccggcctgcatgactgctctccctgaccggctggccctgacgaaggggaacaatgagggatggcggcggcggcggcggcagcagcaagacgagcaagctgtcgtggtccaaaagcctcgtgaggaagtggttcaacatcaggggcaagtcccaggacttccatgccgatgctgcagcagttggaactgggagtgtgaggtcaggtcgaggggatggagattggatggatggcagcttcactaggagggactcctacggcgccaagaagagcagaacagagagggcgtcgcggaggagccacgagcggtcgcggcgcagcaagatcgacctcgatgccgccgaggccaccgtcatgctcgactacaggatctttgctgctacgtggaatgtaggtggccgcgcgccgccgggctcgctcagcctcgacgactggctccgcacctcgccgccggccgacatctacgtcctcgggttccaagaaatcgtcccgttgaacgccgggaacgtcctcggcgccgaggacaacggccccgcgaggaagtgggtgtcgctggtcaggcggacgctgaacagcctgccgggaagtagcggcagcgggagcctgcagacgccgtcgccggcgccgtacctggtggcggagatggacgcggacttcgagcggtcgacaacgcaaaacaacccgtccttcttccaccggcggtcgttccactctgggctcagccggagcatgcgggtggacggcgacctcctcgccggccctggccccggccccgccaggctcgagcgccggtacagcgtcaacgaccgcgtcatgtacggtagcaggcccagcgactacgaggccaactgccagtggggcgccggtcagttggtcgatgaggacgacggtggcggcggcgagtccccggtcacggtgttctctccgatgtcccacggatatggaaatgctcctccgcctatggaagaatgcaacgggtcagcccgtggccttgctagatggttggactgttcctgatgatctgggctcggaaagagatgaagaacgacattaggaatctgaaggtgtcctgcgttgggaggggattaatgggctaccttggaaataagggctcaatctccatcagcatggctttgcaccaaacgagcttctgcttcgtctgcagccacctgacatctggtcagaaggacggcgacgagcaccgcaggaactccgatgttttggagatcctaaagaagaccagattccctagggtttgcggacagtacgagagatcgccggagaccatcctggagcacgatcggataatctggctcggggatctcaattaccggatcgcgctgtcctaccgatcggtgaaagcgctcgtggagatgcgtaactggaaagcgttgctggaaaaagaccagctaacgagggagcagagaggtgggcgcgtgtttcctggctggaacgaggggaggatctacttcccaccgacctataaatactccaacaactccgacaaatacgcgggagaagacatgaaccagaaggagaagaagcggactccagcatggtgcgaccgcatcttgtggtacgggagggggctcagccagctctcctacgtccgaggagagtcgcgcttctcggaccacagacctgtctacagcatgttcattgccgaggtggagtcgatcaaccacagccagatccagaagatgagttcttggagctcccagctggacatagaggaactgctgccgtactcgtatgggtacacggagatcgatcactatgggtacacagacctcaatttctactgagaaacgggcagaggaactcgcatgctgctgagctctaatagatgcctctagttactgcgacttggaaaaggtgtttgccagcatgcatgcagttgaggacagagctcgacgataccggcgcactgcgttttcgaagtctaatggctcttagcagcttgttatatagacagcagcacttagtttgggttcaggaaagcaaatctggaacttcagcgttgcagttttctgaatgttcagattggctatcagagactttacatatgcccagcagtcaatgtacaaaacccggccgcatctgcggtgacatgagatgagccactggatgctctcttttgcaggtgtccatccagtgttagccagcagcatagagatttaggaatagttggaaggtagtgagtggatgctttatttgaatggctcttcaagggaaacagagaaacaaaaatcacatgacaaatgtcaattttgggatttttttttcctccctctctacaggtgtacactccagagccatttttcctttaattttgaatggctgatgttcgtttgctacagtagttttttttttgagttgtgcttccacagcagtaaaattgattaagacgggccatgaatgcccgcgatatccttaaatcattt

SEQ ID NO: 200015 - DNA, 1504 bp, Zea Mays
gttaatgtgttgagtttggacatggagacatggagacagcatgttactggagggaagctccgggaaattactgaggaagctaaggccttttcaattggaaacaaggctttagctgctctctttgttcacacgccagctggtgaattacagcgccaaattcgtgcatggcttgctgaaaactttgagtttctatctgtaactggtgcggatgctgctggaggagccgcaggacagcttgaactgctgtcaaccgctattatggatggctggatggctggtcttggtacagcgcagccccctaccactgatgctttaggccagcttttatcagaatacacaaagcgtgtttacacatctcaactacaacacttgaaggacatagctggcacattggcaacggaggaggctgatgatcctgcacatgtcagtaaactccgctctgctctggagtctgtggatcacaaaaggagaaagatcatgcaacaaatgcgaactgacactgccttgttaacaaaagaagaaggtggctcaccaattcgcaatcctcttactgctgcggaggatgcacgattagcatctctcatatctctagataacatcttgaagcaagtcaaggaagtaattagacaaagctctacaggacctatgagaaaatcaaagaggaaagctttgctagagttattggatgacctcttgacacagatgccctctcttcttgatatagatcatccatgtgctcagaagcagatcatggaggcacggaaagttgtcgagtcactgcaagaagaccctgatgatcctgccccacagtctaatgcattgggagagggcgaggtttcacagtggaatgtactgcagttcaacacgggaacgactgcgcctttcatcataaagtgcggagcaaattccagtggtgaactggtgattaaggctgatctgcgagtccaggagcctaaaggtggcgaggtgatccgtgttgttccaagaccaacagttcttgcggacttgagttttgaggaaataaaaggtgtgtttgagcaattgccagaggcagttagcttgcttgccttggcacgaacagcagatggtacaagggccaggtattcaagattgtacagaaccttagccagcaaagtgacggccttgaaagagactgttgcagagatggagagaggtggtgttttcaaagatgtacgataaatgctgtgttattgtagagttatttatgatattgatgttgtatatggatgccatttgtcggcatcccttgtaactgtatttgtttttactatgtggaaacctatgttgtaacactattctttggcaagagatgagccttgcctgccccaacccgtaatactatggttgtgcaaggcattaatgtaaattgtagctgcagctgataaatgtctgcagtgctgcaagtctgaactttccaggttatggaactattcaatgtttatttgtattaagcttttaagatgttaaaattgtgctagttttg

SEQ ID NO: 200016 - DNA, 1792 bp, Zea Mays
aaatcactgaagaataagagatctgaaacaactggctggaaggtcttggctgcagttatcaaagctggtgcagctagggagcatgagatacttgccgagatccgtgatgctgtgttttcattcattcgaaagatggaaccgaaaaaagttatggatactatgttagtttcaagagtcaagatattatacatcagatctttgcttgctaaatcacctgaactacagtccatcaaggtctctccagttgagcgtttcttggagaaatcaaatactggtcgaagtagaagttctagtaggggaagtagtcctggcagatctcctgttcaccaccatggtcatggttcccgaactgcgcttgttgatgaacatgtgcatggtttcaaggtgaacattaaacaggaaaagaaatcaaaattctcctcaattgttctgaagcttcgtggtatcgaggaggagacatggagacagcatgttactggagggaagctccgggaaattactgaggaagctaaggccttttcaattggaaacaaggctttagctgctctctttgttcacacgccagctggtgaattacagcgccaaattcgtgcatggcttgctgaaaactttgagtttctatctgtaactggtgcggatgctgctggaggagccgcaggacagcttgaactgctgtcaaccgctattatggatggctggatggctggtcttggtacagcgcagccccctaccactgatgctttaggccagcttttatcagaatacacaaagcgtgtttacacatctcaactacaacacttgaaggacatagctggcacattggcaacggaggaggctgatgatcctgcacatgtcagtaaactccgctctgctctggagtctgtggatcacaaaaggagaaaggaagtaattagacaaagctctacaggacctatgagaaaatcaaagaggaaagctttgctagagttattggatgacctcttgacacagatgccctctcttcttgatatagatcatccatgtgctcagaagcagatcatggaggcacggaaagttgtcgagtcactgcaagaagaccctgatgatcctgccccacagtctaatgcattgggagagggcgaggtttcacagtggaatgtactgcagttcaacacgggaacgactgcgcctttcatcataaagtgcggagcaaattccagtggtgaactggtgattaaggctgatctgcgagtccaggagcctaaaggtggcgaggtgatccgtgttgttccaagaccaacagttcttgcggacttgagttttgaggaaataaaaggtgtgtttgagcaattgccagaggcagttagcttgcttgccttggcacgaacagcagatggtacaagggccaggtattcaagattgtacagaaccttagccagcaaagtgacggccttgaaagagactgttgcagagatggagagaggtggtgttttcaaagatgtacgataaatgctgtgttattgtagagttatttatgatattgatgttgtatatggatgccatttgtcggcatcccttgtaactgtatttgtttttactatgtggaaacctatgttgtaacactattctttggcaagagatgagccttgcctgccccaacccgtaatactatggttgtgcaaggcattaatgtaaattgtagctgcagctgataaatgtctgcagtgctgcaagtctgaactttccaggttatggaactattcaatgtttatttgtattaagcttttaagatgttaaaattgtgctagttttg

SEQ ID NO: 200017 - DNA, 1566 bp, Zea Mays
gtcgtggtttgggcctgcgcgcctttaaactgtattgggcttggcccatgtacaggaaccaaacacatggtacaaaatctaggtattgtgaaatacttctgccactgccactactgccagcctgccagggatctatttgtaaaaagacaatgacaaaattgacatcaaagcgaaaaagaaagaaaaaacaccctgtcctcaccagttcaacgcctcttctccgttcacccggcgtgtgctctgcctctctctctctctcgtgcagcgaccgccgacgcgcttcgccagaccttcgccggcgacgagcactcaccagaccttagttaaaaggttggattcaaaggactgggttatgacatgtgaagctctcaacaatgttcgtcagttggcgatgtatcacaaggaaagattgcaggagctgctggagcctctagttcctcttatcgtgaaatctgtgaagaacccaagaagtgctgtatgcaaaacagcactgatgacttgtgctgacatctttaaggtctatggtgacctactggttgagtctattgatccactgctagtgcagctgtttctaaaggcttcacaagataagcgttttgtctgtgaagctgctgaggcagctcttacatcgatgacaagttggatctccccattactactgttaccaagaatgcagccctacctcaagaacaggaatccgcgggttcgagcaaaagcatcagtgtgtttgagcaagagtgtaccttgcttagatgtgcagggaatcagagaatatggaatggataagctcgtccagattgcagcaacccaactcagtgaccagcttcctgaatcaagagaggctgctcgcaacctggcactggaactacaggtattatatgagaagtctcaggcctccacctctgacgaaaatgagggtgaaccttctgtctcacaagatgctgagtcatgggaggctttctgtcagtccaagctttctgccttaagcgcccaagccatccttcgcgtgacctctactactccaaaagagggtgtcgcctctacttcaaatgctacaaaagagggtgtcacggcggccccaaaagaaggtttggatgtggattgctagcatgaggcacacaagcccacaatgagtttgtagatgcgatcagagcgcgattgtccacccccttcggtttttttgatgtacatgcttatggctggtccttggttacatccagttgggaatcggttgattattggttcgggaattcaggtgtgaccgcggtgttaatattggttgggacatatatctgctatagttgattgtataatcattttgttccactacttggtatttgtttcgccaggtgaacgtagaatttgacccacggtcagtgttatatacagtcctctttctgccacatcgggtgcaggttatgttatttttgaaggagatgtcattggcattcgtgcgccacccttatgttgtactctctctccgttttaaatcataagtcgttttgacttttttttaagtatatagcttttgttatgcatctagatataagttgtctataaaaggcc

SEQ ID NO: 200018 - DNA, 1009 bp, Zea Mays
ctcgttttgtgttatattttgaaaattgatctaacataaaacacggcaacacataacacagctagtgaaggatacatcagacaagcttaaacaagccagcgaggcggatcatcgcgttgaagtcagcgctaccaagaagattgctgatgcaaagctagctaaagatttccaagcagtcctaaaagaattccagaaagcccaacgattagcagcagagagagaagctgcatatgcaccttttatttctcaagcgggcttgccacagagctacaactcaagtgaagtgaataatggtgctgataggttggcagagcagcgcacacagcttctagaatctagaaggcaggagttggtcttcttggataatgaaatcgtgttcaatgaggccatcattgaggagagggatcagggaatacaagagattcagcaccaaatcactgaagtaaatgaaatcttcaaagatctcgctgtgctagtccatgatcaaggagcaatgatagatgacattgattcccatatagagaacgccgttgtagcgacttcgcaggctaaaggccagctttcaaaggctgctaaaactcagaagtcgaactcttctctgatatgcttgttgctcgttattttcggagtggtcctgctcatagtgataatagtacttgcagcctaaaagcttggaaggcagctggggttccgaaatctgatcgagagcttattgcgacaaattccttcataagttatttttgctgtgctgctaggaatgattcctggtacccaggcggtgattggcgctctgcttgtggtgtggcggtatatgtggtgatgatgaaatctgatacataaaagtactctttcctgcaagtgtagtgcctcatgcacgtttttgtttatatattgtgatgtatgagtgcgtgctgtagaacaaggttggattatccgtggcatgaagtttctcgatctcatgagaaacgcttttctatatttcatctcgcactacgcttctctatcagta

SEQ ID NO: 200019 - DNA, 938 bp, Zea Mays
gacaaaaccattcaagaagctccctttcacttggaatcatcgcagttccaccctcgaccatttcgaatgcctgaatcttctgaggtgaggtagtggcaaagcaccagctaacttcaattcaaggaagagttagtatgccaggaattggtatgaaccccattaggcaagaatcatccactgtaaaagctgatcagtttgatggttgctcacatagcaaagagtgactacgagatatgtgccacaaaatgcatgacaagttcagcttaggaaatggcaaccgatgaggaccgaaggcaagatgacacagttcagtaacccagctgacagcctggcacgcaggcttcccctttattttcctctgttactgcaatagtaacttaaatttttaggcttcccctttattttcctctgttactgcaatagtaacttaattttttttaggcttcacctttcctttttgtttgaaaattagcagggcagtattaattaatagtacaaaaccatgtatcaccaagatttcaggggttgaaacttgaaatgccaatattcaccaagctttagttttttttcaaagagtaatttgcagaggttgtaatgcactatagcctatagcagacttaacaagcactacaatagaagacagcatcagcagagtcaattactatacacctacaagggaacacaacccatgaagagagttaacaacaagaaggaaacttgtgctgtaactccacatctgttcattcatgacactagtaatttcaaggatcagaataaagctttgaccctaaaacacggtcgcaccagggtaagtttggagaattcagtggtcaagctgtaagtttggagaaatcagtggtcaagtggtaaaagtaaagagacattctttaggtcaagtggagaattcagtatttttcaatcttaacattctttgggtt

SEQ ID NO: 200020 - DNA, 1038 bp, Zea Mays
aggttatagatgctgtctatgagaaatgttggtgggggcaacattacagcgtcaagctctggggcagtgatgccaccagtaaaccaaaacaaaaccattcaagaagctccctttcacttggaatcatcgcagttccaccctcgaccatttcgaatgcctgaatcttctgagatgatgcttccaggtgaggtagtggcaaagcaccagctaacttcaattcaaggaagagttagtatgccaggaattggtatgaaccccattaggcaagaatcatccactgtaaaagctgatcagtttgatggttgctcacatagcaaagagtgactacgagatatgtgccacaaaatgcatgacaagttcagcttaggaaatggcaaccgatgaggaccgaaggcaagatgacacagttcagtaacccagctgacagcctggcacgcaggcttcccctttattttcctctgttactgcaatagtaacttaaatttttaggcttcccctttattttcctctgttactgcaatagtaacttaattttttttaggcttcacctttcctttttgtttgaaaattagcagggcagtattaattaatagtacaaaaccatgtatcaccaagatttcaggggttgaaacttgaaatgccaatattcaccaagctttagttttttttcaaagagtaatttgcagaggttgtaatgcactatagcctatagcagacttaacaagcactacaatagaagacagcatcagcagagtcaattactatacacctacaagggaacacaacccatgaagagagttaacaacaagaaggaaacttgtgctgtaactccacatctgttcattcatgacactagtaatttcaaggatcagaataaagctttgaccctaaaacacggtcgcaccagggtaagtttggagaattcagtggtcaagctgtaagtttggagaaatcagtggtcaagtggtaaaagtaaagagacattctttaggtcaagtggagaattcagtatttttcaatcttaacattctttgggtt

SEQ ID NO: 200021 - DNA, 1947 bp, Zea Mays
aggcgctggctggctagctgacaccgaggagccggggcggaatccgtccgctgcagcacagccgcgcccgggggaaaccgccaaaaccccgtaaaaagtccaggaaaaaacaagcccaaagcgggcgagtgcgcggccgcgggcaagcaaccggccacccacctagctcggctccgctcagcggcagcaccgcaggccgcagcagcacggcatgggcgcaaacactaaaaagaagggagcggccgcgcctccaccccaaacccacctcgcctcctagtcccccccttcgccttctctcccgagtcccatcggagcccggagctctctcgcctcccgcgaggctgtgtggtgaggcgcggacgagatgaacgagcaggggctcggtggtctcggcgggggccgcggggccgtgcaggggcacgggcgggaggcgatggcgctcttgcagcaccagcagcttcaacagcaacggcggcagctggaggaggaggatgaggtgcggcgccagatgttcggcggggtggcggcgttcccggcagcgctgggccacggccagcaggtggactacggggaggacgccggcgggctcggggacagcgacgcgggcgggtcggagcccgagccaccgccggagcggacgcgcggggggtccggcggcggcggcggcaagcggagccgcgctgccgaggtgcacaacctctccgagaagaggaggaggagcaagatcaacgagaagatgaaagcgctgcagagcctgatacccaactccaacaagaccgacaaggcatccatgcttgacgaggccattgagtatctgaagcaactgcagctccaagtgcagatgctgtctatgagaaatggtgtttacttgaaccctccatatttgtctggcacaattgagcctgcacaagcatcacaaatgtttgctgcagttggtgggggcaacattacagcgtcaagctctggggcagtgatgccaccagtaaaccaaaacaaaaccattcaagaagctccctttcacttggaatcatcgcagttccaccctcgaccatttcgaatgcctgaatcttctgagatgatgcttccaggtgaggtagtggcaaagcaccagctaacttcaattcaaggaagagttagtatgccaggaattggtatgaaccccattaggcaagaatcatccactgtaaaagctgatcagtttgatggttgctcacatagcaaagagtgactacgagatatgtgccacaaaatgcatgacaagttcaggacagcttaggaaatggcaaccgatgaggaccgaaggcaagatgacacagttcagtaacccagctgacagcctggcacgcaggcttcccctttattttcctctgttactgcaatagtaacttaaatttttaggcttcccctttattttcctctgttactgcaatagtaacttaattttttttaggcttcacctttcctttttgtttgaaaattagcagggcagtattaattaatagtacaaaaccatgtatcaccaagatttcaggggttgaaacttgaaatgccaatattcaccaagctttagttttttttcaaagagtaatttgcagaggttgtaatgcactatagcctatagcagacttaacaagcactacaatagaagacagcatcagcagagtcaattactatacacctacaagggaacacaacccatgaagagagttaacaacaagaaggaaacttgtgctgtaactccacatctgttcattcatgacactagtaatttcaaggatcagaataaagctttgaccctaaaacacggtcgcaccagggtaagtttggagaattcagtggtcaagctgtaagtttggagaaatcagtggtcaagtggtaaaagtaaagagacattctttaggtcaagtggagaattcagtatttttcaatcttaacattctttgggtt

SEQ ID NO: 200022 - DNA, 1931 bp, Zea Mays
aggcgctggctggctagctgacaccgaggagccggggcggaatccgtccgctgcagcacagccgcgcccgggggaaaccgccaaaaccccgtaaaaagtccaggaaaaaacaagcccaaagcgggcgagtgcgcggccgcgggcaagcaaccggccacccacctagctcggctccgctcagcggcagcaccgcaggccgcagcagcacggcatgggcgcaaacactaaaaagaagggagcggccgcgcctccaccccaaacccacctcgcctcctagtcccccccttcgccttctctcccgagtcccatcggagcccggagctctctcgcctcccgcgaggctgtgtggtgaggcgcggacgagatgaacgagcaggggctcggtggtctcggcgggggccgcggggccgtgcaggggcacgggcgggaggcgatggcgctcttgcagcaccagcagcttcaacagcaacggcggcagctggaggaggaggatgaggtgcggcgccagatgttcggcggggtggcggcgttcccggcagcgctgggccacggccagcaggtggactacggggaggacgccggcgggctcggggacagcgacgcgggcgggtcggagcccgagccaccgccggagcggacgcgcggggggtccggcggcggcggcggcaagcggagccgcgctgccgaggtgcacaacctctccgagaagaggaggaggagcaagatcaacgagaagatgaaagcgctgcagagcctgatacccaactccaacaagaccgacaaggcatccatgcttgacgaggccattgagtatctgaagcaactgcagctccaagtgcagttggtgggggcaacattacagcgtcaagctctggggcagtgatgccaccagtaaaccaaagttcaggacttcaagtatttgatccattaaatcctccacgagaccaaccactgtcttttgtattaccaaatgtagacaaaaccattcaagaagctccctttcacttggaatcatcgcagttccaccctcgaccatttcgaatgcctgaatcttctgagatgatgcttccaggtgaggtagtggcaaagcaccagctaacttcaattcaaggaagagttagtatgccaggaattggtatgaaccccattaggcaagaatcatccactgtaaaagctgatcagtttgatggttgctcacatagcaaagagtgactacgagatatgtgccacaaaatgcatgacaagttcaggacagcttaggaaatggcaaccgatgaggaccgaaggcaagatgacacagttcagtaacccagctgacagcctggcacgcaggcttcccctttattttcctctgttactgcaatagtaacttaaatttttaggcttcccctttattttcctctgttactgcaatagtaacttaattttttttaggcttcacctttcctttttgtttgaaaattagcagggcagtattaattaatagtacaaaaccatgtatcaccaagatttcaggggttgaaacttgaaatgccaatattcaccaagctttagttttttttcaaagagtaatttgcagaggttgtaatgcactatagcctatagcagacttaacaagcactacaatagaagacagcatcagcagagtcaattactatacacctacaagggaacacaacccatgaagagagttaacaacaagaaggaaacttgtgctgtaactccacatctgttcattcatgacactagtaatttcaaggatcagaataaagctttgaccctaaaacacggtcgcaccagggtaagtttggagaattcagtggtcaagctgtaagtttggagaaatcagtggtcaagtggtaaaagtaaagagacattctttaggtcaagtggagaattcagtatttttcaatcttaacattctttgggtt

SEQ ID NO: 200023 - DNA, 1935 bp, Zea Mays
aggcgctggctggctagctgacaccgaggagccggggcggaatccgtccgctgcagcacagccgcgcccgggggaaaccgccaaaaccccgtaaaaagtccaggaaaaaacaagcccaaagcgggcgagtgcgcggccgcgggcaagcaaccggccacccacctagctcggctccgctcagcggcagcaccgcaggccgcagcagcacggcatgggcgcaaacactaaaaagaagggagcggccgcgcctccaccccaaacccacctcgcctcctagtcccccccttcgccttctctcccgagtcccatcggagcccggagctctctcgcctcccgcgaggctgtgtggtgaggcgcggacgagatgaacgagcaggggctcggtggtctcggcgggggccgcggggccgtgcaggggcacgggcgggaggcgatggcgctcttgcagcaccagcagcttcaacagcaacggcggcagctggaggaggaggatgaggtgcggcgccagatgttcggcggggtggcggcgttcccggcagcgctgggccacggccagcaggtggactacggggaggacgccggcgggctcggggacagcgacgcgggcgggtcggagcccgagccaccgccggagcggacgcgcggggggtccggcggcggcggcggcaagcggagccgcgctgccgaggtgcacaacctctccgagaagaggaggaggagcaagatcaacgagaagatgaaagcgctgcagagcctgatacccaactccaacaagaccgacaaggcatccatgcttgacgaggccattgagtatctgaagcaactgcagctccaagtgcaggcagttggtgggggcaacattacagcgtcaagctctggggcagtgatgccaccagtaaaccaaagttcaggacttcaagtatttgatccattaaatcctccacgagaccaaccactgtcttttgtattaccaaatgtagacaaaaccattcaagaagctccctttcacttggaatcatcgcagttccaccctcgaccatttcgaatgcctgaatcttctgagatgatgcttccaggtgaggtagtggcaaagcaccagctaacttcaattcaaggaagagttagtatgccaggaattggtatgaaccccattaggcaagaatcatccactgtaaaagctgatcagtttgatggttgctcacatagcaaagagtgactacgagatatgtgccacaaaatgcatgacaagttcaggacagcttaggaaatggcaaccgatgaggaccgaaggcaagatgacacagttcagtaacccagctgacagcctggcacgcaggcttcccctttattttcctctgttactgcaatagtaacttaaatttttaggcttcccctttattttcctctgttactgcaatagtaacttaattttttttaggcttcacctttcctttttgtttgaaaattagcagggcagtattaattaatagtacaaaaccatgtatcaccaagatttcaggggttgaaacttgaaatgccaatattcaccaagctttagttttttttcaaagagtaatttgcagaggttgtaatgcactatagcctatagcagacttaacaagcactacaatagaagacagcatcagcagagtcaattactatacacctacaagggaacacaacccatgaagagagttaacaacaagaaggaaacttgtgctgtaactccacatctgttcattcatgacactagtaatttcaaggatcagaataaagctttgaccctaaaacacggtcgcaccagggtaagtttggagaattcagtggtcaagctgtaagtttggagaaatcagtggtcaagtggtaaaagtaaagagacattctttaggtcaagtggagaattcagtatttttcaatcttaacattctttgggtt

SEQ ID NO: 200024 - DNA, 1830 bp, Zea Mays
  misc_feature (1)..(1): n is a, c, g, or t
nattatcagttcttcttgtatcagttgcttcgaggtttgaaatacatacacacagcttattgcagcaaatgtattccatcgagatctcaaaccaaaaaatattctggcaaatgctgattgtaagctcaaaatatgtgattttggcctagcaagagtagctttcagtgatactccaaccgcgatcttttggacagattatgttgcaactaggtggtaccgagcaccggagctgtgtggatcatttttctcaaagtatacaccagcgatagatatatggagtattggttgtatatttgcggaactattaactggaaaaccgcttttcccggggaaaaatgtggtacatcaacttgatataattacagatctcatgggaacaccttctccagaagcaatatcgaggattcgtaatgagaaggccaggcgctacttgagtaatatgaggcggaaaaagcccataccttttacacagaagttcccaaatgcagatccacttgcattaggtttgttagagcgaatgctagcttttgagccaaaagacaggccaagtgctgaagaggctcttgctcatccttattttaagaatatagccaatgtggatagagagccttctgcacaagctgtcacaaagctcgaatttgagttcgagagacggagagtcactaaagatgacataagggaacttatatatagagaaattcttgagtatcatccaaagatgttgaaagaatttattgagggaactgagtcaagtggtttcatgtacccaagtgcagtagataattttaaaaagcagtttgcataccttgaggaacattatgccaagggatctacgggaactccacctgagaggcaacataactcattgccacggccttctgttgtctattcagacaaccaatcacaaagcacggccaatataacagaggatctttccaagtgtataatcagagaaaatgcacagaagtcacagcaatataatgcttcagttgcaaataaatttccatcccatgttcctcaaggtgctgctgcaaggcctggtaaagcagttggttcggtgctgcagtacaacctctctcaagcatctgctgctgagcaatatgagcagcgaagggttgctaggcacccagcagttgccccaaacaacatcccttctggaagctcataccccagaagaaatcagacctgcaagagcgagacaggcgacactgagaggatggacgtgaaccaagctgggcagccgaagtcctatgcagcaaacaaactacctgcaactgttgatggtcgcggcggccattggtagatctccgcgttgtgtaacacgttatcagcatctgttacttgtgctaagcgctacattattctgacaaattcagaaatgtagttctgtacagatccgtattctttccccggattcctaagtactgtagaacggtgctcgaaatcgctgggtttccacctcctgtcgctattcattcactgaaagatctgctggctggtggagatttgtcagactgaagtatactggaagctcactggcagcagcgggaactcaagcaagcagagttcttgactgacgttgtcatttgttcttcagcctggtaggtctaacgagctgaatactgttagttcctgtgaatcatctacacgtcaggtgcagaattctgttgagctagctaggaggtgcaagcatgttgtacgctgaatatcaaagtcattgatcctttactcatgttatcttggttaaacgtgagatatatgctagcgtgtagtatccctgtttcccaacaatatacttactcaccacattgttcacgtatagctgatact

SEQ ID NO: 200025 - DNA, 1793 bp, Zea Mays
tatcagttcttcttgtatcagttgcttcgaggtttgaaatacatacacacagcaaatgtattccatcgagatctcaaaccaaaaaatattctggcaaatgctgattgtaagctcaaaatatgtgattttggcctagcaagagtagctttcagtgatactccaaccgcgatcttttggacagattatgttgcaactaggtggtaccgagcaccggagctgtgtggatcatttttctcaaagtatacaccagcgatagatatatggagtattggttgtatatttgcggaactattaactggaaaaccgcttttcccggggaaaaatgtggtacatcaacttgatataattacagatctcatgggaacaccttctccagaagcaatatcgaggattcgtaatgagaaggccaggcgctacttgagtaatatgaggcggaaaaagcccataccttttacacagaagttcccaaatgcagatccacttgcattaggtttgttagagcgaatgctagcttttgagccaaaagacaggccaagtgctgaagagaatatagccaatgtggatagagagccttctgcacaagctgtcacaaagctcgaatttgagttcgagagacggagagtcactaaagatgacataagggaacttatatatagagaaattcttgagtatcatccaaagatgttgaaagaatttattgagggaactgagtcaagtggtttcatgtacccaagtgcagtagataattttaaaaagcagtttgcataccttgaggaacattatgccaagggatctacgggaactccacctgagaggcaacataactcattgccacggccttctgttgtctattcagacaaccaatcacaaagcacggccaatataacagaggatctttccaagtgtataatcagagaaaatgcacagaagtcacagcaatataatgcttcagttgcaaataaatttccatcccatgttcctcaaggtgctgctgcaaggcctggtaaagcagttggttcggtgctgcagtacaacctctctcaagcatctgctgctgagcaatatgagcagcgaagggttgctaggcacccagcagttgccccaaacaacatcccttctggaagctcataccccagaagaaatcagacctgcaagagcgagacaggcgacactgagaggatggacgtgaaccaagctgggcagccgaagtcctatgcagcaaacaaactacctgcaactgttgatggtcgcggcggccattggtagatctccgcgttgtgtaacacgttatcagcatctgttacttgtgctaagcgctacattattctgacaaattcagaaatgtagttctgtacagatccgtattctttccccggattcctaagtactgtagaacggtgctcgaaatcgctgggtttccacctcctgtcgctattcattcactgaaagatctgctggctggtggagatttgtcagactgaagtatactggaagctcactggcagcagcgggaactcaagcaagcagagttcttgactgacgttgtcatttgttcttcagcctggtaggtctaacgagctgaatactgttagttcctgtgaatcatctacacgtcaggtgcagaattctgttgagctagctaggaggtgcaagcatgttgtacgctgaatatcaaagtcattgatcctttactcatgttatcttggttaaacgtgagatatatgctagcgtgtagtatccctgtttcccaacaatatacttactcaccacattgttcacgtatagctgatact

SEQ ID NO: 200026 - DNA, 3534 bp, Zea Mays
atcctcgtctcaccagtcagcacaggcacggtgtgctttgaccgctaccctcgatcccccgatagcagcagcagcagcagatcctcggcggcgacatggacacccccacggcgaaggcggcatggaacgccaactacggcgtcgtcggcagtggggaccgtcgtcttgccttctcccgccaactctcctccaacgccaccacgccgcgcctcgctcggtacaagcgattggaggttctggctgcctttacaaatgctctgtttctattgttcctgtctttctccttggctgttgaagcattacatgcatttatgcaagatgaatcggagcacaagcattatctgattgtttctgctgtcaccaatcttttggttaatttacttggtgtttggttcttccggaactacgctcgtgttaacatagtttacaggaatgcagaggatatgaattaccactcggtctgtttgcatgtgttggcagattcaatacggagtgcaggcttgatactagcttcttggtttctttcattggggattgagaatgctgaggttctgtgcctgggaatcgtctcagtggcagtgtttatgcttgttttgccgttatttaaagctactggtaatatcctactgcaaatcgcacctagcaatgtgccaccttcagcctttacaaagtgctcgagacagattgctgcttgtgaagatgtctccgaagtatggcaaggtcgattctgggagcttgttcctggtcaggcagttggatctctctccattagggtgaagagcggcgctgacgaccgggcagtccttgaatacacgcatggtttatatcaggatttgggcatacaggatctgacggtccaaactgatgagtttgtagggcctgttagttagacggaaggggaaggaactgctgcaagaaaacaaacgcaaggatcatgccctgcctttggcctggtggaaggcgctggagaagttggggatcctgtccaggtggcggagcgcgcgctccgccgtctgccgcgtgcggacgtcgccgttgcggtaggcctccaccagaacggacgccacggtctggtcggccgccacctccagcgcgatgtcctcgacgcgcaggatgcgctccacggcccacaccgcccgccgctgcagcgcctccgtccggttctccaccagtacctccaccacggggcgcagcccctccgcctccccgatcaccagcaccccctccgtcgcgttggccacgccgtcccccagcagcgtcgacagcgccgctagcgccgcctccaccacgcggggatccgcatgctctaggcacgccaccagccgctccaccgccttgcacccgccctccgcaaggcagaacgtctcccgcagcgagcagaagccgccgtgcacgcggcacgtccccattgccccggggggcgggggcgaccgtccctgcccgaagcacccgcacacgaggctgctcccacgacgaggcgccggcacgtccgtcaacctcgaggactgcagcgacaggttctccagcgccatggccgagtagagcagcacagcctcctgcccgctgctcatcatctgctgcaggagctccacgaagagcggcgccagccccacctcccgcgccagctccacgtacgtctcctcctgctgcagcagcgccagcgcgcacgtcaccctgtacagcaccttcaccgccccctccgtgaagggcgccacgtgccggttgccacggatcgtgccccgccggagctccaccagcttcgtggccagcgcccggaacgcgcccagctcctgcagctgccgcgtcaggttccagtccctctcggggaggtcgcccagcagagcgacggccgccgcctgctcctccgtgacgccgctccggtcctcggtgactgtggccaccccgagcaggctgctcaggttgccggtgctgcccccgaggccgagggcgtccgcgagctccgcgcccatgtacggcgacacgttgcgcagcagcttgagggactccacgcggatctcccggtgcgcggcctccacgaactggatgaggctgatggtggccccggagctccggatggcggagaccacgtcgggcaccgtggccggggaggcggtgaggcccacaaggacgttgaggagcttgcactcgatggcgggcccggtgttgctgatgaggtggagcaggctgtgcaccatctcctccgacagcagcgtctccccgctgtggtccagcgggatggaccggaagctggcgcccgacgccaccaggttggccaggatggcggccgacacctccttgagcctcatgggcaggtggccggcgcccagggagaagaggtccttgaccagcggcggcaggatgcccgcctggagcaggatcctggcgctggactcgttcgacgatatctccctcagggccttgagcgtggcctcccgcgccggaaggctgccctcggtcttcatgatggtgaccagcagggccccgacctgctccgccacaaggaccttcacgtcgttggccagcgcaagctcaccgaggaattcagccatggcgagctggacttggggtggaccttggatgagtttggtaagcagaggctgaagcctgccgttctctgccatctgcttgacgtttgtttcgtacttctccaggttcttgagcgtgttctctgctttctccacagccacaccgtgctctgatttgctactggccatcccaaccagcaggagaatggccccgtagattgcgccgatcctttcgcatgtagggtcgaacttggagagctcgtacaatagcgacactgcaagctccctctcttggaaattctcattggacaggaacttgatgatggtgcgtatggtgtcacctttagcaagctcttcctagcaaggaaggagtatatatattatatattcaggagtagtggattcaggaagcaaggaagaggtgaggtgaggtgacggatcggaccttgttttcatcgtcttcctcgacgatgacaccaaggacttggagggccttgagccgaacccttctactgctgctcttaagcaggtcagctatggtgggtatgacgccttgcctgcgcacgagggtcttcttcatgcgggagacgtagaggagggcgcgcagggtgtcgtcgtcgtcgtcttgagcctgagcctcctgtgtggcggtgagggaagccatggccttgtcgagctccttgtcctcgttcctcgccctccactcttggatgacgttgcgcagggcgatgctgggggtgatgtcggtgctgcgcagctccgcctgcgtgagcgggcacgtcggcttccttccgctgtccctgcactccctgaaccacttgaggatggcctcccgctcgaaggtctgcccggtctcgatggtgacagggtcgtgcatcacctgcttggtgagagggcacatgaaggcctcgaacgccggctcctggttggattgctcgtccagctcgctgtcgccgccgcagaaaccttccatcttgttccactccgatccaattccgatggtgagggc

SEQ ID NO: 200027 - DNA, 3330 bp, Zea Mays
gggcttcgtgttttgcttagaacagctcctcaggatattcctcagatactactggaagctcagagtaggtggctgcggcccactgaaatctgccaaatattgtcaaactacaagaagttttccattgcgccagagccaccaaacagacctcaaagtggttcgctgtttctgtttgaccggaaaatattgagatacttccggaaggatggacacaactggagaaagaaaaaggacggaaagacagttaaagaagcacatgagaagctcaaagttggcagtgttgatgtacttcattgctattatgcccatggtgaagagaatgagaacttccaaagacgaacatattggctgcttgaagagggtttcatgaatattgttcttgttcactaccttgaaatcaagggtgccaaacaaagtttcaatcatgctaaagaagctgaagagactgcaggattatctaatgccgatagtcctgcatgctcaaactctttcgctagtcagagccaggtagcctcccgatctatggatgctgaaagcccaattagtggacagatttcggaatatgaagatgctgaaacagataattctcgagcaagctccagataccaccctttcactgagatgcagcagcctgtggatggtaccgtgatgggtaacttctttggcgcttcatctccaagtgtttctgtaaataatctagctgcaggttatcttggtgaaatgcaacctacgggagctaattttaccagtcattttgccactcgcaatgacatagctagtgtgttcaatgatactggctctgagttaggaggtggtcccaaaacttcaattgattcagtactgttgggtgaaccatttccagaatatccaggcggcttcatggagtcgacactctattcttctgttgcaacattgggtaacagtctggaagatggtttgcagacatttatgtctgaggctctctacaccaacaatctcactcaaaaggaagttgatgcacttggtgcagcaggcataacatcctcgaagacagagaatgatggttatacagatcaaagtgtcaggtatccacttttaaagcagtcatcatcagacctctttaagatggagccagatggtttgaaaaaattcgacagcttttcaaggtggatgagcaatgagcttccagaggttgttgatttggatatcaagtccagctctgatgctttctggagtactactgaaaccgtgaatgttgctgatggatctagtatacctattaatgagccattggatgtatttgtagtcagcccctcactttcccaagaccagctcttcagtattattgatgtatctccaagctgggcatacaatggcacaaaaaccaaggtcttaattactggtacattcttggcaaaaaaagaagatgtggaaaattgcagctggtcttgtatgtttggagactctgaagtctctgctgaagttttagtggatggctccctgcgttgctatacaccagtacaccattctggacgagtcccattttatgtgacatgttcaaatagagtagcttgtagtgaagtgcgagaatttgagttccgtgattctgagacccattatatggatatctcagataagcatactacaggcataaatgaaatgcatttacgtatccgccttgataagttactttccctggaaccagaagactatgaaaagtatgtcttgagtaatggaaataagtctgagctgatcaacactatcagttcattaatgcttgacaataatttgtctaatctggcattaccatctgatgagaaggaattgtgcactgtacaggatcagaatcttgagaaacaggtgaaagaaaagctatattactggcttatccataagatacatgatgatggaaaaggtccaaatgtcctaggcaaggaaggacaaggtgccattcatttagtagccgcacttggttatgattgggctatcaaaccaatagttgcggcaggagtaaatataaacttcagggatattcgtggatggactgcgcttcactgggctgcatgttgtggaagggagcggacagttggtgccctgatagcaagcggagctgcatctggtgctttaacagatccaacgcagcagtatccatctggaagaactcctgctgatttagcatcagaaaatggtcacaaaggcattgctggttttcttgcagagtctgctttgacaagtcacctctcagctcttacattaaaagagtcgccaagtggcaatgtggaagaaatatgtggattaacagcagctgaaggttttgcagcatcaagttcttcccagcttgcttgtgttaattctcaggaagagtccttaaaagattcacttggtgcagttcgtaaatcaactcaagcagcagccagaatatttcaagcttttagggtggaatcattccacagaaagaaggttattgaatatggagatgatgattgtggattgtctgatgaacgcacactttcacttgtttcccttagaaacccgaaatctggacacggtgattcacattctgctgctgttcgtattcaaaacaagttcagaggatggaaaggaagaaaagagtttatgcttatccggcagaaaattgtgaagatacaggcccatgtacgtggacatcaggtaaggaaaaactatcggaaggtagtctggtctgttggcatcgtggagaaagtcatactgaggtggaggagaaagggaaggggtctgcgaggtttccaacctgagaaacaacttgaaggtccatcatggcagatccaacctgcaaaggctgaggctgaggatgaatatgacttcttgaaggatggcaggaaacaggctacaggcaggttggatagagcactggctcgtgtgcgttccatgaatcagtatcctgaagcaagagaccagtaccgcaggctgcaagcctgtgttaacagcctacgagagtcccaggcgatgcaggacaggatgctggctgattcagctggcaccgatgggggtgatttcatgactgaattggaggagctatgccgggatgatggcgatgccccgatgtcgactatttcttgacatggagcttactatagatcagttaggcagtgacatgttctttaccagactagatgtaaattgttgttactaaatggtctctactcaccgttgaacaccataatataatgatatataccagctaatacatggacttctacagattatgataattgatcagtataatttgtggaattattatattttaaagcaaattaaggtttaacataataaaagtaagcgatatacaattgattcaggtaaaataaatat

SEQ ID NO: 200028 - DNA, 3493 bp, Zea Mays
cgcagcaaatattccaatccgacggcgccgtgtctcaaatcccgtgaagtgcctcgccgcgcagacaaaaaaaaaaaatccccaaatccccttgagaggcctgcaatttttagcctcctgaaccctgcgattggagccggcggtggcggcgccagcgcccgcggtcggatcgtcgcatggccgagattcgcaagtacgccatgtccaaccagcccccagatattcctcagatactactggaagctcagagtaggtggctgcggcccactgaaatctgccaaatattgtcaaactacaagaagttttccattgcgccagagccaccaaacagacctcaaagtggttcgctgtttctgtttgaccggaaaatattgagatacttccggaaggatggacacaactggagaaagaaaaaggacggaaagacagttaaagaagcacatgagaagctcaaagttggcagtgttgatgtacttcattgctattatgcccatggtgaagagaatgagaacttccaaagacgaacatattggctgcttgaagagggtttcatgaatattgttcttgttcactaccttgaaatcaagggtgccaaacaaagtttcaatcatgctaaagaagctgaagagactgcaggattatctaatgccgatagtcctgcatgctcaaactctttcgctagtcagagccaggtagcctcccgatctatggatgctgaaagcccaattagtggacagatttcggaatatgaagatgctgaaacagataattctcgagcaagctccagataccaccctttcactgagatgcagcagcctgtggatggtaccgtgatgggtaacttctttggcgcttcatctccaagtgtttctgtaaataatctagctgcaggttatcttggtgaaatgcaacctacgggagctaattttaccagtcattttgccactcgcaatgacatagctagtgtgttcaatgatactggctctgagttaggaggtggtcccaaaacttcaattgattcagtactgttgggtgaaccatttccagaatatccaggcggcttcatggagtcgacactctattcttctgttgcaacattgggtaacagtctggaagatggtttgcagacatttatgtctgaggctctctacaccaacaatctcactcaaaaggaagttgatgcacttggtgcagcaggcataacatcctcgaagatcaaagtgtcaggtatccacttttaaagcagtcatcatcagacctctttaagatggagccagatggtttgaaaaaattcgacagcttttcaaggtggatgagcaatgagcttccagaggttgttgatttggatatcaagtccagctctgatgctttctggagtactactgaaaccgtgaatgttgctgatggatctagtatacctattaatgagccattggatgtatttgtagtcagcccctcactttcccaagaccagctcttcagtattattgatgtatctccaagctgggcatacaatggcacaaaaaccaaggtcttaattactggtacattcttggcaaaaaaagaagatgtggaaaattgcagctggtcttgtatgtttggagactctgaagtctctgctgaagttttagtggatggctccctgcgttgctatacaccagtacaccattctggacgagtcccattttatgtgacatgttcaaatagagtagcttgtagtgaagtgcgagaatttgagttccgtgattctgagacccattatatggatatctcagataagcatactacaggcataaatgaaatgcatttacgtatccgccttgataagttactttccctggaaccagaagactatgaaaagtatgtcttgagtaatggaaataagtctgagctgatcaacactatcagttcattaatgcttgacaataatttgtctaatctggcattaccatctgatgagaaggaattgtgcactgtacaggatcagaatcttgagaaacaggtgaaagaaaagctatattactggcttatccataagatacatgatgatggaaaaggtccaaatgtcctaggcaaggaaggacaaggtgccattcatttagtagccgcacttggttatgattgggctatcaaaccaatagttgcggcaggagtaaatataaacttcagggatattcgtggatggactgcgcttcactgggctgcatgttgtggaagggagcggacagttggtgccctgatagcaagcggagctgcatctggtgctttaacagatccaacgcagcagtatccatctggaagaactcctgctgatttagcatcagaaaatggtcacaaaggcattgctggttttcttgcagagtctgctttgacaagtcacctctcagctcttacattaaaagagtcgccaagtggcaatgtggaagaaatatgtggattaacagcagctgaaggttttgcagcatcaagttcttcccagcttgcttgtgttaattctcaggaagagtccttaaaagattcacttggtgcagttcgtaaatcaactcaagcagcagccagaatatttcaagcttttagggtggaatcattccacagaaagaaggttattgaatatggagatgatgattgtggattgtctgatgaacgcacactttcacttgtttcccttagaaacccgaaatctggacacggtgattcacattctgctgctgttcgtattcaaaacaagttcagaggatggaaaggaagaaaagagtttatgcttatccggcagaaaattgtgaagatacaggcccatgtacgtggacatcaggtaaggaaaaactatcggaaggtagtctggtctgttggcatcgtggagaaagtcatactgaggtggaggagaaagggaaggggtctgcgaggtttccaacctgagaaacaacttgaaggtccatcatggcagatccaacctgcaaaggctgaggctgaggatgaatatgacttcttgaaggatggcaggaaacaggctacaggcaggttggatagagcactggctcgtgtgcgttccatgaatcagtatcctgaagcaagagaccagtaccgcaggctgcaagcctgtgttaacagcctacgagagtcccaggcgatgcaggacaggatgctggctgattcagctggcaccgatgggggtgatttcatgactgaattggaggagctatgccgggatgatggcgatgccccgatgtcgactatttcttgacatggagcttactatagatcagttaggcagtgacatgttctttaccagactagatgtaaattgttgttactaaatggtctctactcaccgttgaacaccataatataatgatatataccagctaatacatggacttctacagattatgataattgatcagtataatttgtggaattattatattttaaagcaaattaaggtttaacataataaaagtaagcgatatacaattgattcaggtaaaataaatat

SEQ ID NO: 200029 - DNA, 3511 bp, Zea Mays
cgcagcaaatattccaatccgacggcgccgtgtctcaaatcccgtgaagtgcctcgccgcgcagacaaaaaaaaaaaatccccaaatccccttgagaggcctgcaatttttagcctcctgaaccctgcgattggagccggcggtggcggcgccagcgcccgcggtcggatcgtcgcatggccgagattcgcaagtacgccatgtccaaccagcccccagatattcctcagatactactggaagctcagagtaggtggctgcggcccactgaaatctgccaaatattgtcaaactacaagaagttttccattgcgccagagccaccaaacagacctcaaagtggttcgctgtttctgtttgaccggaaaatattgagatacttccggaaggatggacacaactggagaaagaaaaaggacggaaagacagttaaagaagcacatgagaagctcaaagttggcagtgttgatgtacttcattgctattatgcccatggtgaagagaatgagaacttccaaagacgaacatattggctgcttgaagagggtttcatgaatattgttcttgttcactaccttgaaatcaagggtgccaaacaaagtttcaatcatgctaaagaagctgaagagactgcaggattatctaatgccgatagtcctgcatgctcaaactctttcgctagtcagagccaggtagcctcccgatctatggatgctgaaagcccaattagtggacagatttcggaatatgaagatgctgaaacagataattctcgagcaagctccagataccaccctttcactgagatgcagcagcctgtggatggtaccgtgatgggtaacttctttggcgcttcatctccaagtgtttctgtaaataatctagctgcaggttatcttggtgaaatgcaacctacgggagctaattttaccagtcattttgccactcgcaatgacatagctagtgtgttcaatgatactggctctgagttaggaggtggtcccaaaacttcaattgattcagtactgttgggtgaaccatttccagaatatccaggcggcttcatggagtcgacactctattcttctgttgcaacattgggtaacagtctggaagatggtttgcagacatttatgtctgaggctctctacaccaacaatctcactcaaaaggaagttgatgcacttggtgcagcaggcataacatcctcgaagagaatgatggttatacagatcaaagtgtcaggtatccacttttaaagcagtcatcatcagacctctttaagatggagccagatggtttgaaaaaattcgacagcttttcaaggtggatgagcaatgagcttccagaggttgttgatttggatatcaagtccagctctgatgctttctggagtactactgaaaccgtgaatgttgctgatggatctagtatacctattaatgagccattggatgtatttgtagtcagcccctcactttcccaagaccagctcttcagtattattgatgtatctccaagctgggcatacaatggcacaaaaaccaaggtcttaattactggtacattcttggcaaaaaaagaagatgtggaaaattgcagctggtcttgtatgtttggagactctgaagtctctgctgaagttttagtggatggctccctgcgttgctatacaccagtacaccattctggacgagtcccattttatgtgacatgttcaaatagagtagcttgtagtgaagtgcgagaatttgagttccgtgattctgagacccattatatggatatctcagataagcatactacaggcataaatgaaatgcatttacgtatccgccttgataagttactttccctggaaccagaagactatgaaaagtatgtcttgagtaatggaaataagtctgagctgatcaacactatcagttcattaatgcttgacaataatttgtctaatctggcattaccatctgatgagaaggaattgtgcactgtacaggatcagaatcttgagaaacaggtgaaagaaaagctatattactggcttatccataagatacatgatgatggaaaaggtccaaatgtcctaggcaaggaaggacaaggtgccattcatttagtagccgcacttggttatgattgggctatcaaaccaatagttgcggcaggagtaaatataaacttcagggatattcgtggatggactgcgcttcactgggctgcatgttgtggaagggagcggacagttggtgccctgatagcaagcggagctgcatctggtgctttaacagatccaacgcagcagtatccatctggaagaactcctgctgatttagcatcagaaaatggtcacaaaggcattgctggttttcttgcagagtctgctttgacaagtcacctctcagctcttacattaaaagagtcgccaagtggcaatgtggaagaaatatgtggattaacagcagctgaaggttttgcagcatcaagttcttcccagcttgcttgtgttaattctcaggaagagtccttaaaagattcacttggtgcagttcgtaaatcaactcaagcagcagccagaatatttcaagcttttagggtggaatcattccacagaaagaaggttattgaatatggagatgatgattgtggattgtctgatgaacgcacactttcacttgtttcccttagaaacccgaaatctggacacggtgattcacattctgctgctgttcgtattcaaaacaagttcagaggatggaaaggaagaaaagagtttatgcttatccggcagaaaattgtgaagatacaggcccatgtacgtggacatcaggtaaggaaaaactatcggaaggtagtctggtctgttggcatcgtggagaaagtcatactgaggtggaggagaaagggaaggggtctgcgaggtttccaacctgagaaacaacttgaaggtccatcatggcagatccaacctgcaaaggctgaggctgaggatgaatatgacttcttgaaggatggcaggaaacaggctacaggcaggttggatagagcactggctcgtgtgcgttccatgaatcagtatcctgaagcaagagaccagtaccgcaggctgcaagcctgtgttaacagcctacgagagtcccaggcgatgcaggacaggatgctggctgattcagctggcaccgatgggggtgatttcatgactgaattggaggagctatgccgggatgatggcgatgccccgatgtcgactatttcttgacatggagcttactatagatcagttaggcagtgacatgttctttaccagactagatgtaaattgttgttactaaatggtctctactcaccgttgaacaccataatataatgatatataccagctaatacatggacttctacagattatgataattgatcagtataatttgtggaattattatattttaaagcaaattaaggtttaacataataaaagtaagcgatatacaattgattcaggtaaaataaatat

SEQ ID NO: 200030 - DNA, 3467 bp, Zea Mays
cgcagcaaatattccaatccgacggcgccgtgtctcaaatcccgtgaagtgcctcgccgcgcagacaaaaaaaaaaaatccccaaatccccttgagaggcctgcaatttttagcctcctgaaccctgcgattggagccggcggtggcggcgccagcgcccgcggtcggatcgtcgcatggccgagattcgcaagtacgccatgtccaaccagcccccagatattcctcagatactactggaagctcagagtaggtggctgcggcccactgaaatctgccaaatattgtcaaactacaagaagttttccattgcgccagagccaccaaacagacctcaaagtggttcgctgtttctgtttgaccggaaaatattgagatacttccggaaggatggacacaactggagaaagaaaaaggacggaaagacagttaaagaagcacatgagaagctcaaagttggcagtgttgatgtacttcattgctattatgcccatggtgaagagaatgagaacttccaaagacgaacatattggctgcttgaagagggtttcatgaatattgttcttgttcactaccttgaaatcaagggtgccaaacaaagtttcaatcatgctaaagaagctgaagagactgcaggattatctaatgccgatagtcctgcatgctcaaactctttcgctagtcagagccaggtagcctcccgatctatggatgctgaaagcccaattagtggacagatttcggaatatgaagatgctgaaacagataattctcgagcaagctccagataccaccctttcactgagatgcagcagcctgtggatggtaccgtgatggctgcaggttatcttggtgaaatgcaacctacgggagctaattttaccagtcattttgccactcgcaatgacatagctagtgtgttcaatgatactggctctgagttaggaggtggtcccaaaacttcaattgattcagtactgttgggtgaaccatttccagaatatccaggcggcttcatggagtcgacactctattcttctgttgcaacattgggtaacagtctggaagatggtttgcagacatttatgtctgaggctctctacaccaacaatctcactcaaaaggaagttgatgcacttggtgcagcaggcataacatcctcgaagacagagaatgatggttatacagatcaaagtgtcaggtatccacttttaaagcagtcatcatcagacctctttaagatggagccagatggtttgaaaaaattcgacagcttttcaaggtggatgagcaatgagcttccagaggttgttgatttggatatcaagtccagctctgatgctttctggagtactactgaaaccgtgaatgttgctgatggatctagtatacctattaatgagccattggatgtatttgtagtcagcccctcactttcccaagaccagctcttcagtattattgatgtatctccaagctgggcatacaatggcacaaaaaccaaggtcttaattactggtacattcttggcaaaaaaagaagatgtggaaaattgcagctggtcttgtatgtttggagactctgaagtctctgctgaagttttagtggatggctccctgcgttgctatacaccagtacaccattctggacgagtcccattttatgtgacatgttcaaatagagtagcttgtagtgaagtgcgagaatttgagttccgtgattctgagacccattatatggatatctcagataagcatactacaggcataaatgaaatgcatttacgtatccgccttgataagttactttccctggaaccagaagactatgaaaagtatgtcttgagtaatggaaataagtctgagctgatcaacactatcagttcattaatgcttgacaataatttgtctaatctggcattaccatctgatgagaaggaattgtgcactgtacaggatcagaatcttgagaaacaggtgaaagaaaagctatattactggcttatccataagatacatgatgatggaaaaggtccaaatgtcctaggcaaggaaggacaaggtgccattcatttagtagccgcacttggttatgattgggctatcaaaccaatagttgcggcaggagtaaatataaacttcagggatattcgtggatggactgcgcttcactgggctgcatgttgtggaagggagcggacagttggtgccctgatagcaagcggagctgcatctggtgctttaacagatccaacgcagcagtatccatctggaagaactcctgctgatttagcatcagaaaatggtcacaaaggcattgctggttttcttgcagagtctgctttgacaagtcacctctcagctcttacattaaaagagtcgccaagtggcaatgtggaagaaatatgtggattaacagcagctgaaggttttgcagcatcaagttcttcccagcttgcttgtgttaattctcaggaagagtccttaaaagattcacttggtgcagttcgtaaatcaactcaagcagcagccagaatatttcaagcttttagggtggaatcattccacagaaagaaggttattgaatatggagatgatgattgtggattgtctgatgaacgcacactttcacttgtttcccttagaaacccgaaatctggacacggtgattcacattctgctgctgttcgtattcaaaacaagttcagaggatggaaaggaagaaaagagtttatgcttatccggcagaaaattgtgaagatacaggcccatgtacgtggacatcaggtaaggaaaaactatcggaaggtagtctggtctgttggcatcgtggagaaagtcatactgaggtggaggagaaagggaaggggtctgcgaggtttccaacctgagaaacaacttgaaggtccatcatggcagatccaacctgcaaaggctgaggctgaggatgaatatgacttcttgaaggatggcaggaaacaggctacaggcaggttggatagagcactggctcgtgtgcgttccatgaatcagtatcctgaagcaagagaccagtaccgcaggctgcaagcctgtgttaacagcctacgagagtcccaggcgatgcaggacaggatgctggctgattcagctggcaccgatgggggtgatttcatgactgaattggaggagctatgccgggatgatggcgatgccccgatgtcgactatttcttgacatggagcttactatagatcagttaggcagtgacatgttctttaccagactagatgtaaattgttgttactaaatggtctctactcaccgttgaacaccataatataatgatatataccagctaatacatggacttctacagattatgataattgatcagtataatttgtggaattattatattttaaagcaaattaaggtttaacataataaaagtaagcgatatacaattgattcaggtaaaataaatat

SEQ ID NO: 200031 - DNA, 3305 bp, Zea Mays
cgcagcaaatattccaatccgacggcgccgtgtctcaaatcccgtgaagtgcctcgccgcgcagacaaaaaaaaaaaatccccaaatccccttgagaggcctgcaatttttagcctcctgaaccctgcgattggagccggcggtggcggcgccagcgcccgcggtcggatcgtcgcatggccgagattcgcaagtacgccatgtccaaccagcccccagatattcctcagatactactggaagctcagagtaggtggctgcggcccactgaaatctgccaaatattgtcaaactacaagaagttttccattgcgccagagccaccaaacagacctcaaagtggttcgctgtttctgtttgaccggaaaatattgagatacttccggaaggatggacacaactggagaaagaaaaaggacggaaagacagttaaagaagcacatgagaagctcaaagttggcagtgttgatgtacttcattgctattatgcccatggtgaagagaatgagaacttccaaagacgaacatattggctgcttgaagagggtttcatgaatattgttcttgttcactaccttgaaatcaagggtgccaaacaaagtttcaatcatgctaaagaagctgaagagactgcaggattatctaatgccgatagtcctgcatgctcaaactctttcgctagtcagagccaggtagcctcccgatctatggatgctgaaagcccaattagtggacagatttcggaatatgaagatgctgaaacagataattctcgagcaagctccagataccaccctttcactgagatgcagcagcctgtggatggtaccgtgatggaatatccaggcggcttcatggagtcgacactctattcttctgttgcaacattgggtaacagtctggaagatggtttgcagacatttatgtctgaggctctctacaccaacaatctcactcaaaaggaagttgatgcacttggtgcagcaggcataacatcctcgaagacagagaatgatggttatacagatcaaagtgtcaggtatccacttttaaagcagtcatcatcagacctctttaagatggagccagatggtttgaaaaaattcgacagcttttcaaggtggatgagcaatgagcttccagaggttgttgatttggatatcaagtccagctctgatgctttctggagtactactgaaaccgtgaatgttgctgatggatctagtatacctattaatgagccattggatgtatttgtagtcagcccctcactttcccaagaccagctcttcagtattattgatgtatctccaagctgggcatacaatggcacaaaaaccaaggtcttaattactggtacattcttggcaaaaaaagaagatgtggaaaattgcagctggtcttgtatgtttggagactctgaagtctctgctgaagttttagtggatggctccctgcgttgctatacaccagtacaccattctggacgagtcccattttatgtgacatgttcaaatagagtagcttgtagtgaagtgcgagaatttgagttccgtgattctgagacccattatatggatatctcagataagcatactacaggcataaatgaaatgcatttacgtatccgccttgataagttactttccctggaaccagaagactatgaaaagtatgtcttgagtaatggaaataagtctgagctgatcaacactatcagttcattaatgcttgacaataatttgtctaatctggcattaccatctgatgagaaggaattgtgcactgtacaggatcagaatcttgagaaacaggtgaaagaaaagctatattactggcttatccataagatacatgatgatggaaaaggtccaaatgtcctaggcaaggaaggacaaggtgccattcatttagtagccgcacttggttatgattgggctatcaaaccaatagttgcggcaggagtaaatataaacttcagggatattcgtggatggactgcgcttcactgggctgcatgttgtggaagggagcggacagttggtgccctgatagcaagcggagctgcatctggtgctttaacagatccaacgcagcagtatccatctggaagaactcctgctgatttagcatcagaaaatggtcacaaaggcattgctggttttcttgcagagtctgctttgacaagtcacctctcagctcttacattaaaagagtcgccaagtggcaatgtggaagaaatatgtggattaacagcagctgaaggttttgcagcatcaagttcttcccagcttgcttgtgttaattctcaggaagagtccttaaaagattcacttggtgcagttcgtaaatcaactcaagcagcagccagaatatttcaagcttttagggtggaatcattccacagaaagaaggttattgaatatggagatgatgattgtggattgtctgatgaacgcacactttcacttgtttcccttagaaacccgaaatctggacacggtgattcacattctgctgctgttcgtattcaaaacaagttcagaggatggaaaggaagaaaagagtttatgcttatccggcagaaaattgtgaagatacaggcccatgtacgtggacatcaggtaaggaaaaactatcggaaggtagtctggtctgttggcatcgtggagaaagtcatactgaggtggaggagaaagggaaggggtctgcgaggtttccaacctgagaaacaacttgaaggtccatcatggcagatccaacctgcaaaggctgaggctgaggatgaatatgacttcttgaaggatggcaggaaacaggctacaggcaggttggatagagcactggctcgtgtgcgttccatgaatcagtatcctgaagcaagagaccagtaccgcaggctgcaagcctgtgttaacagcctacgagagtcccaggcgatgcaggacaggatgctggctgattcagctggcaccgatgggggtgatttcatgactgaattggaggagctatgccgggatgatggcgatgccccgatgtcgactatttcttgacatggagcttactatagatcagttaggcagtgacatgttctttaccagactagatgtaaattgttgttactaaatggtctctactcaccgttgaacaccataatataatgatatataccagctaatacatggacttctacagattatgataattgatcagtataatttgtggaattattatattttaaagcaaattaaggtttaacataataaaagtaagcgatatacaattgattcaggtaaaataaatat

SEQ ID NO: 200032 - DNA, 2920 bp, Zea Mays
cgcagcaaatattccaatccgacggcgccgtgtctcaaatcccgtgaagtgcctcgccgcgcagacaaaaaaaaaaaatccccaaatccccttgagaggcctgcaatttttagcctcctgaaccctgcgattggagccggcggtggcggcgccagcgcccgcggtcggatcgtcgcatggccgagattcgcaagtacgccatgtccaaccagcccccagatattcctcagatactactggaagctcagagtaggtggctgcggcccactgaaatctgccaaatattgtcaaactacaagaagttttccattgcgccagagccaccaaacagacctcaaagtggttcgctgtttctgtttgaccggaaaatattgagatacttccggaaggatggacacaactggagaaagaaaaaggacggaaagacagttaaagaagcacatgagaagctcaaagttggcagtgttgatgtacttcattgctattatgcccatggtgaagagaatgagaacttccaaagacgaacatattggctgcttgaagagggtttcatgaatattgttcttgttcactaccttgaaatcaagggtgccaaacaaagtttcaatcatgctaaagaagctgaagagactgcaggattatctaatgccgatagtcctgcatgctcaaactctttcgctagtcagagccaggtagcctcccgatctatggatgctgaaagcccaattagtggacagatttcggaatatgaagatgctgaaacagataattctcgagcaagctccagataccaccctttcactgagatgcagcagcctgtggatggtaccgtgatgggtaacttctttggcgcttcatctccaagtgtttctgtaaataatctaggcaagcttttcactccaccttcaaatattatatataaatataggcatttagctcatgtttgactttctacagctgcaggttatcttggtgaaatgcaacctacgggagctaattttaccagtcattttgccactcgcaatgacatagctagtgtgttcaatgatactggctctgagttaggaggtggtcccaaaacttcaattgattcagtactgttgggtgaaccatttccagaatatccaggcggcttcatggagtcgacactctattcttctgttgcaacattgggtaacagtctggaagatggtttgcagacatttatgtctgaggctctctacaccaacaatctcactcaaaaggaagttgatgcacttggtgcagcaggcataacatcctcgaagatcaaagtgtcaggtatccacttttaaagcagtcatcatcagacctctttaagatggagccagatggtttgaaaaaattcgacagcttttcaaggtggatgagcaatgagcttccagaggttgttgatttggatatcaagtccagctctgatgctttctggagtactactgaaaccgtgaatgttgctgatggatctagtatacctattaatgagccattggatgtatttgtagtcagcccctcactttcccaagaccagctcttcagtattattgatgtatctccaagctgggcatacaatggcacaaaaaccaaggtcttaattactggtacattcttggcaaaaaaagaagatgtggaaaattgcagctggtcttgtatgtttggagactctgaagtctctgctgaagttttagtggatggctccctgcgttgctatacaccagtacaccattctggacgagtcccattttatgtgacatgttcaaatagagtagcttgtagtgaagtgcgagaatttgagttccgtgattctgagacccattatatggatatctcagataagcatactacaggcataaatgaaatgcatttacgtatccgccttgataagttactttccctggaaccagaagactatgaaaagtatgtcttgagtaatggaaataagtctgagctgatcaacactatcagttcattaatgcttgacaataatttgtctaatctggcattaccatctgatgagaaggaattgtgcactgtacaggatcagaatcttgagaaacaggtgaaagaaaagctatattactggcttatccataagatacatgatgatggaaaaggtccaaatgtcctaggcaaggaaggacaaggtgccattcatttagtagccgcacttggttatgattgggctatcaaaccaatagttgcggcaggagtaaatataaacttcagggatattcgtggatggactgcgcttcactgggctgcatgttgtggaagggagcggacagttggtgccctgatagcaagcggagctgcatctggtgctttaacagatccaacgcagcagtatccatctggaagaactcctgctgatttagcatcagaaaatggtcacaaaggcattgctggttttcttgcagagtctgctttgacaagtcacctctcagctcttacattaaaagagtcgccaagtggcaatgtggaagaaatatgtggattaacagcagctgaaggttttgcagcatcaagttcttcccagcttgcttgtgttaattctcaggaagagtccttaaaagattcacttggtgcagttcgtaaatcaactcaagcagcagccagaatatttcaagcttttagggtggaatcattccacagaaagaaggttattgaatatggagatgatgattgtggattgtctgatgaacgcacactttcacttgtttcccttagaaacccgaaatctggacacggtgattcacattctgctgctgttcgtattcaaaacaagttcagaggatggaaaggaagaaaagagtttatgcttatccggcagaaaattgtgaagatacaggcgaaaatcaaagtatgtggtggtggtggtcgtagttatttgaggcgcacttctttt

SEQ ID NO: 200033 - DNA, 2102 bp, Zea Mays
catgctgatgcgccctcccctcagttctttgcttgtgggatgagtggaaggaaggccggtcctcgctgcagaaagagggagaagacttcatctgcacgtgctgctgatgtgcattagaggatccgtgctgataatatacagctgacacccacaagatcgactggataagttcgagcctgacggcatcatgggttccggcgatttgagctcggagatggagaggacggttcttggcctgacgctgtgggtctggattgccatcggcgtggtcgcgcttctcgtggcaatcctgctgatgatctgcatttgggtggcgtcccgcctgaggaccaagagaaccatggacagcctgaggcagacgcagatccccatctactccaaggagatccccatcgaccgggtcggcgggcgcagcctggcacagacaatgcatgagcgcgagcagccgagcttgccgccgccggacaagtacgcgaaccgggagccggccggggcggctgtggggcacctggcactcagcaagtcctcggatcatgacaacatgagccaggggagctcggtttgcaatgctgaccgtgctggcactggcagcatgcactccggtgaggatgggagctcaggacctcggaggaaacccaactctcctgcggcgttcgtgtcagcttcgcccttggttggccttccggagttctcgcatcttggttggggtcactggtttactcagcgtgaccttgaacttgctaccaaccgcttctctaaggagaatgtgctcggggagggtggttatggagttgtgtaccgtggacgtctggtgaatggaactgaagtcgcaataaaaaagatctttaacaacatggggcaggcagaaaaagaattcagagtggaagttgaggctattggccatgtccgacataagaatttggttcggctgttgggatattgtgttgagggcgtaaacaggatgctagtatatgagttcgtgaacaatggtaatttagagcagtggcttcatggagctatgcatcagcgtggtgtttttagctgggaaaatcgcatgaaggttgtaacaggcactgcaaaagcgcttgcttaccttcatgaagctattgagccaaaagttgtacatcgagatataaaatcaagcaacatattgattgatgatgaatttaatggcaaagtatctgactttggattggctaaacttttgggatcagacaaaagccacattactactagagtgatgggaacatttggatatgttgcacctgaatatgctaatactggaatgttaaatgaaaagagtgacgtttacagttttggcgttctcttgttagaaactgtgacaggaaggaatcctgttgactacagccgatcttccaatgaggtcaatcttgttgaatggcttaaaacaatggtggccaatcggagggcagaggaagtggctgatccaagcttagaggctagacccagtatccgggctctcaagcgggctcttttggtggcactgaggtgtgttgatcctgactctgaaaagagacctaagatgggccaggttgttaggatgcttgagtcagaagaagtaccataccgggaggatcggagaaatcgtagaagtcgcactggaagcatggatattgagtccattgcagagggttccaactctgcggagtttggaaagaaggtagaaaggactggaagctctatatctgacagatctcaaccatgaggcctggaaatctaagctatatcaggaactgtctcagaaacgatgttaatcaccaaggtgattgctgtcctgataggggatgctggtaggtgacagaggcaaggcaggcccaggtattactgcctaagtattaggctttagttttcaggtgcagtagaagcattcttggatgaggaacctcctggtctcctcttatttgtataggtatatgttggtgcctgaggaattcctcttggtttgggtgtttaacatttgttcggttcttttatttcttgcattgttgccttcttaaatcagtttcacttctccctgatgaaatgctgaacatgaggttgtggacttgtggtcttagcgatactgcttgtcattgtttttc

SEQ ID NO: 200034 - DNA, 2183 bp, Zea Mays
attctactcttctgctctgtcagcagaccacgagacgcgcgcgcgaaactcttctctctcctttgcgcacctctttcgtcgtcgtcgtcgtcgatcttcctccggttctttgcttgtgggatgagtggaaggaaggccggtcctcgctgcagaaagagggagaagacttcatctgcacgtgctgctgatgtgcattagaggatccgtgctgataatatacagctgacacccacaagatcgactggataagttcgagcctgacggcatcatgggttccggcgatttgagctcggagatggagaggacggttcttggcctgacgctgtgggtctggattgccatcggcgtggtcgcgcttctcgtggcaatcctgctgatgatctgcatttgggtggcgtcccgcctgaggaccaagagaaccatggacagcctgaggcagacgcagatccccatctactccaaggagatccccatcgaccgggtcggcgggcgcagcctggcacagacaatgcatgagcgcgagcagccgagcttgccgccgccggacaagtacgcgaaccgggagccggccggggcggctgtggggcacctggcactcagcaagtcctcggatcatgacaacatgagccaggggagctcggtttgcaatgctgaccgtgctggcactggcagcatgcactccggtgaggatgggagctcaggacctcggaggaaacccaactctcctgcggcgttcgtgtcagcttcgcccttggttggccttccggagttctcgcatcttggttggggtcactggtttactcagcgtgaccttgaacttgctaccaaccgcttctctaaggagaatgtgctcggggagggtggttatggagttgtgtaccgtggacgtctggtgaatggaactgaagtcgcaataaaaaagatctttaacaacatggggcaggcagaaaaagaattcagagtggaagttgaggctattggccatgtccgacataagaatttggttcggctgttgggatattgtgttgagggcgtaaacaggatgctagtatatgagttcgtgaacaatggtaatttagagcagtggcttcatggagctatgcatcagcgtggtgtttttagctgggaaaatcgcatgaaggttgtaacaggcactgcaaaagcgcttgcttaccttcatgaagctattgagccaaaagttgtacatcgagatataaaatcaagcaacatattgattgatgatgaatttaatggcaaagtatctgactttggattggctaaacttttgggatcagacaaaagccacattactactagagtgatgggaacatttggatatgttgcacctgaatatgctaatactggaatgttaaatgaaaagagtgacgtttacagttttggcgttctcttgttagaaactgtgacaggaaggaatcctgttgactacagccgatcttccaatgaggtcaatcttgttgaatggcttaaaacaatggtggccaatcggagggcagaggaagtggctgatccaagcttagaggctagacccagtatccgggctctcaagcgggctcttttggtggcactgaggtgtgttgatcctgactctgaaaagagacctaagatgggccaggttgttaggatgcttgagtcagaagaagtaccataccgggaggatcggagaaatcgtagaagtcgcactggaagcatggatattgagtccattgcagagggttccaactctgcggagtttggaaagaaggtagaaaggactggaagctctatatctgacagatctcaaccatgaggcctggaaatctaagctatatcaggaactgtctcagaaacgatgttaatcaccaaggtgattgctgtcctgataggggatgctggtaggtgacagaggcaaggcaggcccaggtattactgcctaagtattaggctttagttttcaggtgcagtagaagcattcttggatgaggaacctcctggtctcctcttatttgtataggtatatgttggtgcctgaggaattcctcttggtttgggtgtttaacatttgttcggttcttttatttcttgcattgttgccttcttaaatcagtttcacttctccctgatgaaatgctgaacatgaggttgtggacttgtggtcttagcgatactgcttgtcattgtttttc

SEQ ID NO: 200035 - DNA, 2076 bp, Zea Mays
ctctctcctttgcgcacctctttcgtcgtcgtcgtcgtcgatcttcctccgggagaagacttcatctgcacgtgctgctgatgtgcattagaggatccgtgctgataatatacagctgacacccacaagatcgactggataagttcgagcctgacggcatcatgggttccggcgatttgagctcggagatggagaggacggttcttggcctgacgctgtgggtctggattgccatcggcgtggtcgcgcttctcgtggcaatcctgctgatgatctgcatttgggtggcgtcccgcctgaggaccaagagaaccatggacagcctgaggcagacgcagatccccatctactccaaggagatccccatcgaccgggtcggcgggcgcagcctggcacagacaatgcatgagcgcgagcagccgagcttgccgccgccggacaagtacgcgaaccgggagccggccggggcggctgtggggcacctggcactcagcaagtcctcggatcatgacaacatgagccaggggagctcggtttgcaatgctgaccgtgctggcactggcagcatgcactccggtgaggatgggagctcaggacctcggaggaaacccaactctcctgcggcgttcgtgtcagcttcgcccttggttggccttccggagttctcgcatcttggttggggtcactggtttactcagcgtgaccttgaacttgctaccaaccgcttctctaaggagaatgtgctcggggagggtggttatggagttgtgtaccgtggacgtctggtgaatggaactgaagtcgcaataaaaaagatctttaacaacatggggcaggcagaaaaagaattcagagtggaagttgaggctattggccatgtccgacataagaatttggttcggctgttgggatattgtgttgagggcgtaaacaggatgctagtatatgagttcgtgaacaatggtaatttagagcagtggcttcatggagctatgcatcagcgtggtgtttttagctgggaaaatcgcatgaaggttgtaacaggcactgcaaaagcgcttgcttaccttcatgaagctattgagccaaaagttgtacatcgagatataaaatcaagcaacatattgattgatgatgaatttaatggcaaagtatctgactttggattggctaaacttttgggatcagacaaaagccacattactactagagtgatgggaacatttggatatgttgcacctgaatatgctaatactggaatgttaaatgaaaagagtgacgtttacagttttggcgttctcttgttagaaactgtgacaggaaggaatcctgttgactacagccgatcttccaatgaggtcaatcttgttgaatggcttaaaacaatggtggccaatcggagggcagaggaagtggctgatccaagcttagaggctagacccagtatccgggctctcaagcgggctcttttggtggcactgaggtgtgttgatcctgactctgaaaagagacctaagatgggccaggttgttaggatgcttgagtcagaagaagtaccataccgggaggatcggagaaatcgtagaagtcgcactggaagcatggatattgagtccattgcagagggttccaactctgcggagtttggaaagaaggtagaaaggactggaagctctatatctgacagatctcaaccatgaggcctggaaatctaagctatatcaggaactgtctcagaaacgatgttaatcaccaaggtgattgctgtcctgataggggatgctggtaggtgacagaggcaaggcaggcccaggtattactgcctaagtattaggctttagttttcaggtgcagtagaagcattcttggatgaggaacctcctggtctcctcttatttgtataggtatatgttggtgcctgaggaattcctcttggtttgggtgtttaacatttgttcggttcttttatttcttgcattgttgccttcttaaatcagtttcacttctccctgatgaaatgctgaacatgaggttgtggacttgtggtcttagcgatactgcttgtcattgtttttc

SEQ ID NO: 200036 - DNA, 2817 bp, Zea Mays
tcgcttgctgggcattggctaaccgtactaaccgtagatcgcagtacatttcctgaatccgagcgatcgctgcttttctcgtttctactttcttctacctcccgattcgctggcctctcccgaccctgccccgcctcatcactccccatcccaccgacacacggcgtgtcaggtgtcacgcgcctccgctaaaaccctagccccacccaggcctgatggctgctccgcggcagccgcacccaccggcagcggaggagggagccgcgccggcgggtcccctgcccgccgccgcgccaggtccgcgtccgtacgacgtgacggtcgcggcaacggagctccggccggtggactgcaatctcgccgcgctctgtgaccacgttcaggcggagggcttcggctccggggccttctccgacctcgtcgtggaggccatgggcgccacctaccgcctccatcgcctcatcctctcccgcagcgcctacttcaggaatatgctacatggtccttggagagagtcgggagcacccacagtggttttgcacatagatgatgccaatgtcgattcagatgcaattgcaattgcgctcgcatatctttatgggcaaccccccaagcttactgatagcaatgcattccgagtgcttgcagctgcatcatttctggatcttcaggacttatgtacaatatgtacagattttatcatttccgagctctggacatcaaactttttacaataccagttgtttgctgagagtcaagattatgggagccatggagaacgtgttaggaacgcttgctggggttatctttgtcaaagtgccacaatggaattacgagaggtgctaccaaagctttcttcacaaactttgcatgctcttcttacatctgacgaattatgggtacctaacgaggagaaaagaatggtgaagctcccaagagaatggagattgattgttctaccggaggaccatcaggagaaagcacttcatatcaatttaatgaaaataactggatttctagtgagcaaactgcaaataattatttctcaagaacttccagtagtgttgttgttcctactgagtggggaaggcccaatgcaccactttggggtggcagggtcgttggacggcggcaaattagatacattagaggaagctcttgtctatctactgatgaatataatgcttttatgaatatatttgagagaggttctcttctctactgcaatatgtcctttgatgcactgctaagtgttcgaaagcaactcgaagaatttggattcccttgtaaagctgtcaatgatagtctatggctacagatgcttctgtgtcacagggtgcaagcgattgttgctgatacttgcaggaattgttgccttatgaatagttcttgtgcttgcaagcaagcatatgtgagctcgcatacacattacaggcaggagcatgacaggagcagtgcctccgacaacataggtaatgtctaccttgcggatggccagggtgatgggaatggtgtacttgggcctgtccgtgttaatgtaagaggagcagtcgatggacttgctggtattgggagagggaactcaaatgtgcctggtgcagcttgggctcctacacgatatgtcttctcccgtgtcccttatgggcttggttcaagaaatggccagcaatttgccattgatgaatcagaacctagaattgaccgcaatggagatatttcagcagatggtctgactgcattggttaaccttagccaagaaaacaatgctgctcatctgcaggatcaaagtctatttgagacagggatgcagacaagatatcgcagtgttccatctgtttccactccaggtggttcttctgtccagatgcaggagtcaaaggagcatgaacttggatcagattgggaaaccacaaaggatgcaactatatcattagacatgaaaacacctcttagccattttccacctttccgctttggggttgagttcgaggatgtgcacaggcttgctgatggtcaggtgaaacattcgactgaagtgttttatgcaggctctctatggaaggtgagtgtccagccattcaatgatgaggatcctcatgggcgacgcacccttggactatttctccaccgacgcaaggctgagttgttagatcccttgaggaaggctcacttgtacgttgacccccgggaaaaggtcactgctcggtatcagctcatctgtccatcaaagagagaggtcatgatatttggaagcctgaagcaggctgggacgctgctaccaaaagcgccgaagggctggggctggcgcactgctatactatttgatgagcttgctgatcttctccagggtggtgccctgcgaattgctgcagtggtccagcttgtctagattagttgcagaaaacaactgcttgcaaggatggtgatagcacagcagtttgtgtaattgatatactccctccgtcctaaaatatagttttttctggtccttttttccgtccacattcgaacaaatgataatgaatagacatacatacaaactacattcataaattaagttaagtagtcaatgcttgtttagtgtaaaacgaattatattttaggacggggtgagtatgtaagaactcaatctgtcatgtactcgttgtcatgtactcgtgctctgaaatattgtataatctatagcggtttgctgtttggtatataaaagagaatatatcagatgcaaaccaaccacttgtacaaaccgtgtaaaccaacatattgatggaggtgggaggacatattgaaaatatatcagggaaggtaaaagtgccg

SEQ ID NO: 200037 - DNA, 3019 bp, Zea Mays
ggagatgtcgcttgctgggcattggctaaccgtactaaccgtagatcgcagtacatttcctgaatccgagcgatcgctgcttttctcgtttctactttcttctacctcccgattcgctggcctctcccgaccctgccccgcctcatcactccccatcccaccgacacacggcgtgtcaggtgtcacgcgcctccgctaaaaccctagccccacccaggcctgatggctgctccgcggcagccgcacccaccggcagcggaggagggagccgcgccggcgggtcccctgcccgccgccgcgccaggtccgcgtccgtacgacgtgacggtcgcggcaacggagctccggccggtggactgcaatctcgccgcgctctgtgaccacgttcaggcggagggcttcggctccggggccttctccgacctcgtcgtggaggccatgggcgccacctaccgcctccatcgcctcatcctctcccgcagcgcctacttcaggaatatgctacatggtccttggagagagtcgggagcacccacagtggttttgcacatagatgatgccaatgtcgattcagatgcaattgcaattgcgctcgcatatctttatgggcaaccccccaagcttactgatagcaatgcattccgagtgcttgcagctgcatcatttctggatcttcaggacttatgtacaatatgtacagattttatcatttccgagctctggacatcaaactttttacaataccagttgtttgctgagagtcaagattatgggagccatggagaacgtgttaggaacgcttgctggggttatctttgtcaaagtgccacaatggaattacgagaggtgctaccaaagctttcttcacaaactttgcatgctcttcttacatctgacgaattatgggtacctaacgaggagaaaaggttgctatgtgtgagatacaagttagtggtaatgaaacaaatttaccaagtgctgatcgatccatgaggaaggggaagactccaatgaatgaatctggggaggaactgctaatggactctgaattgcagaacttgaagttgcatgataacttggggaatgaaatttcccataacattattgctatttcagatatgaatggtgaagctcccaagagaatggagattgattgttctaccggaggaccatcaggagaaagcacttcatatcaatttaatgaaaataactggatttctagtgagcaaactgcaaataattatttctcaagaacttccagtagtgttgttgttcctactgagtggggaaggcccaatgcaccactttggggtggcagggtcgttggacggcggcaaattagatacattagaggaagctcttgtctatctactgatgaatataatgcttttatgaatatatttgagagaggttctcttctctactgcaatatgtcctttgatgcactgctaagtgttcgaaagcaactcgaagaatttggattcccttgtaaagctgtcaatgatagtctatggctacagatgcttctgtgtcacagggtgcaagcgattgttgctgatacttgcaggaattgttgccttatgaatagttcttgtgcttgcaagcaagcatatgtgagctcgcatacacattacaggcaggagcatgacaggagcagtgcctccgacaacataggtaatgtctaccttgcggatggccagggtgatgggaatggtgtacttgggcctgtccgtgttaatgtaagaggagcagtcgatggacttgctggtattgggagagggaactcaaatgtgcctggtgcagcttgggctcctacacgatatgtcttctcccgtgtcccttatgggcttggttcaagaaatggccagcaatttgccattgatgaatcagaacctagaattgaccgcaatggagatatttcagcagatggtctgactgcattggttaaccttagccaagaaaacaatgctgctcatctgcaggatcaaagtctatttgagacagggatgcagacaagatatcgcagtgttccatctgtttccactccaggtggttcttctgtccagatgcaggagtcaaaggagcatgaacttggatcagattgggaaaccacaaaggatgcaactatatcattagacatgaaaacacctcttagccattttccacctttccgctttggggttgagttcgaggatgtgcacaggcttgctgatggtcaggtgaaacattcgactgaagtgttttatgcaggctctctatggaaggtgagtgtccagccattcaatgatgaggatcctcatgggcgacgcacccttggactatttctccaccgacgcaaggctgagttgttagatcccttgaggaaggctcacttgtacgttgacccccgggaaaaggtcactgctcggtatcagctcatctgtccatcaaagagagaggtcatgatatttggaagcctgaagcaggctgggacgctgctaccaaaagcgccgaagggctggggctggcgcactgctatactatttgatgagcttgctgatcttctccagggtggtgccctgcgaattgctgcagtggtccagcttgtctagattagttgcagaaaacaactgcttgcaaggatggtgatagcacagcagtttgtgtaattgatatactccctccgtcctaaaatatagttttttctggtccttttttccgtccacattcgaacaaatgataatgaatagacatacatacaaactacattcataaattaagttaagtagtcaatgcttgtttagtgtaaaacgaattatattttaggacggggtgagtatgtaagaactcaatctgtcatgtactcgttgtcatgtactcgtgctctgaaatattgtataatctatagcggtttgctgtttggtatataaaagagaatatatcagatgcaaaccaaccacttgtacaaaccgtgtaaaccaacatattgatggaggtgggaggacatattgaaaatatatcagggaaggtaaaagtgccg

SEQ ID NO: 200038 - DNA, 3016 bp, Zea Mays
caggtctggaggagatgtcgcttgctgggcattggctaaccgtactaaccgtagatcgcagtacatttcctgaatccgagcgatcgctgcttttctcgtttctactttcttctacctcccgattcgctggcctctcccgaccctgccccgcctcatcactccccatcccaccgacacacggcgtgtcaggtgtcacgcgcctccgctaaaaccctagccccacccaggcctgatggctgctccgcggcagccgcacccaccggcagcggaggagggagccgcgccggcgggtcccctgcccgccgccgcgccaggtccgcgtccgtacgacgtgacggtcgcggcaacggagctccggccggtggactgcaatctcgccgcgctctgtgaccacgttcaggcggagggcttcggctccggggccttctccgacctcgtcgtggaggccatgggcgccacctaccgcctccatcgcctcatcctctcccgcagcgcctacttcaggaatatgctacatggtccttggagagagtcgggagcacccacagtggttttgcacatagatgatgccaatgtcgattcagatgcaattgcaattgcgctcgcatatctttatgggcaaccccccaagcttactgatagcaatgcattccgagtgcttgcagctgcatcatttctggatcttcaggacttatgtacaatatgtacagattttatcatttccgagctctggacatcaaactttttacaataccagttgtttgctgagagtcaagattatgggagccatggagaacgtgttaggaacgcttgctggggttatctttgtcaaagtgccacaatggaattacgagaggtgctaccaaagctttcttcacaaactttgcatgctcttcttacatctgacgaattatgggtacctaacgaggagaaaaggtttgaactagcattacttactctacttgcaaaggttgctatgtgtgagatacaagttagtggtaatgaaacaaatttaccaagtgctgatcgatccatgaggaaggggaagactccaatgaatgaatctggggaggaactgctaatggactctgaattgcagaacttgaagttgcatgataacttggggaatgaaatttcccataacattattgctatttcagatatgaatggtgaagctcccaagagaatggagattgattgttctaccggaggaccatcaggagaaagcacttcatatcaatttaatgaaaataactggatttctagtgagcaaactgcaaataattatttctcaagaacttccagtagtgttgttgttcctactgagtggggaaggcccaatgcaccactttggggtggcagggtcgttggacggcggcaaattagatacattagaggaagctcttgtctatctactgatgaatataatgcttttatgaatatatttgagagaggttctcttctctactgcaatatgtcctttgatgcactgctaagtgttcgaaagcaactcgaagaatttggattcccttgtaaagctgtcaatgatagtctatggctacaggaattgttgccttatgaatagttcttgtgcttgcaagcaagcatatgtgagctcgcatacacattacaggcaggagcatgacaggagcagtgcctccgacaacataggtaatgtctaccttgcggatggccagggtgatgggaatggtgtacttgggcctgtccgtgttaatgtaagaggagcagtcgatggacttgctggtattgggagagggaactcaaatgtgcctggtgcagcttgggctcctacacgatatgtcttctcccgtgtcccttatgggcttggttcaagaaatggccagcaatttgccattgatgaatcagaacctagaattgaccgcaatggagatatttcagcagatggtctgactgcattggttaaccttagccaagaaaacaatgctgctcatctgcaggatcaaagtctatttgagacagggatgcagacaagatatcgcagtgttccatctgtttccactccaggtggttcttctgtccagatgcaggagtcaaaggagcatgaacttggatcagattgggaaaccacaaaggatgcaactatatcattagacatgaaaacacctcttagccattttccacctttccgctttggggttgagttcgaggatgtgcacaggcttgctgatggtcaggtgaaacattcgactgaagtgttttatgcaggctctctatggaaggtgagtgtccagccattcaatgatgaggatcctcatgggcgacgcacccttggactatttctccaccgacgcaaggctgagttgttagatcccttgaggaaggctcacttgtacgttgacccccgggaaaaggtcactgctcggtatcagctcatctgtccatcaaagagagaggtcatgatatttggaagcctgaagcaggctgggacgctgctaccaaaagcgccgaagggctggggctggcgcactgctatactatttgatgagcttgctgatcttctccagggtggtgccctgcgaattgctgcagtggtccagcttgtctagattagttgcagaaaacaactgcttgcaaggatggtgatagcacagcagtttgtgtaattgatatactccctccgtcctaaaatatagttttttctggtccttttttccgtccacattcgaacaaatgataatgaatagacatacatacaaactacattcataaattaagttaagtagtcaatgcttgtttagtgtaaaacgaattatattttaggacggggtgagtatgtaagaactcaatctgtcatgtactcgttgtcatgtactcgtgctctgaaatattgtataatctatagcggtttgctgtttggtatataaaagagaatatatcagatgcaaaccaaccacttgtacaaaccgtgtaaaccaacatattgatggaggtgggaggacatattgaaaatatatcagggaaggtaaaagtgccg

SEQ ID NO: 200039 - DNA, 3046 bp, Zea Mays
caggtctggaggagatgtcgcttgctgggcattggctaaccgtactaaccgtagatcgcagtacatttcctgaatccgagcgatcgctgcttttctcgtttctactttcttctacctcccgattcgctggcctctcccgaccctgccccgcctcatcactccccatcccaccgacacacggcgtgtcaggtgtcacgcgcctccgctaaaaccctagccccacccaggcctgatggctgctccgcggcagccgcacccaccggcagcggaggagggagccgcgccggcgggtcccctgcccgccgccgcgccaggtccgcgtccgtacgacgtgacggtcgcggcaacggagctccggccggtggactgcaatctcgccgcgctctgtgaccacgttcaggcggagggcttcggctccggggccttctccgacctcgtcgtggaggccatgggcgccacctaccgcctccatcgcctcatcctctcccgcagcgcctacttcaggaatatgctacatggtccttggagagagtcgggagcacccacagtggttttgcacatagatgatgccaatgtcgattcagatgcaattgcaattgcgctcgcatatctttatgggcaaccccccaagcttactgatagcaatgcattccgagtgcttgcagctgcatcatttctggatcttcaggacttatgtacaatatgtacagattttatcatttccgagctctggacatcaaactttttacaataccagttgtttgctgagagtcaagattatgggagccatggagaacgtgttaggaacgcttgctggggttatctttgtcaaagtgccacaatggaattacgagaggtgctaccaaagctttcttcacaaactttgcatgctcttcttacatctgacgaattatgggtacctaacgaggagaaaaggtttgaactagcattacttactctacttgcaaaggttgctatgtgtgagatacaagttagtggtaatgaaacaaatttaccaagtgctgatcgatccatgaggaaggggaagactccaatgaatgaatctggggaggaactgctaatggactctgaattgcagaacttgaagttgcatgataacttggggaatgaaatttcccataacattattgctatttcagatatgaatggtgaagctcccaagagaatggagattgattgttctaccggaggaccatcaggagaaagcacttcatatcaatttaatgaaaataactggatttctagtgagcaaactgcaaataattatttctcaagaacttccagtagtgttgttgttcctactgagtggggaaggcccaatgcaccactttggggtggcagggtcgttggacggcggcaaattagatacattagaggaagctcttgtctatctactgatgaatataatgcttttatgaatatatttgagagaggttctcttctctactgcaatatgtcctttgatgcactgctaagtgttcgaaagcaactcgaagaatttggattcccttgtaaagctgtcaatgatagtctatggctacagggtgcaagcgattgttgctgatacttgcaggaattgttgccttatgaatagttcttgtgcttgcaagcaagcatatgtgagctcgcatacacattacaggcaggagcatgacaggagcagtgcctccgacaacataggtaatgtctaccttgcggatggccagggtgatgggaatggtgtacttgggcctgtccgtgttaatgtaagaggagcagtcgatggacttgctggtattgggagagggaactcaaatgtgcctggtgcagcttgggctcctacacgatatgtcttctcccgtgtcccttatgggcttggttcaagaaatggccagcaatttgccattgatgaatcagaacctagaattgaccgcaatggagatatttcagcagatggtctgactgcattggttaaccttagccaagaaaacaatgctgctcatctgcaggatcaaagtctatttgagacagggatgcagacaagatatcgcagtgttccatctgtttccactccaggtggttcttctgtccagatgcaggagtcaaaggagcatgaacttggatcagattgggaaaccacaaaggatgcaactatatcattagacatgaaaacacctcttagccattttccacctttccgctttggggttgagttcgaggatgtgcacaggcttgctgatggtcaggtgaaacattcgactgaagtgttttatgcaggctctctatggaaggtgagtgtccagccattcaatgatgaggatcctcatgggcgacgcacccttggactatttctccaccgacgcaaggctgagttgttagatcccttgaggaaggctcacttgtacgttgacccccgggaaaaggtcactgctcggtatcagctcatctgtccatcaaagagagaggtcatgatatttggaagcctgaagcaggctgggacgctgctaccaaaagcgccgaagggctggggctggcgcactgctatactatttgatgagcttgctgatcttctccagggtggtgccctgcgaattgctgcagtggtccagcttgtctagattagttgcagaaaacaactgcttgcaaggatggtgatagcacagcagtttgtgtaattgatatactccctccgtcctaaaatatagttttttctggtccttttttccgtccacattcgaacaaatgataatgaatagacatacatacaaactacattcataaattaagttaagtagtcaatgcttgtttagtgtaaaacgaattatattttaggacggggtgagtatgtaagaactcaatctgtcatgtactcgttgtcatgtactcgtgctctgaaatattgtataatctatagcggtttgctgtttggtatataaaagagaatatatcagatgcaaaccaaccacttgtacaaaccgtgtaaaccaacatattgatggaggtgggaggacatattgaaaatatatcagggaaggtaaaagtgccg

SEQ ID NO: 200040 - DNA, 1072 bp, Zea Mays
atggagtggccaccgccgtcgacgtcaccatcgccgtcgctggtggtgcgcagccccaggcagacagtcagcctgatccgcaaccggcgaccccatcgtgactgggccccctcatcgaggtctccctctttcgccgcccgtgaccatggccccaagccgtcggaggtgtacggattcgttggatccatcaccaccgtcattgccaccgccgtgtacctcgcctgggcatacacgcccgagcccgtcctccggtcactcggcatcacctactaccctagcttttccttcgttcaggtactgggcactggcggtgccatcgttcgtggttgtgaccgtggtgccgtccatgggcatctacatgggcctcaacttcgctgccactcctcctccgacttccttcagcactatcttcgatgaaaagagtagggagcacacagccttttctcctgcaactgaggatgagaggcccatcgaacccatctcagacatcggtattgatcggatcaacagtcttatgtatggtgatagatgatttcccccggtggaatatgagtttaccatggatcgtcggattggaaacagatgcaaacgcgaaggaagatttccatgtcagttgaactttgtttggcagtccagctaagagttatcggtactcgctatgtcgcgcgcgttcgacgactactatattaaggattatgctgtcatctcgcgccggatgtgacgtagaggaggatcgacatcaatgaccacttgtcatcgtcgggtagcttttatgtcggtctgtctttaattctcttcgcaaacacacacttgtctttttgtttaagcaaacatgtatggtggtgcgtgtctgatgactgacgatgtacgagcgaacttctaccggcaggtgtcacacgtgctctccaatgatgagaccatacaaattgtggtatatatcaaagtctacatgatacagatggttgtattgtagtagtgaaacagctaaattaaaataacaaaatttatgtatgaccaggatcacaaatggattatgaaacattttcttataacaatataagatgaattttat

SEQ ID NO: 200041 - DNA, 409 bp, Zea Mays
gtttagatcaaatgtcgactcggtgatcgatagaggtgcttgaaatggtgcgggccttgcaaagtgatggctccgaaattccaggagatgtctgagaagaacctggatgttgtgttcctgaagctcgactgcaaccaggacaacaagccgcttgcgaaggagctgggcataaaggttgtgccaacgttcaagatcctcaagggtgggaaggtcgtgaaggaggtgaccggcgccaagatcgacgagctagcgcaagccatcgacacagtcaagtcagactgacaaagaaagcaggactgcttcaagcgcaagcggtgcaaatgaggaccagtattcttttttttcttcagcaatatcagaatgtatccctaaggggaaaagtcaccattagccaaactagacattattg

SEQ ID NO: 200042 - DNA, 2735 bp, Zea Mays
gattaaacaattctgaaacacaaagtaggggcctcttcgcaaatcccaccagcaccaccgccttcgcctccgaccgcctcccagatccgctcgcccggccgccgtcgtcttcctggtccgcctctgcggcagtgagattcctcgccgccccgccctggattccgtcgagaggatcgtcgaggacttcgcgatggacctcgccatcaaccccttctcctccggcacccgccttcgggacatgatacgtgcgatacgcgcgtgcaagacggcagcggaggagcgtgccgtggtgcggcgggagtgcgcggcgatacgggccgccatcagcgagggcgaccaggactaccggcatcggaacatggccaagcttatgttcatccacatgctcggttaccccacacacttcgggcagatggagtgcctcaagcttattgctgcggcgggcttccccgagaagcgcatcggctatctaggactcatgcttctgctcgacgagcggcaggaggtcctcatgctcgtcaccaactctctcaagcaagatcttaaccactcaaaccagttcattgttgggcttgcgctctgtgcccttggcaacatatgttctgctgaaatggcacgcgatctggctcctgaagtggagagactgttgcaaaatagggaccctaatacaaagaagaaggctgctttatgctctataaggattgtgcgaaaagttccagacttggcggaaaatttcatgagtgctgctgcatcattactgaaggaaaaacatcatggtgttctgatatctgccgttcagctttgcatggaactatgtaaagccagccatgaagcattggagtacttgaggaagaattgccttgaaggactggtccgaatactgagagatgtctccaacagttcatatgctcctgaatacgacatcggtggcatcacagatccattcttacatatccgagtgcttaaactcatgcgaatactgggtcaaggagatgcagattgcagcgagtatatcaatgatattcttgctcaggtttcaacaaaaactgagtcaaataagaatgctggaaatgctattttatatgaatgcgtggagacaataatgggcattgaagctacaagtggtttacgtgtgttggcaattaatattttgggtcgttttttgtccaaccgtgataacaacataagatatgttgccctaaacatgcttatgaaggccattgccgtggacacacaagcggtgcagaggcacagggcaacaattttagagtgcgtcaaggatgcagatgtctctattcgtaaaagagccctagaacttgtttatctacttgtcaatgatacaaatgtaaagccattgactaaggaacttgttgattaccttgaagtgagtgatcaagatttcaaggaagacctcactgctaaaatatgctcaatagttgaaaagttttccctggacaagctatggtacttagaccagatgttcagagttttgtctctggctggtaattatgtaaaggatgatgtatggcatgctcttatagttctaatgagtaatgcatctgaacttcaaggatattcaatcaggtcattatataaggcattgcaagcatctggtgaacaggaaagtttagttagggtggccatttggtgcattggtgaatatggagaaatgctggtcaacaatcttagtatgttagacatggaggaaccgatcacggtaactgaatctgatgctgtggatgccgtagagattgctcttcagcgttactcggcggatgttactaccagggctatgtgtcttgtctctcttttgaagctttcttcccggtttccaccaacatcagagagaataaaagaaatagttgcgcaaaataaagggaatactgtgcttgaattgcagcaaagatctattgaattcagttccattatacaaagacatcagtcgataaaatcatctttgcttgaacgtatgcctgcattggatgaagcaaattatttggtgaagagagctgcttctacacaggctgcagtttcatctgtaaattctgctcctgcagtcacttctggaggcccacttaagcttccaaatggcgtagcaaagccaccaccagctcctttagctgatttgcttgatttgggttctgatgatgctccagtgactacttcggcccctactacatcacctaatgattttctacaggatctgttgggcatcggtttgactgattcgtctcctataggtggagctccgtctacaagcactgacattctgatggatcttctatctattggttcatctcctgtacaaaatggcccaccaacgtcaaactttagccttcctggcatagagactaaacctccccctgttacacctcaagttgtggatcttcttgatggtttgtcctcaagcacatctcttcctgatgagaatgcagcttacccgacaatcacagcattccagagtgcaaccttgaggatcacattcagtttcaaaaagcaacctggaaaacctcaggagactacaattaatgcttctttcacaaatttagcaactactgcattaacagatttcgtcttccaggcagccgtgccaaagttcatccagttgcgtttggacccagctagcagcagcactcttcctgccagtggaaatgtgtcagtcacacaaagcctcagtgtcactaacaaccaacatgggcagtactataaagatcgtgtaagactatctctagcag

SEQ ID NO: 200043 - DNA, 2663 bp, Zea Mays
cacgtccccacccgcaccgagaaggagccctaccaatctcgcccccgtttcgtatcagctgcattccaattccattcgtggtccctgccctgctcagctcatcagaacacagaaggcaggccacagcccgcagattgtgcgaccgcagagtttggatgctcctgcctatgcaagcaagatgtcaaccaccagagatattgtttagtgctgggcaagttatgcaattttggatcataaattacacagggacaagataattatggaccgcgcagacacatcaggctttgtcagtggtggttgctttggtactacactcctgctgatattcttccattttgtctattctacgatccatgtctgaaagaccctcaggaaccctgcagctgtctgggcagaaatatcatcaggcccctgttctttgagatctctggtgttttatctcattttgttttccaccattgttatattgtctcaactgtgatggataacggcttcatggacatccctcatccgcctctggtgaatgacccctttgtgttagtgggatgcccagcgccagcctccacgatggagaacatgggccaaagcacaatctgtatggatggcctgaacccagcaatggttagttgcagccatgttaatggaaacacacatataatgaacggcttaacagcaagagatgatggcagcaggttactccttggtttgggcccaacaccgaatttttattctgcagtgtccacgggctcaaaacaagctcagagattgtctggccagagttcaacttccattgattcagggatgctgaagcttggccttcagacggatgacagggaagcaattcaatatctgcaacaagcaccgaatggagcactccattctttagatattgttgacgaggcttcaacatctgctgctgtaaggaacatgggtggttacatgccatccctactctttgctccctgctccaattctattgccaatgagacacaagtagaaaaccaagattctctagacctcacgcacagcaccagcaacagtcagcaccttcaacatgacctccagctcagccccgaaccttctgcaacgaccgagtcatcatttggtatgagttctgatgttgtcactgcaacaactacatcagagcgtagccattcccgacatcctaagaaatgcaggtttaagggatgttccaaaggtgcaagaggagcatcaggattgtgtattgctcacggaggtgggcagagatgtcataaacctggatgccataaaggtgccgagagcagctccgcgtactgcaaagcccacggtggcggtcgtcggtgtgaggagcttggttgtaccaaaagcgcggaaggaaaaacagattattgcatcgctcatggtggaggctgccgctgccaacatcctggctgtcctaaagctgcccggggtaagtctgggcggtgcatcaagcacggtggtgggaagaggtgctcggttaaaggttgcatcaggagcgctgaggggaaggctgggctgtgcatttctcatggcggcggccgacggtgccagtatcctgattgcggcaagggggctcagggcagcacattgtactgcaaggggcatggtggcggcaagaggtgcatctttgatggttgcagcaaaggcgcagagggtagcacacctctgtgcaaagcacacggtggtgggaaacgatgcatgtttgaaggaggcggcgtctgtgcaaaaagcgtgcacggggctactgaatactgcgtggtgcatggaggagggaagcgctgttccgtgcccggctgcaccaaaagtgcccgtggccgcactgactgctgtgtgaagcacggtggcggcaagcggtgcaaggttgacagctgtggcaagagcgcccaggggagcacgcacttctgcaaagcccatggcggagggaagcggtgcacatggagcacaggctgcgaaaagttctcccgtggcaagagtggcttctgtgcagcacatggtaccttgatggccaggcagcgagaagaagaggtggtgaagaatgtagggagcatgattggaccaggtctcttcagcggcattgtggcgtcatctgccaccgcagcaagcagcatgacgaacgagcactcggcctctggtgtcagcaccgcttccgactgtgacggcacggtgaggagccaatcaatgattcctccgctggtgctggttcctcgctctatgatgccttcatggtcgactgagcctgtagatggaggcagagagggaggtcatgttgttcctgaggggagggtccatggtggtggcctactgtcacttctcggtggcagcttcagggacgccgacgtggaaaagctttgaagattttgtcagtttgtttgtacataaacaggccgcgttcccgcctatagaattgttattgtgccttttcttgtctagataaacatttcaaccttcatgtaccggttaaatcaatactggtttagtccattgtaaagtggtgactgtcaattgtcgtgaacacttttagcttgttggttcggttcggttgtagtctgtctgtttgtgcgtattcttaagaaactcgtctggactttctattgcaaattgtcgaatgtcaattttctgaaatctggaatttttcagcatataggtccaggttagtctgt

SEQ ID NO: 200044 - DNA, 1604 bp, Zea Mays
aatctaaaatatttcgttcatgacactggccattggatcgtcttacaaagtctaaggaagcagcgcgggcgtgaagcggaaaggacggttcagatggcactggcaaaagcttccttggtggatgatctgcaaaacaaaaaccaagagttgatgaaacagattgagatatgccaggaagagaacaaaatcttggatagaatgcaccgccagaaagttgctgaggttgaaaagctcacgcagactgtcagagagctagaagaatctgttcttgctggtggtgcagccgcaaatgctgtcagagactaccagcggaaagttcaggagatgaatgaggaaatgaaaactcttgatcgtgagctagctcgtgcaaaggtttcagcaaatagggttgcagtagtggtggcaaatgagtggaaagatggcgatgataaagtaatgcctgttaaacgatggctcgaggagcgaaggattctgcaaggagaaatgcagcaactccgggacaaacttgctattgcagaaagggctgcaagatcagaagctcaactgaaagagaagttccagctacgacttaaggtactcgaggaaggattgagaatgtctacatcgagaaccaatgtcagtggcacacgccgccagtctattggtggtgctgatggtttgtctaaggccaacggcttcctgtcaaaacgcccatcattccagatgagatcaccagtgtctaccacaacgactctagtgaaccatgcaaaaggagcgtccaagtcgtttgacggaggctgtagatcacttgaacgctataagggccatgtaaacgggaatggtgttctatatgatatgttgcaaaaggaggtcatttctctaaggaaggcgtgccacgaaaaggatcagagcctgaaagacaaggacgacgcagttgagatgttggcaaagaaagtagatactttgacaaaagctatggagtcagatgccaagaaatcgaggcgcgagctagctgctatggagaaggagctggcagctgtgcgcttggagaaagagcaggataacagggcaagacgttttggtagttcaagcggttctgccagcagttcgcagctcccacctggcaggactggtgactgggaaggaacctctcattgtcctggagaagatggcatcagcggaagagcctcttctgcctacatctcgtggtcgcagggatgaactactttgtgtctaacatctccggctagtgttttcttttcttttgttttgacgacgtgtcattcggtggtgattgctgttgtttcttttcttttggcagtttgatgatctttgttggtgctgtataggtttggtgaggcgttgctcctttttcttctttggtttgtttgttcgacatatccgtcggtctggttgtttacgatgtaaaatgtacgcactgaagagttgcttatggtttgcctgatattcccccctgtttctgtcagtgttgggcaagttgatgataaccagcatgatgaatgactcagctggctgttgtaaccatgtgccgaatgatgaagaaaccgctttgcatatgtctgatgatcaccagatgaatggagttagggcaagttcgaccgctt

SEQ ID NO: 200045 - DNA, 2213 bp, Zea Mays
caaccacgggcgcgaaacgcgaccgggtccacctgtcatccataccacggctcgccttcctaatctcgggactcgggtccgcgatgcgagccaccaagagatccacgaatatacccatcccattccccacaaggctccgtcccttcggcggcggcggcgatgtctctcccccctggcccggcggacagtggcaccggcaccggagacgactggttcctcgactgcggcatcctcgacgacctgcccgccgcggcctgcggagccttcccgtgggacgcgtccccgtcgtcttccaaccccaggtccgcccagatcgaccgaccgattcctcccttccccacgccacctcctagttccggaaggcacggatgctttgtttggcgtacggtcctggcgacaggtcccgtgaccccggcgttccgtatctttgcgatgagtatattgtggaatcgtgacgggcggatgaattgttttggggatttgggctgtgtagtagtctactagatgcatgcgcgtggaggcgtctgatccgtagaggtggtttctttacactgcggatcttccagtctgttgctcgtgctataaacctgccgaggctgcttttgtacaggttaaattagattagagttcccaaacaaaaaaaatggtttcctaaaaaaacaaggctgctgagtttgcgcgctgcaagataacttgccttggtaggtttgttctcgtgtttccgtgactgtgcttatgagttatgacagtggaacggatgtattacgtgtgactatgaccaatgatttgctcaaacgattgagatggatgttttaattgattgatggcgattgtaataccagtcttgatgataagtggtgtggctgcgagtgatgggatgccatgtgttgctcggccatggatggaaatggaatcgtgacacctgactggagagccaaagatacaacttctcatcttctcctgtcatgtatgcgctgatgctgctatgatattaattttgagagtaatttgcagtgatcttgttgtttgaccttttttttcttgctttactgaaagcggtccactccatatgctcagaattcaatgccttacatgtagctagttgtctgattactttcgtccatgaatggtttccagttaattggttgagaacagtgtggaagtgggcagctatgtaaacgccaatgatgcattcaaggagcccaatgatgtcttcaaggagcctggcagcagtaaacgtttacggtcaggatccagtgatatgccaacatctaaagcttgcagggaaagaatgaggaggaacaagctgaatgacaggtttcttgaactggggtctgcattagaacctgggaagccagtgaaagctgacaaagctgccatcctaagcgatgctactcgcatggttattcagctccgttcagaatcacagcaactgaaggagactaatggcagcctcgaagaaaagattaaagaactaaaggccgagaaggacgagcttcgcgacgagaagcagaaactgaaactggagaaggagagtctagagcaccagatgaagctgatggcatcggctccagcctacatgccccatccgaccctgatgccggcgcctttcgcccaggcgcccctagctccattccatgcccagggccaagctgcagggcagaagctgatgatgcccttcgtcggctacccagggtacccaatgtggcagttcatgccgccttcagaggtcgacacctcgaaggacagcgaggcgtgccctcctgtcgcatgatcaccttgatggggctggtcctgctcacaccatgtggattagccgcaactagttgtcgttgtcgatccattgatggggtataactgatgttcttaggctatctccagcagcctctctatcctattctctatcttactccctattttaaattttactctgtaaacagtacagtctatagtgtaagacaatgttttgcatgtttatatccacgcttggctggagatgggcatggtagtctgttggtgaccaaggaagctgtgatatctgtggcgaggtgccctgctagaggctcctttaatgggtgtacaattttcgtggtggaaagaagaatgttcgttcttgttctccatagcaacagtgtcatattatctatctatgccatatatattttatatttgacatgtttgtgatacaagcaaaatttatatttagaacagag

SEQ ID NO: 200046 - DNA, 2025 bp, Zea Mays
caaccacgggcgcgaaacgcgaccgggtccacctgtcatccataccacggctcgccttcctaatctcgggactcgggtccgcgatgcgagccaccaagagatccacgaatatacccatcccattccccacaaggctccgtcccttcggcggcggcggcgatgtctctcccccctggcccggcggacagtggcaccggcaccggagacgactggttcctcgactgcggcatcctcgacgacctgcccgccgcggcctgcggagccttcccgtgggacgcgtccccgtcgtcttccaaccccaggtccgcccagatcgaccgaccgattcctcccttccccacgccacctcctagttccggaaggcacggatgctttgtttggcgtacggtcctggcgacaggtcccgtgaccccggcgttccgtatctttgcgatgagtatattgtggaatcgtgacgggcggatgaattgttttggggatttgggctgtgtagtagtctactagatgcatgcgcgtggaggcgtctgatccgtagaggtggtttctttacactgcggatcttccagtctgttgctcgtgctataaacctgccgaggctgcttttgtacaggttaaattagattagagttcccaaacaaaaaaaatggtttcctaaaaaaacaaggctgctgagtttgcgcgctgcaagataacttgccttggtaggtttgttctcgtgtttccgtgactgtgcttatgagttatgacagtggaacggatgtattacgtgtgactatgaccaatgatttgctcaaacgattgagatggatgttttaattgattgatggcgattgtaataccagtcttgatgataagtggtgtggctgcgagtgatgggatgccatgtgttgctcggccatggatggaaatggaatcgtgacacctgactggagagccaaagatacaacttctcatcttctcctgtcattgtggaagtgggcagctatgtaaacgccaatgatgcattcaaggagcccaatgatgtcttcaaggagcctggcagcagtaaacgtttacggtcaggatccagtgatatgccaacatctaaagcttgcagggaaagaatgaggaggaacaagctgaatgacaggtttcttgaactggggtctgcattagaacctgggaagccagtgaaagctgacaaagctgccatcctaagcgatgctactcgcatggttattcagctccgttcagaatcacagcaactgaaggagactaatggcagcctcgaagaaaagattaaagaactaaaggccgagaaggacgagcttcgcgacgagaagcagaaactgaaactggagaaggagagtctagagcaccagatgaagctgatggcatcggctccagcctacatgccccatccgaccctgatgccggcgcctttcgcccaggcgcccctagctccattccatgcccagggccaagctgcagggcagaagctgatgatgcccttcgtcggctacccagggtacccaatgtggcagttcatgccgccttcagaggtcgacacctcgaaggacagcgaggcgtgccctcctgtcgcatgatcaccttgatggggctggtcctgctcacaccatgtggattagccgcaactagttgtcgttgtcgatccattgatggggtataactgatgttcttaggctatctccagcagcctctctatcctattctctatcttactccctattttaaattttactctgtaaacagtacagtctatagtgtaagacaatgttttgcatgtttatatccacgcttggctggagatgggcatggtagtctgttggtgaccaaggaagctgtgatatctgtggcgaggtgccctgctagaggctcctttaatgggtgtacaattttcgtggtggaaagaagaatgttcgttcttgttctccatagcaacagtgtcatattatctatctatgccatatatattttatatttgacatgtttgtgatacaagcaaaatttatatttagaacagag

SEQ ID NO: 200047 - DNA, 1051 bp, Zea Mays
cgtccatgaatggtttccagttaattggttgagaacagtgtggaagtgggcagctatgtaaacgccaatgatgcattcaaggagcccaatgatgtcttcaaggagcctggcagcagtaaacgggaaagaatgaggaggaacaagctgaatgacaggtttcttgaactggggtctgcattagaacctgggaagccagtgaaagctgacaaagctgccatcctaagcgatgctactcgcatggttattcagctccgttcagaatcacagcaactgaaggagactaatggcagcctcgaagaaaagattaaagaactaaaggccgagaaggacgagcttcgcgacgagaagcagaaactgaaactggagaaggagagtctagagcaccagatgaagctgatggcatcggctccagcctacatgccccatccgaccctgatgccggcgcctttcgcccaggcgcccctagctccattccatgcccagggccaagctgcagggcagaagctgatgatgcccttcgtcggctacccagggtacccaatgtggcagttcatgccgccttcagaggtcgacacctcgaaggacagcgaggcgtgccctcctgtcgcatgatcaccttgatggggctggtcctgctcacaccatgtggattagccgcaactagttgtcgttgtcgatccattgatggggtataactgatgttcttaggctatctccagcagcctctctatcctattctctatcttactccctattttaaattttactctgtaaacagtacagtctatagtgtaagacaatgttttgcatgtttatatccacgcttggctggagatgggcatggtagtctgttggtgaccaaggaagctgtgatatctgtggcgaggtgccctgctagaggctcctttaatgggtgtacaattttcgtggtggaaagaagaatgttcgttcttgttctccatagcaacagtgtcatattatctatctatgccatatatattttatatttgacatgtttgtgatacaagcaaaatttatatttagaacagag

SEQ ID NO: 200048 - DNA, 2537 bp, Zea Mays
aaaaagctgaaagaaaagtcggagagagagagagagagagcgagcgagcgagcgagagtggtggtggtgtgtgcgcgagcgcaacagggagagggagagcgtatttcttcttcctcaccctcctcgaggaagagagagggcagctccggagccgcacgggcgcgagcgagaagagaaaaaaaaagtccttgttgagttgttgtatcgggttctggtggtgactgttactggggtttccttgcccggttcttgatttgcgcaaggacagatttgccgtcctctcgggttccgccgtgcggtgctgaatcctccttccctgttcccttcccttaggtttggatcggggatagggatggaagtggacagaaagaagaatttgcagattggatccaaggggaaggaggttcagagcaagaatccgaggcgggaggagccgctggcatcgtcggaggtggacatggatgagccagacgctcctgagagcggtgacatgattgttgatggcaacaatggcagctccagagagagccccttgcagcccatggattccaagaattccaagggctgtgcggtcaagaagccaacatcggtgagctcagacttcggtgaggagctggacttggaccttggtggggagaagagtgggacgcagcaggagaggaagctctcaaggcaggaccgggttgagctttgccggtcgttccagcttgcagtgagctcccatgattgggagagcgccgaggggctggtaggaatggctgacgcacaagggctcaacgatgtgctgtgtgtggcagtggatgcgatttggttcttgagtgatagggatgagctgcttgctattgtggggttgatcaaaagggttgtgtctgagggcgcaaaagattttacccgtgctgcgctccggacatcattcctcgcatcgtgtgtatcagcatgtagggggcggtcgactagccttgctgatgcagtgagcttcatgggccagaaattgcatgaacgacttcaagaatcccaaggtgatgaggtattgaaagcagaagcaagtgcaaaggtgcacaggtttacagaatgggctctaaagtgtatcgggctgcattcacgtgttcgagagaacaggggcaaaggaaaccacgacactgtaattgaggttcagcttcagttgtctgctttcaagatatttcttgatcttgctgataatgagcttaccgggaaggattttacggaggcttttgatgctgcatgcttccctcttacactcttttcaaccaccttcgaccaaggatgggcatcaggaatatcagcagctgcagtacaaggccttttagagttgttggtagagggtggcgcagacaatgtgaaccaatgctttcttgaagctgcacgctatggcagcactgagcttgtgcggatcttacttcaggttgctcaaagaaacagcttggacattgatgtggacctagcccttggctttgccgcacactatgggaagatcgaaaccatgggatgcttggttgaagaaggtaatgctattggctttcttggccctttgatgcgtgctgctgaacgtgggtgcctccaagttgtggaatggtttgtcaaccacgggtgtcgagaaatggagctttgcctagcccttactgctgccacctctaatagccagattgcagttgctgcttatcttcttcctcttgtcccgcaacatgttcttgcccccctcagcattgagattatcaaggctgctggtgagaggactacgggttccctgcagggtgtggattttcttctccgctcggatttcctcaatgacccagctgccacatatgccgtggcagacagtattgcaagatgcaccgatgaagctgtggacgcaaagcttaggtctttcatgaatgagcactggagcgaggcagctttttgtgcgggattcgaatctgcacagcagcactttgttaatttcatgaggataatggaaaggggtgaatcaccaatccgcttaggggatctcccacttgagctggtgattgccatggcctacctgccgctctataaggaatgcatgaattccaatgggcgacttttgcctcaaaggcttagaggtcagcttgtggaggctgcaagcaggctcgaggaccggcaagtggaaagggatagccaaagcagagaactcttggccatcttggagcaccacataccacgattcatgatccaaacttgaaggcgatcttcggagagtatataattctggggaatggtgtgtgccttgtcgaggcatgtgtcggagtgttttactgggaccgtaatcttccatgaaaaaaatgatataagccttcggtatgtaatcctgagttttcggtgtaattcaaaacgctggtcttgtgacaacatgtcgctagttttggctagcgacttttttgatcatggcttcaaaaacaaaacgaagggagtatattcatactgtgtggagattgccttgatcgtgagatgtgacatggttctgatgaggtacaagtttgagcaactctgatagcttcgaa

SEQ ID NO: 200049 - DNA, 2522 bp, Zea Mays
cggagagagagagagagagagcgagcgagcgagcgagagtggtggtggtgtgtgcgcgagcgcaacagggagagggagagcgtatttcttcttcctcaccctcctcgaggaagagagagggcagctccggagccgcacgggcgcgagcgaggcagaagagaaaaaaaaagtccttgttgagttgttgtatcgggttctggtggtgactgttactggggtttccttgcccggttcttgatttgcgcaaggacagatttgccgtcctctcgggttccgccgtgcggtgctgaatcctccttccctgttcccttcccttaggtttggatcggggatagggatggaagtggacagaaagaagaatttgcagattggatccaaggggaaggaggttcagagcaagaatccgaggcgggaggagccgctggcatcgtcggaggtggacatggatgagccagacgctcctgagagcggtgacatgattgttgatggcaacaatggcagctccagagagagccccttgcagcccatggattccaagaattccaagggctgtgcggtcaagaagccaacatcggtgagctcagacttcggtgaggagctggacttggaccttggtggggagaagagtgggacgcagcaggagaggaagctctcaaggcaggaccgggttgagctttgccggtcgttccagcttgcagtgagctcccatgattgggagagcgccgaggggctggtaggaatggctgacgcacaagggctcaacgatgtgctgtgtgtggcagtggatgcgatttggttcttgagtgatagggatgagctgcttgctattgtggggttgatcaaaagggttgtgtctgagggcgcaaaagattttacccgtgctgcgctccggacatcattcctcgcatcgtgtgtatcagcatgtagggggcggtcgactagccttgctgatgcagtgagcttcatgggccagaaattgcatgaacgacttcaagaatcccaaggtgatgaggtattgaaagcagaagcaagtgcaaaggtgcacaggtttacagaatgggctctaaagtgtatcgggctgcattcacgtgttcgagagaacaggggcaaaggaaaccacgacactgtaattgaggttcagcttcagttgtctgctttcaagatatttcttgatcttgctgataatgagcttaccgggaaggattttacggaggcttttgatgctgcatgcttccctcttacactcttttcaaccaccttcgaccaaggatgggcatcaggaatatcagcagctgcagtacaaggccttttagagttgttggtagagggtggcgcagacaatgtgaaccaatgctttcttgaagctgcacgctatggcagcactgagcttgtgcggatcttacttcaggttgctcaaagaaacagcttggacattgatgtggacctagcccttggctttgccgcacactatgggaagatcgaaaccatgggatgcttggttgaagaaggtaatgctattggctttcttggccctttgatgcgtgctgctgaacgtgggtgcctccaagttgtggaatggtttgtcaaccacgggtgtcgagaaatggagctttgcctagcccttactgctgccacctctaatagccagattgcagttgctgcttatcttcttcctcttgtcccgcaacatgttcttgcccccctcagcattgagattatcaaggctgctggtgagaggactacgggttccctgcagggtgtggattttcttctccgctcggatttcctcaatgacccagctgccacatatgccgtggcagacagtattgcaagatgcaccgatgaagctgtggacgcaaagcttaggtctttcatgaatgagcactggagcgaggcagctttttgtgcgggattcgaatctgcacagcagcactttgttaatttcatgaggataatggaaaggggtgaatcaccaatccgcttaggggatctcccacttgagctggtgattgccatggcctacctgccgctctataaggaatgcatgaattccaatgggcgacttttgcctcaaaggcttagaggtcagcttgtggaggctgcaagcaggctcgaggaccggcaagtggaaagggatagccaaagcagagaactcttggccatcttggagcaccacataccacgattcatgatccaaacttgaaggcgatcttcggagagtatataattctggggaatggtgtgtgccttgtcgaggcatgtgtcggagtgttttactgggaccgtaatcttccatgaaaaaaatgatataagccttcggtatgtaatcctgagttttcggtgtaattcaaaacgctggtcttgtgacaacatgtcgctagttttggctagcgacttttttgatcatggcttcaaaaacaaaacgaagggagtatattcatactgtgtggagattgccttgatcgtgagatgtgacatggttctgatgaggtacaagtttgagcaactctgatagcttcgaa

SEQ ID NO: 200050 - DNA, 2628 bp, Zea Mays
accgttcacactcaactccctcgattagtaataacaggaaaaccatccgccggaggccggagggcagattctccaccaccgcctccaccccgccctcacgacgcgaatctgcggcgaacccccctctcgtattccttctcgccgccctgccccgagcgcaccgtttagaggccgccaggctccggcacccccgcccgcccgggctcgcctggggtcgggatgccctgctgcccgccgtcgctgctcggagtcggcccacggctgcgctccttcctccgcgactacgacgcgctccagtccctcgccctcgtactcatctacctccagattggttgtgcactgatcggatcacttggggcattgttcaatggggttcttgtgatcaacctggtgattggtctatttgctgttgttgcaattgagagcagtagccagagacttggtcggacatatgctgtccttctcttctttgctgtcgtccttgacgttgcttggtttatactcttctcacatgctatctggactattaatcctgatgataagtatggtcaactgtttgttttctcactcagacttgcattgtggatgcaaatcattgggttttcagtcagatgatatattagggggttcaatctatgatccttcttactactcgtcactgttcgaggatgttcgaaacaatgcatgcaatcatcaggtattaccttctagtttctggcacactgttcttttcattcaaattcaatgtttaacatattaggggaaagaataggatgaccaaatacctctgtccattttgtgtttctttctatctcaataaatttgtcttgtctagaccacctaccttcaatctgtgacaaataatttaagaatctgaatgtgctatcagctcactgtatcacatagcaaaatctttagtgtacattttctgatgtgtttgtttgactgaagtaccaacgagatagttgagagtataaagtatctattcaattattctggaaatactgacctacttaatttcactttttctaagtagctcttttttctatgaagacgtttgcatcaaagtaaaattagataaatacatgtttgaactatacctttggaatgcttcgaaaacgtggaccttttcagctgtcatatggaatttgaagtttatgcagtactcaggttcgtgagaattaactgtgtatagttcactgattttgtaagtacagttgatgtggagtaacatgggaaaactttattggctattccagttatttccctggtacagaagctataaaaaagcagcatattatcttagttactttctctgattgtaaatatgaatccgtatatcctttctcttaagtcaaacttttctttaactttgatggtcaatatgtgaatttttgtatagaatagcaatgcaagatcgaaattaatagattcattatgaaaaatacttttatatatctcttttcatttaaggtaatgtatttttttacagatattgcttgtaatagtgtcatatttgagactgtcttaatgtattaatggacttatatttgtgattggaggaagtatgtgatgcataaattttttcgtttatttatatgtgatcattatggtgtgtactaaactgtaaatatttaccttgactggatcaaacttaagaatatcacaaattctcacacaatagactgcacattctctctgatttatactaattcatttgtaattctctattctcatttccatcaagattttggttgcattcttatttagcttagtgcaagcacaatgccgattttgaggtttttttttctgtaaaatgcatttgcccaggttgaagatgttaagttctgcttcaatgggtgataaacaaagtggtagtaatgacagtggttcaacatccgcgggccagtcaccacgacttaaatcttttgcttgtagatctcttctggctaatgatgtggaaagtggactaagaagaccgttgaactcctaggataaaacagcgggctcatgttgaaggtggaccatattttggtaacctaaatcctgtagccatctttctcttaaacatagaggcttacacaccgcagcagttcatttctcggaccagtgggagggggctgtccagcgaaaggagcttggcaaatactgtaactgtgacttcatgtgggcatccacagcagtcttggcgccattttggagcaccgttcgtactcagcgagctttgagttaagccggatgtttctgcaaagagctgttcaatgttggtgttgcatatcggtttatgtcatgcgatatgtttactgctcatcacggtccaatttttctgacctgccttcctgtttcttttagctaccaaggaaaatgaagcaggtagttcattagttatttagtaaattggctattttttttctagccgtagcttgccagctgcttctcttcgagcattttggtcattgttcatagtgctgtcatgacaaggagcacatctctagatcagtaaaggaaagaaatgtaaatctcattcgtttctggaaagaggtgaaatgcatgagactcgtttaaaacgttgcagggttatcacatgaaactgttctggccccacgtatatagaaaaaataccaggag

SEQ ID NO: 200051 - DNA, 4403 bp, Zea Mays
aaaatatcggaatgaccaaaaaagagtaagaattacagaaaagcccctccggtagtctctctcttttccgtttctcttctccggccttcgtcttcctgcttctccccgtccgccaattcccttccccacccaaaccctagagcaaagctcaatggccctcgtcacgagttcgcgagagactctgcaccgccgccgttgactgctgatccaaccgctcccgcggcgcccggggccctgtcacggaggcggcggcgacatggcgtcgaggcagcacaatgcgcagttccacaaatccaagacgcttgacaacaaatacatgcttggagatgaaatagggaagggggcgtacggccgcgtatacaaggggcttgacctggagaatggcgatttcgtggccatcaaacaggtctcgctggagaacattccgcaggaggatctcaacataataatgcaagagatcgaccttttgaaaaatcttaatcataaaaatattgtcaagtatttgggatcattgaagacaaagagccacctccatattattttggagtatgtggagaatggctcacttgctaatattatcaagccaaacaaattcggaccttttcctgaatctttggtggctgtatacattgctcaggtgttggaaggtcttgtttatctgcatgaacaaggtgtcattcatagagatatcaagggcgcaaatatactgactaccaaagagggccttgtcaaacttgctgactttggagttgccactaaattgactgaagctgacatcaacactcattctgtggtcggcactccatactggatggcgcctgaggatgtgcatccaccaataccagaaggactgtcacctgagattactgattttctccggcaatgttttcaaaaggatgcgatgcaaaggcctgatgcgaagacattattgatgcatccatggttgcagaactcaagacgtgctttgcctgcttcccttcggcaacctactccattaaggaatatcgacggggatgatgaaagctcaagaggggacaataactcgggtttttgcgacacaccaggagatacccgagcaactattgcttctaatgttgaccaggtgaatgggaggaacggaccaaatatggactctgctgcgcaaagtaaatctgaagagcttcatgatggaaatttagaacttacagagggcattagttcgaacaatgtggcgcttgtgaaagataatgtggtccttaataaagatccgacactagttttacatgagaagttaccggtggaatcttcatttggagatgctgatttgaatggcaaagtaatggcacatgaactattgcaaggtggtctgccaagtaagatagagctggagaataaagaaagttcaactgttgaggatggtgatgtattctcatttcaggctggaagacagaatattgacttccaaatggtggttgaaccttcagttgttgagggaccgaaacagcttagtagatttagtgacaaacctgaagatgcctctttggaagacttatttccaccaatcgacaaacggggagataatggggctgaaccttcaacatcaactactgtccaagaacttcaatataatggtgtacacaatggattcgtgaaggggctcaatgccagggtggagaagcaaaaagaaaatgatagcgagtccatgaatggtggaaaactaattgaatttgccatgcagctagaaaatattgatgcatcgggttttggtgaacatattcctggagagagtcttttccctctgcagtctgtggagtacagcaaaatagtagcacaactgaaaccaggggaaagtgaagatgtaatactgttggcgtgccaaaagcttctatcaatcttcagtcaccggcctgagcaaaaacagatctatatggcacagaatggtttcctcccgctgatggaactccttgaaattcctaaaaatcgtattttatgctcagttctgcagcttatcaacaacattgtaaaagatagtacaggcttcctggaaaatgcttgccttgttggccttattccagtggtgatgaattttgcagaaccaaatcgcccaaaggatgttcgggtgcaagcatccttgtttcttcagcagctttgtcaagccagcaccttgacattgcaaatgttcattgcatgtcaagggatccctgttttggtaagctttatggagcctgactatgcaaaatacagggatatggttcatcttgcaattgacggcatttggcaggtctttaagctccagcactcaactccaagaaatgacttctgccgtatagcagcaaaaaatgggatgcttcctaggctggtgaatacactatatagcttgaacgaagcaacacgatttgcctcagtctcagggtcaggtgcttcagtaacacagaatggctcaaccccccgacgaagatctggccaattagacccttcagttcttgaaagttgcaaggcgaggctggatcatcatcattcatctggttctttgcaatctctacaagcagatgcagataagcaccacatattaatggactcctcgtcatctcctaggttcagcgacaaaacaagcagtaacttggagaggaatgagaacgacttggttattcggccacagaggcttagtgtttctgccggaaggacatctacagacagatcaccgaagcacatagaactagtttcaaatggtcataataacagtcaaaatgaccaggtccgacctctactgagtttattggagaaagaaccaccttctcgacatgtatctggacaacttgattatgttcgccatatatctggtttggaaaggcatgaaaccattctgccactattacatacatcgacagagaggaaaacgaatggtgaacttgacttaatgatggattttgctgaggtttctagacatggaagggagaatggccatctggactctagtataaaagcttcaaatagagttcatagtatgaaatatgcaccttcagcaagtgcgtctaatgaaggggcatcaacttctggagctgcatcacaaactgcatctggtgtgttatcaggatcaggggtgctcaatttaagacctgggagtacaacatcatcaggcccattagctcagatgttctcttccatgagcgcagatgtggcacgtgaatatcttgagaaagtagcagatcttcttttggagtttgcacaggcagacaccgtggtaaaatctctgatggccagccaaagccttcttacaagggttttccaaatgtttaacaagatagagcctcctattcttcttaagattcttaggtgcattaatcatttgtcgggtgatcctaattgtcttgagacacttcaacgcacagatgcaatcaaacatctgataccgattctggagcttcgtgatggacctctggtttatcaaatacatagtgaggtccttaatgctttgttcaacctttgcaaaattaataaaagaagacaggaacaagcagccgaaaatggaatcatccctcacttgatgaaatttgtcatgtcagactcacctttgcggcagtatgccctgcctttgctgtgtgatatggctcatgcttctcgcaactctagagagcagttgagggttcatggaggactagatgtgtacttaaatctgctggaggatgatgcatgggcatgcacggcattagattctattgctgtttgtttggctcacgataatgatcacagaaaagtggaacaagcactgttgaaaaaagaggccattcagaaattagtgaagttcttccaagattgcccagaacagtattttggccatatattggacgctttcttgaagataatcacgaaatcttctaggctaaatacagcaatggctaccaatggtttaacaacattgctcattgcaagacttgaccatcgagaagctattgcccgcttgactctgctgaaactcataaaggttgtctatgagcaccatcctcgaccaaaacagctcatagtagagaatgacctccctcagaagctacagaacctcattgaagagcgcagggatggacaacggggcggccaacaagtgttggtcaaacaaatggccacctcattgctgaaagcgctgcacatcaatacagtattgtgatattggtggatcatatgttttcctctcaagttgtatatgcttgccctagaggagaaggtgccttttccttttgctctgctgtggtggtttctcatgagcaccagactcatctgttgtacctgatccctcttttttcgggagaaaggttttttaggtgcaggatgaaatggacgttctgtccttcagtgttgtttatatttagagtgttagtgaggacattgtaaattaagacatataattaataaacaaaacccatgttgagata

SEQ ID NO: 200052 - DNA, 2477 bp, Zea Mays
atccatgccgtccatcggatcagatcgtcttctcccgcgctagggtttagcatcggtccccaatggcgtccccgccgccgccacgttcgccaaggtgcccgcgctgaacgggatcttccgccaggcggtgcgggcgctgcatgtcttagtgcgcatcgagctcaacgcacccgtcaaattggggaagagggatgctggtgaaaccggtgaggggaaggaggaggcactggtggtgctggccacacagctcgctagagcagtgcaggcactcagcaagctgagcattgcccgggcacggctctgtgcggagagtattgctgatgctgagcttcgggagaagcttactggtggcgttagcgttgatgatttgaaggggatgcttgacaatgttttgattgattcagatgccgtatcagtcttgaagggggtgtacaaccacttgctcaagttcagggactttcttgcctgggaagcagctgtggccatggcagtaattgaagcagacagttcaattgagaagccacaagctgctgttgagaatgaagcagccagtgtaactgagaagccactggctggtggggacaaagcaaagggtgacaagaagagcaagaagaagaaaactttgggtaagggtacttctgctgtgctcatgctgcttagggaccatgtgacaaatggaagtactgttgctgccatgaattctgcgtcggttgcagagtgggcaacctctctgtcattgctatttgatcccaaatgtccaggattggagtcacttgtggagaaggtgaaggagattgttgagagcaatgaagtgaggagattgcctaaaattccaaagggtacacgcgactttggtaaagagcaaatggcgataagggagcgagcattttcaattataactagtgtattcaagatgcatggtgctactgcgcttgatacacccgtatttgagctgagagaaacccttatgggaaaatatggtgaagactcaaagttgatatatgacttagctgatcagggtggtgagctttgctctttgcggtatgatctgactgttccatttgcccgttatgttgccatgaatagcattagtgcattaaagagataccaaatagcgaaagtatataggagagataatccatctaagggaagataccgagaattctaccaatgtgactttgacattgctggtgtatatgaacctatggaaccggattttgaggtcataaaagttctgactgaattgctgaatcagctggatataggcacatatgagataaaattaaatcacagaaagttgcttgatggtatgttggagatttgtggtgtgccccctcaaaagttcagaacagtttgctcgagtattgacaaactggacaagcaaacattcgaacaggtgaagaaggaactggttgatgagaaaggtatatcaaatgaaactgcggatgaaattggcaatttagtgaagactaggggccccccgttggaagttttgatggagttgagaaaggagggcagcaagtttatgaataatgtagggtctgttgctgcactgaatgagctggagatattattcaaagctctggataaagcaaatgcaataagcaagataacttttgatttaagtttggccaggggccttgattactacactggtgtcatatatgaagccgttttcaagggtgcagctcaggttggctccatagcggctggtggtcggtacgacaaccttgtgggtatgtttagtgggaagcaaatccctgctgttggtgtgagccttggaattgagagagtctttgcaatcatggagcagcaggagaaagaaagaaatgagatccggcctacagagacagaggtgctggtgtcaattctgggaaaggaccttaccctagctgccgagctcgtgagcgagctgtggaatgctgggataaaggcagagttcaagctcactaccagggtggcgaaccacatcaagtatgccttgcaatcaagcattccgtggatggtgctagtcggcgagtctgagctgcagaaaggaactgtaaagttgaaggacgttgaagccaaccaggaagaagaggttgataggaaggattttgttcgagagttgaagaagagattgagtaaatcctaagaggaaaattttaggcgttgatatcatcttttgacacccatttgacgcaaactcaattagggggagaatgacattacatcattataatttaaactgacgtgaatgtttcagtccggttggcatagggccacttgttatgttcataaggtcattcgaatcccctgagtcccaatgcattatgctgatgaatcaggctgcagacatattgtgaattatattctttttgtactaccttgaggaatgaaaagtttttgtcctcacatgtaatttggaacaaagccagcaacctgtatttttattgcatttattattttaaaataaaaaaccgacattgaatctcgca

SEQ ID NO: 200053 - DNA, 2395 bp, Zea Mays
acgaataatacagcctacaatgcacaccgtttttctgcaacagacagcgcatccatgccgtccatcggatcagatcgtcttctcccgcgctagggtttagcatcggtccccaatggcgtccccgccgccgccacgttcgccaaggtgcccgcgctgaacgggatcttccgccaggcggtgcgggcgctgcatgtcttagtgcgcatcgagctcaacgcacccgtcaaattggggaagagggatgctggtgaaaccggtgaggggaaggaggaggcactggtggtgctggccacacagctcgctagagcagtgcaggcactcagcaagctgagcattgcccgggcacggctctgtgcggagagtattgctgatgctgagcttcgggagaagcttactggtggcgttagcgttgatgatttgaaggggatgcttgacaatgttttgattgattcagatgccgtatcagtcttgaagggggtgtacaaccacttgctcaagttcagggactttcttgcctgggaagcagctgtggccatggcagtaattgaagcagacagttcaattgagaagccacaagctgctgttgagaatgaagcagccagtgtaactgagaagccactggctggtggggacaaagcaaagggtgacaagaagagcaagaagaagaaaactttgggattggagtcacttgtggagaaggtgaaggagattgttgagagcaatgaagtgaggagattgcctaaaattccaaagggtacacgcgactttggtaaagagcaaatggcgataagggagcgagcattttcaattataactagtgtattcaagatgcatggtgctactgcgcttgatacacccgtatttgagctgagagaaacccttatgggaaaatatggtgaagactcaaagttgatatatgacttagctgatcagggtggtgagctttgctctttgcggtatgatctgactgttccatttgcccgttatgttgccatgaatagcattagtgcattaaagagataccaaatagcgaaagtatataggagagataatccatctaagggaagataccgagaattctaccaatgtgactttgacattgctggtgtatatgaacctatggaaccggattttgaggtcataaaagttctgactgaattgctgaatcagctggatataggcacatatgagataaaattaaatcacagaaagttgcttgatggtatgttggagatttgtggtgtgccccctcaaaagttcagaacagtttgctcgagtattgacaaactggacaagcaaacattcgaacaggtgaagaaggaactggttgatgagaaaggtatatcaaatgaaactgcggatgaaattggcaatttagtgaagactaggggccccccgttggaagttttgatggagttgagaaaggagggcagcaagtttatgaataatgtagggtctgttgctgcactgaatgagctggagatattattcaaagctctggataaagcaaatgcaataagcaagataacttttgatttaagtttggccaggggccttgattactacactggtgtcatatatgaagccgttttcaagggtgcagctcaggttggctccatagcggctggtggtcggtacgacaaccttgtgggtatgtttagtgggaagcaaatccctgctgttggtgtgagccttggaattgagagagtctttgcaatcatggagcagcaggagaaagaaagaaatgagaagatccggcctacagagacagaggtgctggtgtcaattctgggaaaggaccttaccctagctgccgagctcgtgagcgagctgtggaatgctgggataaaggcagagttcaagctcactaccagggtggcgaaccacatcaagtatgccttgcaatcaagcattccgtggatggtgctagtcggcgagtctgagctgcagaaaggaactgtaaagttgaaggacgttgaagccaaccaggaagaagaggttgataggaaggattttgttcgagagttgaagaagagattgagtaaatcctaagaggaaaattttaggcgttgatatcatcttttgacacccatttgacgcaaactcaattagggggagaatgacattacatcattataatttaaactgacgtgaatgtttcagtccggttggcatagggccacttgttatgttcataaggtcattcgaatcccctgagtcccaatgcattatgctgatgaatcaggctgcagacatattgtgaattatattctttttgtactaccttgaggaatgaaaagtttttgtcctcacatgtaatttggaacaaagccagcaacctgtatttttattgcatttattattttaaaataaaaaaccgacattgaatctcgca

SEQ ID NO: 200054 - DNA, 2521 bp, Zea Mays
atggtgctgccggcattgcccaacgcccatacagtcctcctcctcttcgcctccatggcgtggtcccaggaggaggcgtctagccgcatagccgagccccacgcatcctcgtacatgacggctcgaacgagtgtggatcgaagagaccgggtgggagcagagcagctggtgagagccacaggagatgatggagcgttctgtgtcaccttctgcatcgtggatgaactaggaatccagggtggattcatttactggagatcacactgccccaagggctatcctgaaagtgctccttcaatctctgcggacataccatatctcccaaaaatacagtggtcaaaaagctcaagatcaaaacatgttctttggcgactccaagcggtgacggttgctgcatcctgttgcatattgacgcatgccagcccgactccttaccagagtgcgagaacaccccagctgcagcggagccttccattccgtgtgcctcagagactggctgcgcttcgtcaccacgaccaggcagtacggccgttcgatgcccctgttcgggaactctgccccttaccgcagcgttcccgtggccgtcaagatcaccggccactaacaccaaacttccaagttttggtcggcgtttacaaggtcaggcaggcgatcgtaaccacccattttaaggtcaccttcgattttgttccatgtcacagagaagggaaaaagaaagaggagactagcagccagctaggatgtgccgtgcccgtgcgtgaaaatgcagcaggcatggaaagccagcaggcggatgactctgactcacatggatctagggcgcctagcatacatactttactgcaggaccgcagagcgctgaatagaagcacctgctgcgcaagcgcaagtccaaaagactcccttgcaagtcttggtctggaccgtggacggcttccagaatccagactccctgcacggcgtgcacgcgcctacataagaaaaaagatccgtggccccagcacccgcggccgagtcagagccccagtcccagagggagggggaaatggcgagcggggacgggaagaagcagagcagacggcagcggcggcggcggcagctgtgggcggcgtgcctcccgcggccggggtgcttcacggtgtccgccgccgacgagggcccgtcggctcacggtgccggcgagggggagagcaagcccaagcccacgcatctggtcgtcacggtcaatgggatcgtcggaagtgcagaaaattggcgttttgcggcaaagcacttcatcaagaaacaccctgaagacgtggttgttcacttgggtgcaactcagcagctcgaacctttgatggagttgatgtgatggggagaagattggcagacgaggtggcttctattgttgacagtagaccggagctttgcaagatttcctttgttgcgcattcattgggtggactaattgcaagatatgctattgcattattatatgagagcgagacacaaaaagattctcatgaaaagtttgagaaccatgctgttgactattctagtaaccagcacagcaaagggaaaattgttggtttggagcctattaacttcatcacttttgcaacaccacacctcggtacaatatcacacaaacagataccacttcttcgtggttccaacaaattagaaaagatggcgtatcgtttgtcttggattgctgggagaagtggaaaacatctcttcctgaaagatatggaagatgagaaaccaccacttcttctacagatggttactgattatggtggtctccatttcatgtcagctctccgctctttcaagcggcgtgttgcttactccaatgtttgtaatgactttatcgttggctggaggacatcatcaattcgtcgtcaacacgagcttcctgagccccgaagttttataaacaacaatagatatccacacattgtatatgtggaagggccaaaagttgaggatgttgattttttggatgcgatgatttacgaggcaaaaacgactagtgaaatggaagaggtgatgctcaaaggtctgaatagagtttcatgggaaagggtagatgttagcttcaaaaaaagtagacaaaggattttcgctcatagcactattcaggtcaagacctatttcttgaactccgatggagctgacgtgatcaaccacatgatcgaccattttgtttattaagatgggtgtactaagttggtaccaagttctctttgtcgatcgattctcggccaaagaggaacatgtgggaaatgttcttgttttgaagacaggattagagttatactgaaggagtagaacccactgtaaagtgtaaaggggtatcttatctctacccttcttgataattttgggccgtttaggttcttttcttcccttttcagaattcagaatctcagttgttttgtacccatatactggaccagaatttgttctccaaatacaaagatatttgctgcgtatttgcttctccgaacgatgatccctttgtcttataccaact

SEQ ID NO: 200055 - DNA, 2681 bp, Zea Mays
gaaagaaacaggatctgcccatacgcacaccagccttgccgagatctgtctgcccgcttgctgcctacttctcatccatgcatggtgctgccggcattgcccaacgcccatacagtcctcctcctcttcgcctccatggcgtggtcccaggaggaggcgtctagccgcatagccgagccccacgcatcctcgtacatgacggctcgaacgagtgtggatcgaagagaccgggtgggagcagagcagctggtgagagccacaggagatgatggagcgttctgtgtcaccttctgcatcgtggatgaactaggaatccagggtggattcatttactggagatcacactgccccaagggctatcctgaaagtgctccttcaatctctgcggacataccatatctcccaaaaatacagtggtcaaaaagctcaagatcaaaacatgttctttggcgactccaagcggtgacggttgctgcatcctgttgcatattgacgcatgccagcccgactccttaccagagtgcgagaacaccccagctgcagcggagccttccattccgtgtgcctcagagactggctgcgcttcgtcaccacgaccaggcagtacggccgttcgatgcccctgttcgggaactctgccccttaccgcagcgttcccgtggccgtcaagatcaccggccactaacaccaaacttccaagttttggtcggcgtttacaaggtcaggcaggcgatcgtaaccacccattttaaggtcaccttcgattttgttccatgtcacagagaagggaaaaagaaagaggagactagcagccagctaggatgtgccgtgcccgtgcgtgaaaatgcagcaggcatggaaagccagcaggcggatgactctgactcacatggatctagggcgcctagcatacatactttactgcaggaccgcagagcgctgaatagaagcacctgctgcgcaagcgcaagtccaaaagactcccttgcaagtcttggtctggaccgtggacggcttccagaatccagactccctgcacggcgtgcacgcgcctacataagaaaaaagatccgtggccccagcacccgcggccgagtcagagccccagtcccagagggagggggaaatggcgagcggggacgggaagaagcagagcagacggcagcggcggcggcggcagctgtgggcggcgtgcctcccgcggccggggtgcttcacggtgtccgccgccgacgagggcccgtcggctcacggtgccggcgagggggagagcaagcccaagcccacgcatctggtcgtcacggtcaatgggatcgtcggaagtgcagaaaattggcgttttgcggcaaagcacttcatcaagaaacaccctgaagacgtggttgttcactgcagtgggtgcaactcagcagctcgaacctttgatggagttgatgtgatggggagaagattggcagacgaggtggcttctattgttgacagtagaccggagctttgcaagatttcctttgttgcgcattcattgggtggactaattgcaagatatgctattgcattattatatgagagcgagacacaaaaagattctcatgaaaagtttgagaaccatgctgttgactattctagtaaccagcacagcaaagggaaaattgttggtttggagcctattaacttcatcacttttgcaacaccacacctcggtacaatatcacacaaacaggattttgtatagtattgttgatcatatttatacaggggagtgggtactaattataaactgagttctataaagaagataccacttcttcgtggttccaacaaattagaaaagatggcgtatcgtttgtcttggattgctgggagaagtggaaaacatctcttcctgaaagatatggaagatgagaaaccaccacttcttctacagatggttactgattatggtggtctccatttcatgtcagctctccgctctttcaagcggcgtgttgcttactccaatgtttgtaatgactttatcgttggctggaggacatcatcaattcgtcgtcaacacgagcttcctgagccccgaagttttataaacaacaatagatatccacacattgtatatgtggaagggccaaaagttgaggatgttgattttttggatgcgatgatttacgaggcaaaaacgactagtgaaatggaagaggtgatgctcaaaggtctgaatagagtttcatgggaaagggtagatgttagcttcaaaaaaagtagacaaaggattttcgctcatagcactattcaggtcaagacctatttcttgaactccgatggagctgacgtgatcaaccacatgatcgaccattttgtttattaagatgggtgtactaagttggtaccaagttctctttgtcgatcgattctcggccaaagaggaacatgtgggaaatgttcttgttttgaagacaggattagagttatactgaaggagtagaacccactgtaaagtgtaaaggggtatcttatctctacccttcttgataattttgggccgtttaggttcttttcttcccttttcagaattcagaatctcagttgttttgtacccatatactggaccagaatttgttctccaaatacaaagatatttgctgcgtatttgcttctccgaacgatgatccctttgtcttataccaact

SEQ ID NO: 200056 - DNA, 2706 bp, Zea Mays
ctcactttgaatttttctactagtcttggataaacatcagaaagccaatttaacagaaacataggaaccaaattaggctaactgaggaaaggggacaagagaaagaaacaggatctgcccatacgcacaccagccttgccgagatctgtctgcccgcttgctgcctacttctcatccatgcatggtgctgccggcattgcccaacgcccatacagtcctcctcctcttcgcctccatggcgtggtcccaggaggaggcgtctagccgcatagccgagccccacgcatcctcgtacatgacggctcgaacgagtgtggatcgaagagaccgggtgggagcagagcagctggtgagagccacaggagatgatggagcgttctgtgtcaccttctgcatcgtggatgaactaggaatccagggtggattcatttactggagatcacactgccccaagggctatcctgaaagtgctccttcaatctctgcggacataccatatctcccaaaaatacagtggtcaaaaagctcaagatcaaaacatgttctttggcgactccaagcggtgacggttgctgcatcctgttgcatattgacgcatgccagcccgactccttaccagagtgcgagaacaccccagctgcagcggagccttccattccgtgtgcctcagagactggctgcgcttcgtcaccacgaccaggcagtacggccgttcgatgcccctgttcgggaactctgccccttaccgcagcgttcccgtggccgtcaagatcaccggccactaacaccaaacttccaagttttggtcggcgtttacaaggtcaggcaggcgatcgtaaccacccattttaaggtcaccttcgattttgttccatgtcacagagaagggaaaaagaaagaggagactagcagccagctaggatgtgccgtgcccgtgcgtgaaaatgcagcaggcatggaaagccagcaggcggatgactctgactcacatggatctagggcgcctagcatacatactttactgcaggaccgcagagcgctgaatagaagcacctgctgcgcaagcgcaagtccaaaagactcccttgcaagtcttggtctggaccgtggacggcttccagaatccagactccctgcacggcgtgcacgcgcctacataagaaaaaagatccgtggccccagcacccgcggccgagtcagagccccagtcccagagggagggggaaatggcgagcggggacgggaagaagcagagcagacggcagcggcggcggcggcagctgtgggcggcgtgcctcccgcggccggggtgcttcacggtgtccgccgccgacgagggcccgtcggctcacggtgccggcgagggggagagcaagcccaagcccacgcatctggtcgtcacggtcaatgggatcgtcggaagtgcagaaaattggcgttttgcggcaaagcacttcatcaagaaacaccctgaagacgtggttgttcactgcagtgggtgcaactcagcagctcgaacctttgatggagttgatgtgatggggagaagattggcagacgaggtggcttctattgttgacagtagaccggagctttgcaagatttcctttgttgcgcattcattgggtggactaattgcaagatatgctattgcattattatatgagagcgagacacaaaaagattctcatgaaaagtttgagaaccatgctgttgactattctagtaaccagcacagcaaagggaaaattgttggtttggagcctattaacttcatcacttttgcaacaccacacctcggtacaatatcacacaaacagataccacttcttcgtggttccaacaaattagaaaagatggcgtatcgtttgtcttggattgctgggagaagtggaaaacatctcttcctgaaagatatggaagatgagaaaccaccacttcttctacagatggttactgattatggtggtctccatttcatgtcagctctccgctctttcaagcggcgtgttgcttactccaatgtttgtaatgactttatcgttggctggaggacatcatcaattcgtcgtcaacacgagcttcctgagccccgaagttttataaacaacaatagatatccacacattgtatatgtggaagggccaaaagttgaggatgttgattttttggatgcgatgatttacgaggcaaaaacgactagtgaaatggaagaggtgatgctcaaaggtctgaatagagtttcatgggaaagggtagatgttagcttcaaaaaaagtagacaaaggattttcgctcatagcactattcaggtcaagacctatttcttgaactccgatggagctgacgtgatcaaccacatgatcgaccattttgtttattaagatgggtgtactaagttggtaccaagttctctttgtcgatcgattctcggccaaagaggaacatgtgggaaatgttcttgttttgaagacaggattagagttatactgaaggagtagaacccactgtaaagtgtaaaggggtatcttatctctacccttcttgataattttgggccgtttaggttcttttcttcccttttcagaattcagaatctcagttgttttgtacccatatactggaccagaatttgttctccaaatacaaagatatttgctgcgtatttgcttctccgaacgatgatccctttgtcttataccaact

SEQ ID NO: 200057 - DNA, 1079 bp, Zea Mays
ctggattgaactaaagggcataagcccgtggatcatgtgaaagggctacatttcaatctctcagacactagacactacctatctactccaagatccgcggcggcgtgctggcctactctaagatccgccggcgcgtcgtggcggctcctccgcgtcccgcctccgaggccgcgggcggcgtcaggctgatcggggtggcgcgcggcgccggggagcgccccatcgtattcgtgcctctcaagcctaggccatggagggggtatcatcagctccagaaatggacgaggctatctcaactgaccaatcaagcagatcaacaaaaagaagggctaaagtgtgggatcatgttgattcagagctaatagatgggaaagagaaggcggtttgcaaatactgtaaggcccacttatcttctgctgcgggtaaaggctaaggagttccttggtgcttccggtgacaagcgaaaggaagtcaattaactctgaatcagtggttctgctgcaaggttacacacaacattttattgaatggaaagaggacactcggtgaccacaagatcatcagatgatcatttgttgagctctggaactaaatcctctccgcaggtggtaaccaggcgggttcccatccgagttccgaggtcactgtaatgctaaattgtcaagttcagttatctgaattcagtttgagttataattctcatcaagcatcaatgtcaccaactgtgtagaaatactgaattttagcatggagcgtctttataaacattttagcatggagcagtttctcatcgatcatggctgtcaagttctatttctctacacagttgcactttgtggttgttttctatcatttgtttgtgagcccatggattttactaatttattagcttgtggtggtgcttgcttgtatatgaaggcccttggattggcccgtggatttttaaaaggatcgaggcggattaggatgtcggggcattaaaaaacggattgaattgagttgtatcaaatcaatttggatttaagtagggctgggttcactttttaaacttataggattggagtggggttggggccgga

SEQ ID NO: 200058 - DNA, 1003 bp, Zea Mays
gaaagggctacatttcaatctctcagacactagacactacctatctactccaagatccgcggcggcgtgctggcctactctaagatccgccggcgcgtcgtggcggctcctccgcgtcccgcctccgaggccgcgggcggcgtcaggctgatcggggtggcgcgcggcgccggggagcgccccatcgtattcgtgcctctcaaggccatggagggggtatcatcagctccagaaatggacgaggctatctcaactgaccaatcaagcagatcaacaaaaagaagggctaaagtgtgggatcatgttgattcagagctaatagatgggaaagagaaggcggtttgcaaatactgctaaggagttccttggtgcttccggtgacaagcgaaaggaagtcaattaactctgaatcagtggttctgctgcaaggttacacacaacattttattgaatggaaagaggacactcggtgaccacaagatcatcagatgatcatttgttgagctctggaactaaatcctctccgcaggtggtaaccaggcgggttcccatccgagttccgaggtcactgtaatgctaaattgtcaagttcagttatctgaattcagtttgagttataattctcatcaagcatcaatgtcaccaactgtgtagaaatactgaattttagcatggagcgtctttataaacattttagcatggagcagtttctcatcgatcatggctgtcaagttctatttctctacacagttgcactttgtggttgttttctatcatttgtttgtgagcccatggattttactaatttattagcttgtggtggtgcttgcttgtatatgaaggcccttggattggcccgtggatttttaaaaggatcgaggcggattaggatgtcggggcattaaaaaacggattgaattgagttgtatcaaatcaatttggatttaagtagggctgggttcactttttaaacttataggattggagtggggttggggccgga

SEQ ID NO: 200059 - DNA, 2349 bp, Zea Mays
acgactcacgaattccgtcccattcccatccgcgcggacgtctcctcacgcaacctgtagccgagaccctctcacacgcttgcgatctccacctccgcggttgccggccgacctcttccccgccgcctccgccgcgcctcggggcaccggacccgtctccaacccctagatctcgcgccccctccgccccgccggccggtggtcacgccccgcctctcccgccgccggacgagctcgccgtggggcggagaggtcgccgccggcgacaggagccacgcgatgtccagggaatcctgccctttctcctcgcctcagtccttggggatccatccgtgctaatttccaccgttggcttgcagccttttgtatcgagcatgtgctaaattgggcacgcagaaatatcatcaagtatgctgatattaccgttccgaaacatcccaacttgccagcattggtcggggtaaatttgtcaagttatcaattgaagtgtgcttggttattgatttccattaaattgcagcatagcttgctcttcatctgaaagttttcgagggtagatgtttatcgtgcaccatggtcgttggtaatgacatagttgacatggttgggtgctaaaaggacgagaagggtttgaataaacggtccgatgaacattctacttgagcttaagcatctcaagctctttagcatgcccgcaagacctgtcatctgtaaaggccttctgatagtgattgcccttattttgttgagagcaattgtatctccttttcttgctatagattcatctgagaagaaagaattttacgagtccacagcccctgacttgcttcctagaattagacgagacaagtttcttgaggtcccacagatcatatgggggttgaacaatcagaagattgcattcgccagagcatgcttgactgcaagattcctgaacagatcccttctcatgccaagcttgagtgcttctctcttctacaaagaggttgacttgctgcagcctgtcagttttgacaaagtgtttgactttaacaagttcaatgcgcgttgccatggcttcgtaaggttagctcagtattcagaagtttcaaatcggacagagcccttcaaactccaaaaggggaccggtagaaggtggacggcagacagagatttggatcaactacagcaatccataggcagcaatgtggatgactctgaagtcattgaaatcgttgggaaaaatccatttctgtggcctgaccactggccagtcaaagactatgccaaaatcttcgattgccttgtcttagttcctgagatagaaaccgaagtggtcaaggtgatatccaagattagagaggcaggccaaagagcaagacatgaagctgggggttctcatagtaagcagaggagagatagctcaacgaatccgcctgtaccgtatgttgctgttcacatgagaatagaaaaagattggatgatacattgcaagaagtgggagcagcggtccaagtcacatgaaatctgcagtagtaaagaagagatcattcataaggtctcacagatcactgacctacgtcggccggttgttgtttatcttgcggtagctgacagccttcttgaagacgattcaataaccagtgggtggagagtgggtatggttgcttacgagaagaagaagcttggtgttactgacatctacgatcgtcagccatatcttataaagtctgccatcgacttcgaggtgtgctcgagagcagacgtgtttgtcggcaacagcttctcaacattctccaacctcgtagtgctgtccaggacagaaaggctgtacaacctgggaaaggcgagctcgtgtggcgagaacatcgggctttcgtcgtatgcgtacaatgtcatgggcgacgatggtggaccacagagatggatgacagatatgtcggacacaagcctgcagaggttaagttacggaacaaataacgtctcatgccactgactttgacgcatagcaaacttgactgaacatgatgtatacctgaggaagagtccttgcccgacttcgctttttatcggcaaaggaagcaagtatgtgcagctaatttgacgtgcttctgtgttcgaagctagagcccacatgtcgcacttgtgaaggactatggccaagagtttagatgtgcttaaaagtgttgacagtgttgggcagtttgtagtttgtataacgctgaatgctgcgcgatggcttttacctgggacccttttgtttttttatggtttcagaatcagacctacacattcaagtgaaaaaaaaatagagagaagtgggaggtgcggtcggccaggaagaagaaaagaaaaaaaagttcccaggcg

SEQ ID NO: 200060 - DNA, 1523 bp, Zea Mays
cacactacagctactttcactctgaaccacctaccaacagttactggttacatgttaggttatggtctaatcatcgggtcgtcttccagttcgcccgtggacacagacactgcatgccattccacaaaactagaacagacatgtcccatccaacctaaggtgccgtttgattcacgaaatgtaacgtaaatggtaacgattcacacttgaataccggtggtaacaaatttgaataaggaggtatccatttgtagtgtgatatcgattacggttggacttaaataaacatatgatctaacgttattggttacccattacgttgccaatatgtgaaccaaacggcacctaagagactgacaatacgggagggacgtgtttgtcgcgagttgcttggccaaactctcaggcaaagggagatgagtgggtgtgttgttcggtggagaaaaaacaaatgaaactcgaggacgagtctgagcctgagttggtcattaatttcattagatgactttgtatctttagttgacttgacttggcaacgggacttggtatatagaagtcagatctagaactccttgaggctctccacccaaacaaccacagcttgctggcaagcctctgaatccatgcatccttcatcaccttccattctgcacttacagcagcagcagcagccgccgccacagcttgctgcgcttgttgtgcgacctcagctcgctccatggaccccttctgcttcagcttgcagataagcggatgtatgtcagttgcgtcatcatttatcactgtccaatgtccatagacatcacaacaagcactcgaagatttgggactgttccaacaagcaccgagctgttcaaaacgacaagcacttgagaagagttctccctgcatttatgaatacttgtgaaactctgaccatgaatgtaaccttagatattaaatatacatgatggaatgttcaaacttttgtcttctccaaaaatttgagtagacgtttcatttgtggaacctattggtaaaaattcgagttttgaaggccaagctttcgagagcagggttcccaatttcgggcagaaatctccgaaattttcttgagttttggtgggtccgaaatatatatatttccgaaattggcattttaatatgaattataccgctttttaaaaccctatttgcttttgaactagaattcccgacatttcggaaattccctggttttcgctgggggcgaattttttcttttctgaaattgtacactcaaaattttgatttcacaattcacccaagagttttgttccaaacatttttgaaaatgcccagttatcgccggtccaaactcagtatcagccctcaggcttaggaaattcagttggccgggctcttttgtcaaacacttctaccataacgtctgcgaccaagtcaactccttcacaaacagagctgaaaaataaagttatactagtagaatatatatgcgttgcgacggtatataaattatttgataaaatattaacgcacaacgg

SEQ ID NO: 200061 - DNA, 738 bp, Zea Mays
atggggaaggcaaagagcaagggccctaaattcgcggcggtgaagaagattatcaccaagaaaaccatcaataagtacaaggaggatgtgctgaaccacaagaagaaggacgcggacaaggagaaactcggccggaatgtgccgcaggtttcgtcggcgttgttcttcagctacaacacagcattggggccgccgtatcgggtgattgtggataccaacttcatcaatttctcgatacagaataagctggatttggagaagggaatgatggattgcctttatgcaaaatgtaccccatgtatcacggactgtgttatggctgagcttgaaaagctggggcagaagtatcgtgtggccttgagcataactttcatctatctgcacaatctaatttacctccctcacagaattgccaaggaccctaggttccaaatattagcatgcacacacaagggaacctatgctgatgactgcattgtggagagggtcactcaagtagaagggcagccaggtgcagtggtgagagctgtctcactgagtcaccatgatgtgggttctaagggttcgaagcagacttgcatttgcgtgcacaaatgctacatagttgctacttgtgatagagatttgaaaaggaggataagaaaggttcctggtgttccaatcatgtacatcacaagacataggtattcgatagaacggctccctgaggccacaattggtggagcaccaagaatctga

SEQ ID NO: 200062 - DNA, 2387 bp, Zea Mays
gatggttggactgaattcgtgcaggtctgctggctcaactcggcttttgaaaggtccgcagcccgcaagaaaaccaaaagggttcccagtactgaataccttcacgtctgcatcggtttcacctgctaacaatggcgaccaaggttctgacggaagctctggtgatccaagatgctgcccagcgtgtctaggcaggaattcgattgccaaggcggcatctgcagttggtcctgctgttgtaaacatttcttctatgcatgatatgcatggatgggtaaacgagcagagcattggatctggaactataatagatccagatgggactatattgacatgtgcgcatgttgttgcagattttcaaagcacaaaagcaattgtgaggagaaaggttagtgtgactttacaagatggtcgtgaatttgaaggtgttgtccttaatgctgaccgcctgtctgacattgccgttgtgaagattaagtcgatgacccctttacctgctgccaggcttggatcatcatctcaacttcagccaggtgactgggttgttgctctgggctgtccactttctcttcagaacacagttacagctggtattgtcagctgtgttgaccggaaaagcagtgatctgggtcttggaggattacgaagggagtatcttcaaacagattgtgctattaatcagggaaattctggaggacctcttgttaaccttgatggtgagattattggagttaatgtgatgaaagttcgtaatgctgatggtttgagctttgcagtaccaattgactctgtcattaaaatagtagataactttaacaaaaatgggagagttgtaaggccatggcttggtttaaagatgcttgacctgaaccccatgatcattgcacagctcaaagaaaagtcaagtacttttccagacgtaagaaaaggggtgcttgttcctatggttacaccagcatctccagctgaacaagcagggtttcgtcctggggatgtggttgtcgaatttggtggcaaaccagttgagagcatcaaagagataattgatatcatgggggacaaggtcgggataccatttaaagttcttgttaaaagagcgaacaatgtgacagtgacattaactgtgataccggaggaggcagatgccagcagatagacctaaactatctgctgggaagctgatctaaagccaaaggggaggattttccatggaaactccaatttttctcaagatataatacaagatgccgtggacacctgtagacaaaattttatgttgagttctgtatgtggccaaaggatggttgacaggaccacccgaaaaaggggacgaagataaataggaaatatgtattattagctccatgctcagttaaggtacatgttggttttggttatctgcggcataatcaataacggtaggactgcattctacttcttcaaattggatgatgctgtcggttgaagaataccagctccttggttttctcgcaagaacgttttactatgttttgccattctatgcagtactgtgcttagttagtcgttgacacctggaagccagttgatttcatgtatagtaccaatcatatcttccttacccgtgcaaactccagtccagacggcatcgtaaagtgatcgatcgagcagcaaaccagtagataagatggcaactcgatttgcaagatgtaattttcaagtccactgtgtatgatgtcaaggttttgtggaatctatgaggtcatgaatcttgcactcgacactagcaaagacttcaacggcggaatgatcggcgtgtatgtctgtgctgtctgttcgggagcaatgctgtacggaagtaggtctgctaggattttcaggtcgatggatcattggagctgcgtgtgtgtgtgtgtgtgtagggcacactagtaagacggacagatccgctgtcttgtgcagcacccgaaaaccctaggtcaatttcccattggttgttggatgacaacatcatggcttttttgttgggacgtccctctcgtgttccatcattgggagggaaatatttgcccgtactactcctgtctacctgtagtcctcctgtaatagtatggtgtaccggtccgatcgatcggcttgcgtctcgcagggaatctttccacgcttttctgttttgtttttttttttctcgggggggctaataatgcagtgcgattggtggacttgctgcgtatttgtatttatgtatgtgggcctgtattgtaacgtgtgctgtacacgtaaacgagagatctgtagtgcagactgcaggatcaggaagtttatgttggttggttttttttttttgaatagcaataataatagtatggcggggtatgctgtcatgctactaaagcgtctggatcaag

SEQ ID NO: 200063 - DNA, 2565 bp, Zea Mays
cttcctcctacctcagctcagacgcttcgcgacggccctgctgctccgctctgcgttccccgttcctttcctcgtgtgctctcctttcctcgtgtgcggcacgccaaggcagcaagcgatccttccagaatgctcctccgcgtcggccgccgggccgcgctcctcctagccgcaaccgccgccttctcgcgcctccgcgatcccgacacagccgtctacgtttcggcctccccgccgcagccgccacgccaggccttttcctcctccgccgccgccgagggcctccgctccggcacctgcctcttctccccgtatctgctcccatatccgttccaagggttcccagtactgaataccttcacgtctgcatcggtttcacctgctaacaatggcgaccaaggttctgacggaagctctggtgatccaagatgctgcccagcgtgtctaggcaggaattcgattgccaaggcggcatctgcagttggtcctgctgttgtaaacatttcttctatgcatgatatgcatggatgggtaaacgagcagagcattggatctggaactataatagatccagatgggactatattgacatgtgcgcatgttgttgcagattttcaaagcacaaaagcaattgtgaggagaaaggttagtgtgactttacaagatggtcgtgaatttgaaggcttggatcatcatctcaacttcagccaggtgactgggttgttgctctgggctgtccactttctcttcagaacacagttacagctggtattgtcagctgtgttgaccggaaaagcagtgatctgggtcttggaggattacgaagggagtatcttcaaacagattgtgctattaatcagggaaattctggaggacctcttgttaaccttgatggtgagattattggagttaatgtgatgaaagttcgtaatgctgatggtttgagctttgcagtaccaattgactctgtcattaaaatagtagataactttaacaaaaatgggagagttgtaaggccatggcttggtttaaagatgcttgacctgaaccccatgatcattgcacagctcaaagaaaagtcaagtacttttccagacgtaagaaaaggggtgcttgttcctatggttacaccagcatctccagctgaacaagcagggtttcgtcctggggatgtggttgtcgaatttggtggcaaaccagttgagagcatcaaagagataattgatatcatgggggacaaggtcgggataccatttaaagttcttgttaaaagagcgaacaatgtgacagtgacattaactgtgataccggaggaggcagatgccagcagatagacctaaactatctgctgggaagctgatctaaagccaaaggggaggattttccatggaaactccaatttttctcaagatataatacaagatgccgtggacacctgtagacaaaattttatgttgagttctgtatgtggccaaaggatggttgacaggaccacccgaaaaaggggacgaagataaataggaaatatgtattattagctccatgctcagttaaggtacatgttggttttggttatctgcggcataatcaataacggtaggactgcattctacttcttcaaattggatgatgctgtcggttgaagaataccagctccttggttttctcgcaagaacgttttactatgttttgccattctatgcagtactgtgcttagttagtcgttgacacctggaagccagttgatttcatgtatagtaccaatcatatcttccttacccgtgcaaactccagtccagacggcatcgtaaagtgatcgatcgagcagcaaaccagtagataagatggcaactcgatttgcaagatgtaattttcaagtccactgtgtatgatgtcaaggttttgtggaatctatgaggtcatgaatcttgcactcgacactagcaaagacttcaacggcggaatgatcggcgtgtatgtctgtgctgtctgttcgggagcaatgctgtacggaagtaggtctgctaggattttcaggtcgatggatcattggagctgcgtgtgtgtgtgtgtgtgtagggcacactagtaagacggacagatccgctgtcttgtgcagcacccgaaaaccctaggtcaatttcccattggttgttggatgacaacatcatggcttttttgttgggacgtccctctcgtgttccatcattgggagggaaatatttgcccgtactactcctgtctacctgtagtcctcctgtaatagtatggtgtaccggtccgatcgatcggcttgcgtctcgcagggaatctttccacgcttttctgttttgtttttttttttctcgggggggctaataatgcagtgcgattggtggacttgctgcgtatttgtatttatgtatgtgggcctgtattgtaacgtgtgctgtacacgtaaacgagagatctgtagtgcagactgcaggatcaggaagtttatgttggttggttttttttttttgaatagcaataataatagtatggcggggtatgctgtcatgctactaaagcgtctggatcaag

SEQ ID NO: 200064 - DNA, 2242 bp, Zea Mays
ctttttgctgcgtggcggagtcgggagtggttgcctgtccaactgtccaagggttcccagtactgaataccttcacgtctgcatcggtttcacctgctaacaatggcgaccaaggttctgacggaagctctggtgatccaagatgctgcccagcgtgtctaggcaggaattcgattgccaaggcggcatctgcagttggtcctgctgttgtaaacatttcttctatgcatgatatgcatggatgggtaaacgagcagagcattggatctggaactataatagatccagatgggactatattgacatgtgcgcatgttgttgcagattttcaaagcacaaaagcaattgtgaggagaaaggcttggatcatcatctcaacttcagccaggtgactgggttgttgctctgggctgtccactttctcttcagaacacagttacagctggtattgtcagctgtgttgaccggaaaagcagtgatctgggtcttggaggattacgaagggagtatcttcaaacagattgtgctattaatcagggaaattctggaggacctcttgttaaccttgatggtgagattattggagttaatgtgatgaaagttcgtaatgctgatggtttgagctttgcagtaccaattgactctgtcattaaaatagtagataactttaacaaaaatgggagagttgtaaggccatggcttggtttaaagatgcttgacctgaaccccatgatcattgcacagctcaaagaaaagtcaagtacttttccagacgtaagaaaaggggtgcttgttcctatggttacaccagcatctccagctgaacaagcagggtttcgtcctggggatgtggttgtcgaatttggtggcaaaccagttgagagcatcaaagagataattgatatcatgggggacaaggtcgggataccatttaaagttcttgttaaaagagcgaacaatgtgacagtgacattaactgtgataccggaggaggcagatgccagcagatagacctaaactatctgctgggaagctgatctaaagccaaaggggaggattttccatggaaactccaatttttctcaagatataatacaagatgccgtggacacctgtagacaaaattttatgttgagttctgtatgtggccaaaggatggttgacaggaccacccgaaaaaggggacgaagataaataggaaatatgtattattagctccatgctcagttaaggtacatgttggttttggttatctgcggcataatcaataacggtaggactgcattctacttcttcaaattggatgatgctgtcggttgaagaataccagctccttggttttctcgcaagaacgttttactatgttttgccattctatgcagtactgtgcttagttagtcgttgacacctggaagccagttgatttcatgtatagtaccaatcatatcttccttacccgtgcaaactccagtccagacggcatcgtaaagtgatcgatcgagcagcaaaccagtagataagatggcaactcgatttgcaagatgtaattttcaagtccactgtgtatgatgtcaaggttttgtggaatctatgaggtcatgaatcttgcactcgacactagcaaagacttcaacggcggaatgatcggcgtgtatgtctgtgctgtctgttcgggagcaatgctgtacggaagtaggtctgctaggattttcaggtcgatggatcattggagctgcgtgtgtgtgtgtgtgtgtagggcacactagtaagacggacagatccgctgtcttgtgcagcacccgaaaaccctaggtcaatttcccattggttgttggatgacaacatcatggcttttttgttgggacgtccctctcgtgttccatcattgggagggaaatatttgcccgtactactcctgtctacctgtagtcctcctgtaatagtatggtgtaccggtccgatcgatcggcttgcgtctcgcagggaatctttccacgcttttctgttttgtttttttttttctcgggggggctaataatgcagtgcgattggtggacttgctgcgtatttgtatttatgtatgtgggcctgtattgtaacgtgtgctgtacacgtaaacgagagatctgtagtgcagactgcaggatcaggaagtttatgttggttggttttttttttttgaatagcaataataatagtatggcggggtatgctgtcatgctactaaagcgtctggatcaag

SEQ ID NO: 200065 - DNA, 2795 bp, Zea Mays
ccttggtttcgtggcccgttaccccaccctgcttcctctccgtgggcacctgacgccgcgaccccggccccgagctggctttgccggccaatcggctcgcccgcgccgaccaccgcgcctcttcccctcgccgagatcgcctgaaaaggcaagcgaggccagcccgatccccctccccgcccccctcaagaaccaaaaaagggtgtcatttcgtcctaggatcgcagctcgagctcggtcgctctcgctcacctcgctccctactcgcctgctttccacttcctccgcgctcccgatttcctctccgattccttcgccgactcgtttcttcttggcaattcgttgcgcgggccatcgccccgacggcacctgggtacatcagctacaggacgggacaggtccctcttctaggagaggcttcgccagccgcctcccgcccccgtcactacgggcgccgtggagcggagatccatccggacttggatcggtctcgtcgcgtgtatcacagcaggcctgcagaagacacagcatggaatgaaccctctagctctcctgttgtgactgacatcctttcagagtttaacaatgaggatattgaccgtgctatagcgctctctctatcggaagaggagcaaagaaaggaaaaggcaatagataaggatatgcatttggaggaggatgagcaacttgcaagagctatccaggaaagtttgaatgttgagtcaccccctcgcagaaatggcagtgccaatggtggtactatgtatcatccgcctcgcgaaactggcaatgcatatcagccacctcgtgaaaatggcagtgccaatggtggaaatgcatatcacccattaccatttatgttctcatctggattcagagcatgcgcaggatgtcacagagagattggtcacgggcgttttctcagttgcatgggagctgtttggcatccggaatgttttcgttgccatgcatgtagtcaacctatatatgactatgagttctccatgtccgggaatcatccataccataaaacttgctacaaggagcagtttcacccgaaatgtgatgtctgcaagcagttcattcctacaaatatgaatggccttattgaatatagggcacatcctttctgggtacaaaaatactgtccttcacatgaaatggatggtactccgaggtgctgtagttgtgaaagaatggagccaagggaatcaaaatatgtattactggatgatggtcgtaagctctgcctggagtgccttgattccgcagtgatggatacaaacgactgccagcctttgtatcttgaaattcaggaattttacgaaggactgaatatgaaagtggaacagcaggttcctctgcttctggtcgagcgacaagctttgaatgaagccatggaaggagagaaggctggtcaccaccatcttcctgaaacaagaggactatgcttatcagaagaacagactgttagcacgatactgagaccaagaatggctggaaacaaaattatgggaatgataacagagccatataggctgacacggcgatgtgaagtgactgcaattcttattctgtatggtctcccaagattgttgacaggttcaattttagctcatgagatgatgcatgcatggttgcggcttaaaggataccggacactgagcccagacgtagaagagggcatttgccaagttcttgctcacatgtggatcgagtcagagatcatggccggatcaggcagtagtgccgcatcgtcatcctcaggatcttcgtcatccacatcatcgaaaaagggcgggcggtcccagtttgagcacaggcttggggactttttcaagcatcagatcgagacggatacttccatggcctacggagatggtttcagaactgggaatcgagccgttcttcattacggcttgaagcgcacccttgagcatatccggctaactgggacctttccattttgaagtagcatggattcatattttgggaaagcttatattatatacatgattttcttccagagttccattacaaccaaagagataaattgtaaaaaaacattctttccagaatccagagatataatatctatgaaggccaaaatgaagtattaaatgattgagatcgatggtcagtctgcccaatcattttgtattctgatcaaactctggaatgaaacaatggcaatctttttatatggtgtcagtttcaataaataccagtaccattttacagtatatatacagttgctttcatgtgtgagcttatctcaaactacttcgtccgttccaaattataaggtgttttaggttgtgtttgttttccttttagattatataagttggattatagtcaaagtgtaggaggataaatatatcaatttgagatcacaaattgtaacacacaaaatcctaattttgggatttaaaaattaaaaaaatattatcctgaaatctaaataagagtattttcttataaaagattaaagtaaaagtatctcataaaagatattatatattagaaagtatttcctcgtaaaacaaaataagtagtaaatattgaagtttttgaatgaacttttaatttgactacatattcaaaatactttcgcagaatgaatatgatgtgtgttgcatattgaacattacctaaataaataaggtaataaataaatgaataaacttaagacatatattttgcatttatgttggagatttttttgtgcaaattagaattctatttgaatttaaacctaattggaattggaaaatatgaaataaaaaggaaaa

SEQ ID NO: 200066 - DNA, 839 bp, Zea Mays
caggaaggtcgagctggatggggacatgcgatggacatcacagaacagaagacgaaatgaatcgcaaggggaaactaacatgcgagagaggaggagggctagaataatgaacgatatgaagatcagcggcagcggggacgacgctaagtcgagcaatggcaaagcggcccgtggtggcagtaacggtggagagaagcagggggatgaatccaacggtggcgggatacttagcgttgtggcttccaggattggcgtggtcgtgtccggcgccaacggggaccgcagcggcagcgctgaggatggtgccaagacgagcgctggcgaccctggtcacggtagcaagggcgaggagaaggggcgtggtgtgaacggtggtagaatagtcgagcagatcatttccaatctgccctcagatgatcaggcgcctgatgccgatgaagcttccttgctcatcgccattatcgaagattagctccatgttccgaaggctctctaggtcgtcctcaatgccaggatcaaatcatcagctgagccggagactgaaaacaataaagaaaagcaagcagctggtcatagtaaacatcatgtagcgaggcttagcagattgctttttttcacgttagaatcagtccacatgtcctcgacacgggctagatttgttctaggattatttttccagtagtaagccatgtatccatggacagtccacagcgcgacgtctaatgtaacatcatcaaggttcttttgactatcccataagaaaccattccttaagacaaccgatattgtgagttgataaccaacaactaatgttagcatgcgattgttctgcaaaacaa

SEQ ID NO: 200067 - DNA, 743 bp, Zea Mays
aaggacttcacttgtttggccagttcaggacttcagcggggacgacgctaagtcgagcaatggcaaagcggcccgtggtggcagtaacggtggagagaagcagggggatgaatccaacggtggcgggatacttagcgttgtggcttccaggattggcgtggtcgtgtccggcgccaacggggaccgcagcggcagcgctgaggatggtgccaagacgagcgctggcgaccctggtcacggtagcaagggcgaggagaaggggcgtggtgtgaacggtggtagaatagtcgagcagatcatttccaatctgccctcagatgatcaggcgcctgatgccgatgaagcttccttgctcatcgccattatcgaagattagctccatgttccgaaggctctctaggtcgtcctcaatgccaggatcaaatcatcagctgagccggagactgaaaacaataaagaaaagcaagcagctggtcatagtaaacatcatgtagcgaggcttagcagattgctttttttcacgttagaatcagtccacatgtcctcgacacgggctagatttgttctaggattatttttccagtagtaagccatgtatccatggacagtccacagcgcgacgtctaatgtaacatcatcaaggttcttttgactatcccataagaaaccattccttaagacaaccgatattgtgagttgataaccaacaactaatgttagcatgcgattgttctgcaaaacaa

SEQ ID NO: 200068 - DNA, 753 bp, Zea Mays
atattccctcgcttcatgcttaacaatgagggagagactaagtgagcggggacgacgctaagtcgagcaatggcaaagcggcccgtggtggcagtaacggtggagagaagcagggggatgaatccaacggtggcgggatacttagcgttgtggcttccaggattggcgtggtcgtgtccggcgccaacggggaccgcagcggcagcgctgaggatggtgccaagacgagcgctggcgaccctggtcacggtagcaagggcgaggagaaggggcgtggtgtgaacggtggtagaatagtcgagcagatcatttccaatctgccctcagatgatcaggcgcctgatgccgatgaagcttccttgctcatcgccattatcgaagattagctccatgttccgaaggctctctaggtcgtcctcaatgccaggatcaaatcatcagctgagccggagactgaaaacaataaagaaaagcaagcagctggtcatagtaaacatcatgtagcgaggcttagcagattgctttttttcacgttagaatcagtccacatgtcctcgacacgggctagatttgttctaggattatttttccagtagtaagccatgtatccatggacagtccacagcgcgacgtctaatgtaacatcatcaaggttcttttgactatcccataagaaaccattccttaagacaaccgatattgtgagttgataaccaacaactaatgttagcatgcgattgttctgcaaaacaa

SEQ ID NO: 200069 - DNA, 4001 bp, Zea Mays
ctctctcccgtcttcgcttcctccccagtccgcaccccccacagacacagagagagagagagagcgtgcgtaccaaacaaaatcccatcgcgagacaacaaaaccaggccaacggattcttttggctgcggtggcggtgctgtggctggtgccccccttgctgcatcgccggctcgccgccgacatcggctcgcgcgtaccctagccggagccggagtcgctccccgcagcccccctcgtttgtctcggccaggggatgctcgcacgtccctgctagattcccgcggatctcgcgggcttgctggtggtgaaacgatggctaggtgagtacaagccgcgcgtgatctcctagtggttggtgcgagcggtggacggccaagatgatgccgtcgggcccgccgaacccgatggggcccggtcagccagtgagcggtgcggcagcgtcgctactacggacgagctccagcttgctcagtggcggtggccagcctgggatggctggaggtggtggtggcggcatgctttcttcacagtcgcccttctcctcgcttgtctccccgctcacacagtttggcggcaatggtcttcttggaggcgcctcgaatgtctcctccctgctgaaccggacgacgttcaggaatggtggccctatgccaggtccggggtcgatgcagggtggtgggatgcagatgagtacactccagcagagagctgggttggatggtgccagcgatttcattagcacgggagggtcagaccctctctcattcccgtcttcctcacaggttaatttggtcaatcagatgggatcagataatctgcaagtgacttcacagcagcaacagcagatggatgcagtgcaggatatgcagcagcagcagcagctaccaatgtcttacagccagcaacagttgccggcacaacactcgcagcagctccagcagccacaggctacagtgaagttggagaatggaggaagcatggttagcatcaaatcagagcagcagatgggacagcctgaacagaatggtcctgcccagatgatgcgaagtgctggttgtgtgaaacttgagccacagcagttgcaagcccagatgatgaggagtttaagttcagtcaagatggagcaacagagttcagattcatcagccttcttgcagcagcagcagcagcaacaacaacatcatttgttgcagctgacaaagcagattcgaaattgtccagaccttgtatcaatgggtggaccaaacacaactgcaaaccctcaagctgctgctgctgctgctgctcaactgaccctcttgcagcagcaacggctcctgcatatgcaacagcagcaccaacagcaacagattctaaagaacttgcctttgcaaagaaaccagttgcaacagcaacagcagcatcaacaacagcagcaacaacagcagttacttcgtcaacagagtctaaacatgagaactccaggaaagtcatctccttatgagccaggaacttgtgcaaagagattgactcattacatgtatcatcaacaaaacagaccacaagataacaacattgagtactggagaaactttgtcaatgagtattttgctccaaatgctaaaaagagatggtgtgtgtcactttatggaagcggtcgtcaaactactggagttttccctcaggatgtatggcactgtgagatttgtaatcggaaacctggccgtggttttgaaacaacggttgaggtgctaccacgactatgccaaattaaatatgccagtggtaccctggaagaacttttgtacattgacatgccacatgagtcccagaatacgtcaggccagattattttggactacacgaaagcaatccaagaaagtgtttttgagcaattgcgtgtcgtacgagagggacatctacggatagttttcaatccagaccttaagatcgcatcttgggagttctgtgctaggcgtcatgaagaacttattccacggagatctataataccacaggttagtaatcttggcgcagttgtacaaaagtatcaggctgccgcacagaactcaacgagtttgtctcctcaggacatgcagaataattgtaactcgtttgttgcatgtgcccgacaattggcgaaagcactggaggttcctttagtaaatgatttaggatacacaaaacgatatgttcgctgccttcagattgccgaggtcgtaaactgtatgaaggatttaattgatcacagcaggcagactggatctggacccattgatagcctgcataactttccgcggaggactccaggggttagcactcttcaaccgcagcagcaaactgaggagaagcaggccattccccagagttcaaaccagagtggccaaaattctgctcctatggctggtgtgcagccttctgcctctgccaatggtgacgtgacatcaaataattctctcagttgtgcaccttctacatctgcgccttcaccatcagttgttggactcctgcaaaattcaatgaattcgagacaagatcatccaatgagcggcactaatggtggcccatataatggaggcaatgtggctattccgaaggtgaactctacaagctcactgcagtcaaatccgtctacctctttcccttccccagcaccgacaacatccaataacagcatgatgcatgctcctcaaaacacaaatcagctgagctccccaactacatcatcaagcatacctcccatgcagccacttgatactcaacctcaggaggctgagccaagcgactcgcaaagctcggttcagaagatcttgcaagatctgatgtcatcctgtgttggccactcaggtaatgatacgaagacaccaaatggactaacccatggtgttaatggggttaattgcttagttggcaatgctgtcacgaataactcgggaatgggaggaatgggatttggcgccatgaatgggttcggtcatgggatgagaacggcaatgacaaacaatccgatggcaatgggtgcaaggatgggaatgaaccacagtgcacatgacctatcgcaattgggtcagttacaccagcagcagcagcagcatcaacagcagcatgacataggaaaccagctgttgggtggatttaggtcagcgagcagcttcaataacattcaatatgactggaaaccctcacaatagagcagccagaaaccatagagtttcagtgtgatgatgcatctggcttcgctggcaatgcgtgtggagcatccacatttatggtgccataacctccccttggcccaatagcatttgggcctttgcattaatgccgccatcaaagggtaccataagcgatagcaagcatcccggctggtacatgtaagtctaactgtcagtttagctatctcgtgtgtagctccctgagttttacaacattagtcgattttaccgggagttgcaataccatcatgtgtcacattgtttgtccactctttacccccttcaatgctgtgaaaagaaaggctaagtagctgtagcatgttatagtaggtgtatgtggggtaattcctcattagctcttagatctagtctttcctctgtctatttatacggttatcattgacatattgcggaatggagagccagacttacaggatttgtcactgaaactgtccgagttgggtgcctgtcacttactgcttgctccagttatctgagtgaggaagatactctgaaagaattagagcctctctgcactttttaccatctgtcagatcctattgtgctttgtggtacggaaatgaagttgtccctcgccttttttcctcgttggatgacatgtatcttatcctctgcaattcctaagactactggtgctgatatcctcttatcctcgcgtttggagaattctctttgtagctttactgtgctgcactgttgtataattggcacactgactagatcgaagtaccaccatggaatggatgttctcctagtcttgttgctttatactctctcctccgtctt

SEQ ID NO: 200070 - DNA, 4078 bp, Zea Mays
ctctctcccgtcttcgcttcctccccagtccgcaccccccacagacacagagagagagagagagcgtgcgtaccaaacaaaatcccatcgcgagacaacaaaaccaggccaacggattcttttggctgcggtggcggtgctgtggctggtgccccccttgctgcatcgccggctcgccgccgacatcggctcgcgcgtaccctagccggagccggagtcgctccccgcagcccccctcgtttgtctcggccaggtgtggcgcctgaccgcgcagctcgattcgccggattcgagctcctttgcgacggggaacctgcgggcgccgcggaggggatgctcgcacgtccctgctagattcccgcggatctcgcgggcttgctggtggtgaaacgatggctaggtgagtacaagccgcgcgtgatctcctagtggttggtgcgagcggtggacggccaagatgatgccgtcgggcccgccgaacccgatggggcccggtcagccagtgagcggtgcggcagcgtcgctactacggacgagctccagcttgctcagtggcggtggccagcctgggatggctggaggtggtggtggcggcatgctttcttcacagtcgcccttctcctcgcttgtctccccgctcacacagtttggcggcaatggtcttcttggaggcgcctcgaatgtctcctccctgctgaaccggacgacgttcaggaatggtggccctatgccaggtccggggtcgatgcagggtggtgggatgcagatgagtacactccagcagagagctgggttggatggtgccagcgatttcattagcacgggagggtcagaccctctctcattcccgtcttcctcacaggttaatttggtcaatcagatgggatcagataatctgcaagtgacttcacagcagcaacagcagatggatgcagtgcaggatatgcagcagcagcagcagctaccaatgtcttacagccagcaacagttgccggcacaacactcgcagcagctccagcagccacaggctacagtgaagttggagaatggaggaagcatggttagcatcaaatcagagcagcagatgggacagcctgaacagaatggtcctgcccagatgatgcgaagtgctggttgtgtgaaacttgagccacagcagttgcaagcccagatgatgaggagtttaagttcagtcaagatggagcaacagagttcagattcatcagccttcttgcagcagcagcagcagcaacaacaacatcatttgttgcagctgacaaagcagattcgaaattgtccagaccttgtatcaatgggtggaccaaacacaactgcaaaccctcaagctgctgctgctgctgctgctcaactgaccctcttgcagcagcaacggctcctgcatatgcaacagcagcaccaacagcaacagattctaaagaacttgcctttgcaaagaaaccagttgcaacagcaacagcagcatcaacaacagcagcaacaacagcagttacttcgtcaacagagtctaaacatgagaactccaggaaagtcatctccttatgagccaggaacttgtgcaaagagattgactcattacatgtatcatcaacaaaacagaccacaagataacaacattgagtactggagaaactttgtcaatgagtattttgctccaaatgctaaaaagagatggtgtgtgtcactttatggaagcggtcgtcaaactactggagttttccctcaggatgtatggcactgtgagatttgtaatcggaaacctggccgtggttttgaaacaacggttgaggtgctaccacgactatgccaaattaaatatgccagtggtaccctggaagaacttttgtacattgacatgccacatgagtcccagaatacgtcaggccagattattttggactacacgaaagcaatccaagaaagtgtttttgagcaattgcgtgtcgtacgagagggacatctacggatagttttcaatccagaccttaagatcgcatcttgggagttctgtgctaggcgtcatgaagaacttattccacggagatctataataccacaggttagtaatcttggcgcagttgtacaaaagtatcaggctgccgcacagaactcaacgagtttgtctcctcaggacatgcagaataattgtaactcgtttgttgcatgtgcccgacaattggcgaaagcactggaggttcctttagtaaatgatttaggatacacaaaacgatatgttcgctgccttcagattgccgaggtcgtaaactgtatgaaggatttaattgatcacagcaggcagactggatctggacccattgatagcctgcataactttccgcggaggactccaggggttagcactcttcaaccgcagcagcaaactgaggagaagcaggccattccccagagttcaaaccagagtggccaaaattctgctcctatggctggtgtgcagccttctgcctctgccaatggtgacgtgacatcaaataattctctcagttgtgcaccttctacatctgcgccttcaccatcagttgttggactcctgcaaaattcaatgaattcgagacaagatcatccaatgagcggcactaatggtggcccatataatggaggcaatgtggctattccgaaggtgaactctacaagctcactgcagtcaaatccgtctacctctttcccttccccagcaccgacaacatccaataacagcatgatgcatgctcctcaaaacacaaatcagctgagctccccaactacatcatcaagcatacctcccatgcagccacttgatactcaacctcaggaggctgagccaagcgactcgcaaagctcggttcagaagatcttgcaagatctgatgtcatcctgtgttggccactcaggtaatgatacgaagacaccaaatggactaacccatggtgttaatggggttaattgcttagttggcaatgctgtcacgaataactcgggaatgggaggaatgggatttggcgccatgaatgggttcggtcatgggatgagaacggcaatgacaaacaatccgatggcaatgggtgcaaggatgggaatgaaccacagtgcacatgacctatcgcaattgggtcagttacaccagcagcagcagcagcatcaacagcagcatgacataggaaaccagctgttgggtggatttaggtcagcgagcagcttcaataacattcaatatgactggaaaccctcacaatagagcagccagaaaccatagagtttcagtgtgatgatgcatctggcttcgctggcaatgcgtgtggagcatccacatttatggtgccataacctccccttggcccaatagcatttgggcctttgcattaatgccgccatcaaagggtaccataagcgatagcaagcatcccggctggtacatgtaagtctaactgtcagtttagctatctcgtgtgtagctccctgagttttacaacattagtcgattttaccgggagttgcaataccatcatgtgtcacattgtttgtccactctttacccccttcaatgctgtgaaaagaaaggctaagtagctgtagcatgttatagtaggtgtatgtggggtaattcctcattagctcttagatctagtctttcctctgtctatttatacggttatcattgacatattgcggaatggagagccagacttacaggatttgtcactgaaactgtccgagttgggtgcctgtcacttactgcttgctccagttatctgagtgaggaagatactctgaaagaattagagcctctctgcactttttaccatctgtcagatcctattgtgctttgtggtacggaaatgaagttgtccctcgccttttttcctcgttggatgacatgtatcttatcctctgcaattcctaagactactggtgctgatatcctcttatcctcgcgtttggagaattctctttgtagctttactgtgctgcactgttgtataattggcacactgactagatcgaagtaccaccatggaatggatgttctcctagtcttgttgctttatactctctcctccgtctt

SEQ ID NO: 200071 - DNA, 864 bp, Zea Mays
tccagagcatccaatctagatccaacggtttcatatgaaaggggttaaaagtaaaataggtactatgtttcaggtggaaggggttaaatgtaaaataacagtcatcattagatctagattagatgcaccaaatcgtttgattgcaaacttgcaccaatataagtgattgcataagatatttccccgccttcttcgtccacgcgaacgtggttgttttcaacagacgctcaattgcccaccataacaccgtttcgctttctcgctccaactcccacagaaacggccgccagcgccgcaggcccgcagcgttgatggccgccgcacctggcgcaccagaggagcgactcggcgtcctcactcctcaatgcctccgggagaagaccggaatctccgagcccaggtcggaggtgcacagggacggaaactaccaccgagcggtgaacgtgtggatctacagcgagagcaccggggagctgctgctgcagcgccgagctgattgcgaggaattgtggcctgggcagtgagacatcattagcgccggccacatctccgccggcgattcctcgcactctcggcagagggaccttctggaagatccaggcatcaaccatttcagtcgatgctttcgagctcatgtgtgtgtttcttcaggaacggtaaaattgacaaatattgtggaatagtgaatgctactagtgagagctagtgatgaagtcctaagaagaatatacctggttgaagtcaccagtatgataaagcactactgcaagaaggctgtatgctcctgccgtcattctatgataaggaccacaaacagcaacaagttttgcaagagcctgcacaatcatgtgcagattagaatga

SEQ ID NO: 200072 - DNA, 698 bp, Zea Mays
tccagagcatccaatctagatccaacggtttcatatgaaaggggttaaaagtaaaataggtactatgtttcaggtggaaggggttaaatgtaaaataacagtcatcattagatctagattagatgcaccaaatcgtttgattgcaaacttgcaccaatataagtgattgcataagatatttccccgccttcttcgtccacgcgaacgtggttgttttcaacagacgctcaattgcccaccataacaccgtttcgctttctcgctccaactcccacagaaacggccgccagcgccgcaggcccgcagcgttgatggccgccgcacctggcgcaccagaggagcgactcggcgtcctcactcctcaatgcctccgggagaagaccggaatctccgagcccaggtcggaggtgcacagggacggaaactaccaccgagcggtgaacgtgtggatctacagcgagagcaccggggagctgctgctgcagcgccgagctgattgcgaggaattgtggcctgggcagtgagacatcattagcgccggccacatctccgccggcgattcctcgcactctcggcagagggaccttctggaagatccaggcatcaaccatttcagtcgatgctttcgagctcatgtgtgtgtttcttcaggaacggctggtcttcaatgtggatctcctgctgtgctacagaagcag

SEQ ID NO: 200073 - DNA, 696 bp, Zea Mays
tccagagcatccaatctagatccaacggtttcatatgaaaggggttaaaagtaaaataggtactatgtttcaggtggaaggggttaaatgtaaaataacagtcatcattagatctagattagatgcaccaaatcgtttgattgcaaacttgcaccaatataagtgattgcataagatatttccccgccttcttcgtccacgcgaacgtggttgttttcaacagacgctcaattgcccaccataacaccgtttcgctttctcgctccaactcccacagaaacggccgccagcgccgcaggcccgcagcgttgatggccgccgcacctggcgcaccagaggagcgactcggcgtcctcactcctcaatgcctccgggagaagaccggaatctccgagcccaggtcggaggtgcacagggacggaaactaccaccgagcggtgaacgtgtggatctacagcgagagcaccggggagctgctgctgcagcgccgagctgattgcgaggaattgtggcctgggcagtgagacatcattagcgccggccacatctccgccggcgattcctcgcactctcggcagagggaccttctggaagatccaggcatcaaccatttcagtcgatgctttcgagctcatgtgtgtgtttcttcaggaacgcagtgatgcctttcaacaagtttctctgagcaagctcatc

SEQ ID NO: 200074 - DNA, 1564 bp, Zea Mays
atcgaccgtcgcacatcccaccaacaacaacaacagtcatcgccctcgcccaggcacaggcacacagccgccactgctcagctctccatgtcgtgccctccgaattcccaaatcctatggcggtggcgcctttgcccccaaccccgcgaggtcgtgagtccgtgactcatcttcctcctctttgccgggctgcacgtggagtggagatccaccagaccacacatgatcgcattgcccccaatccagtatgtaatctgtaaccctagctttgcttaccgggctgcggcacccactaccggacggacgggcgcacgcactgctgggctgcaacacccaatgcacggacgcacgcaccagcaccacgcactgcatccacatccacagattggccggtagaaactgtgatctgctctaatggctagtgaaggcgaagcttcacctccacgaaagcatatgttgttggagttgcctagtgaacatcaaagtcagaacttgacatcctcacctcatgcaaatacaagtcaacattttggtgtgtccgcatcatcgtcaacacctgctgcaacatctcatgaacaaggtgcaaatccagaagaaggaattaattaggatgaggatgattcttcaaagttgaagcaagcaaagaagtccacttcaaatgtttggcagtattttaagaagtatgaggttgtcgtagaggagaatggtaaatctgtgaagcaagtttgggccaaatgcaagtattctggttgcaaaaacaagactagcaaagctagggttaaaaatagtagaggaacaactgcattttggtctcatttgaaaaattatcatacgattgtgaaggggcaacaatagctcaaggcagaaaaggatcatggcacagatatatgcattgtccagccatataaatatgatgaataaaccagtttgagaaagttttatacagctattatcatgcatgagtatccatttaacattgttgagcatagacactttgtggaattcattaaatcattgaagcctacctttcctatgaagtcatgtgtcactattagaaaagaaataatggaactctacttgcatgaaaaggatgtgttgtatgatgattgggaaatacagaagagaattatcaatttcctccatgttccgagtcggcatagtggttccaaggctaagagtgttgctattcctaatatggtttgtgaaatggaggaacttgaggctcttgctagaaatctttcacttgaggatgaagacctagatgatgatcatgatgatggacctaaggcatcgttgtaagcttgttgacgaagacctagatgatgataatgcaacatgaatgctccgaatgtttttattgaacttgttgcgtaatgctttatgaccttgcgaacttgggacttatggacttgtggctttgtgaactttgtgatctatgtgatcaacttgttattgtgaacttgtgatcaacttgttattttttgaacttgtgatctgtgtgatgaacttgttatattgtgaacttgtgatctgtgtgatccacttattatattgtgaacttgtg

SEQ ID NO: 200075 - DNA, 711 bp, Zea Mays
gaacacggccttatcttagagtatgaaactgcggttgtaaacatgtttagcgccaactgctatgtacgtgatcaggtgcggcgctacgtgtaccatgacgtcgtccgcctcggcgacctagagaagctcatcgactgctcctgtgtccagacctacacaatcaacagtgccaaggtgatcttcctgaagccgaggccgcagtccaggcctttcaagggctccggcaacatctgcctcacgtgcgacaggatcctccaggagcccttccacttctgctccctctcatgcaaggtggaccacgtgatgacgcagggaggggacctgtccaacatcctgcagcactacggcgccggcggtggcggtggcggtggcacggcggacccggaccgcctcgcgttcccgaggttcgagaacctccgcgtcgtcgacggctcggacctcgacgacgacgtccaggtcgtcaccccagactccaccctcgaggacccgaccaacaacgcgggcggcgggtccagcgacaacggtactgacgacgccagacggcaggtcgtcgtccatggcggcggcgaggcggccaagcggaagaaagggggcggcttcttgccccagatcgtgctgtcactcggcggcggcggcggcggcggcaacaggaggaagggtgccccccacaggcgtcgccgtccacactcctctctcccagctcgctgccgt

SEQ ID NO: 200076 - DNA, 1177 bp, Zea Mays
gaacacggccttatcttagagtatgaaactgcggttgtaaacatgtttagcgccaactgctatgtacgtgatcaggtgcggcgctacgtgtaccatgacgtcgtccgcctcggcgacctagagaagctcatcgactgctcctgtgtccagtgccaaggtgatcttcctgaagccgaggccgcagtccaggcctttcaagggctccggcaacatctgcctcacgtgcgacaggatcctccaggagcccttccacttctgctccctctcatgcaaggtggaccacgtgatgacgcagggaggggacctgtccaacatcctgcagcactacggcgccggcggtggcggtggcggtggcacggcggacccggaccgcctcgcgttcccgaggttcgagaacctccgcgtcgtcgacggctcggacctcgacgacgacgtccaggtcgtcaccccagactccaccctcgaggacccgaccaacaacgcgggcggcgggtccagcgacaacggtactgacgacgccagacggcaggtcgtcgtccatggcggcggcgaggcggccaagcggaagaaagggggcggcttcttgccccagatcgtgctgtcactcggcggcggcggcggcggcggcaacaggaggaagggtgccccccacaggtcccctctggcctaagcagcgctaccttcatgcatgcgtccccctgctgctgctcgttatatatcacaagtcacaacacacgtagcgcgctgtggttgcatgcagtgatgatggtgtgggtggtagctacagtattaattagtagtagcgtgttataatagtatcttaatggtgattagcctcgtagagagacgacgacaagctggtagctggtcgatcggttttgcttgggggggaaggtcttggtggccttgtgatccgtctagcagctcgctaggaccaaccatggccgccgcgccatctcatgagactttagagagagagagagagagagagggtcatgggggaggtagaggggggagagacggttgtaaaagcagttcccattgttacaggcaccaggtagtaactggtcagtggggcccacttctgcaggcggtggggcccatacgatcgaggtggctaccaattttgtatttgatgtaccaagggttactcgcggtctcgcgcatacaatttcca

SEQ ID NO: 200077 - DNA, 1938 bp, Zea Mays
ggggccgcggccgccgggaacccgaggagtaggaggacgcgatgaaggcgcagccgctgctactgccggcgctcaagaggcggagaggccctcgcgtggcggtgctggcgctcgtcctctgctccctgctcgtgcccttggccttcctcttcgaccgcgccccctccggatacgtgacgacggaggagcggcaccgacaggaggtcgttctgcctttgttggatcacgtggcggagaagagacgtccgagtggtagtggcgctgacacgcgacaggatgcgctggagaagaaggtccccggtagtagtgcaggagtcattcatcaacaaacaccggataagaacatctccaaagtcattcgtcaacaaacaccggagaagaccatctccaaaggcagtgcaggtgtcgttcatcagtataagcaaattggtagccactccacaagtgatggtgctaaaccaaaagtttccccagcaccaaaagttgaaccatcagatgctgtttcagattcaactaaagtcgcaagagatactagccaagaaggtgaaaaggctgatgaagtggaaaagtcaaagtcttgtcaacttgaatttgggagttattgtctctggtccattgagcacaaagaagtaatgaaagattatacagtgaaaaggctaaaagatcaactcttcgtagcacgctcatactatccaagcattgcaaaacttcaaggacaggaagctctgactcaggaaatgaagcaaaacatacaagaccatgagaagattcttagtgtatcaacagttgatgctgatctaccatcctctatcaacagaaggatgaagcagatggagcaaacaatagtgagagccaaatcttgcacagtagattgtagaagtgttgacaggaagcttcgccagattctttatatgactgaggatgaagctcattttcatatgcagcagagtgcattcctctacaatctcggttcagtagtccagaatacaggcacttcgttatactatcaaggaacgttcttgcggcttctgtagcaatcaactcaactgtgagcagttgagccaggctactttgcttttcatatcctaactgacgctcagaacttctatgccatgaaacactgccactcacatttcgttattccagaaatattcaagtatctaaacaaggtggtcgtgttggatgacgatgtagttgttcaacgtgatctgtctttcttgtggaatattgatatgggagacaaggtaaatggcgctgtcgaactttgtggtctgaaactgggtgagatgaaaaatgtcttgggtaaaacagcatatgatccaaagtcgtgtgcgtggatgtcgggggtgaatttgattaatctggataaatggagggagcataatgtcacagagaactatctgcggctcatgaaaaagttcgaagtcaaggatgagctgtccctgcgagcagcagcatttcctctaagcttgctatccttccaacatctaatataccccctagatgaaaaattgacgctggctggacttggatatgattacggaatcgatgaagaggttgcgcggagatctgcatcattgcactacaatggcaacatgaaaccttggcttgaattaggtataccggagtacaagaagtactggaagaggtttcttgtccgaggagatcgatttatggacgagtgcaacgtaaatccgtgacgtagagttggacccgaaacgagaacgattgcgtgaatctgtgacgcagagttggatctgaaatcagaacaactggaatagacatcagctagcctcactgaagtttgtgtcggcaaattgtgaacgagaatgaattctggtggtggagctaggatttttttgagtggagattccaaacatgaaagtagtaaacactaatatatatacggtagtataaatttgagtaaatgatggggac

SEQ ID NO: 200078 - DNA, 1915 bp, Zea Mays
ccgaggagtaggaggacgcgatgaaggcgcagccgctgctactgccggcgctcaagaggcggagaggccctcgcgtggcggtgctggcgctcgtcctctgctccctgctcgtgcccttggccttcctcttcgaccgcgccccctccggatgcgctggagaagaaggtccccggtagtagtgcaggagtcattcatcaacaaacaccggataagaacatctccaaagtcattcgtcaacaaacaccggagaagaccatctccaaaggcagtgcaggtgtcgttcatcagtataagcaaattggtagccactccacaagtgatggtgctaaaccaaaagtttccccagcaccaaaagttgaaccatcagatgctgtttcagattcaactaaagtcgcaagagatactagccaagaaggtgaaaaggctgatgaagtggaaaagtcaaagtcttgtcaacttgaatttgggagttattgtctctggtccattgagcacaaagaagtaatgaaagattatacagtgaaaaggctaaaagatcaactcttcgtagcacgctcatactatccaagcattgcaaaacttcaaggacaggaagctctgactcaggaaatgaagcaaaacatacaagaccatgagaagattcttagtgtatcaacagttgatgctgatctaccatcctctatcaacagaaggatgaagcagatggagcaaacaatagtgagagccaaatcttgcacagtagattgtagaagtgttgacaggaagcttcgccagattctttatatgactgaggatgaagctcattttcatatgcagcagagtgcattcctctacaatctcggtgcccagacattgccgaaaagtcatcattgcctttctatgaggttgacactagaatatttcaaatcatcttcattggattctgatgattctcctggcaggttcagtagtccagaatacaggcacttcgttatactatcaaggaacgttcttgcggcttctgtagcaatcaactcaactgtgagcagttgtaaggagccaggctactttgcttttcatatcctaactgacgctcagaacttctatgccatgaaacactgccactcacatttcgttattccagaaatattcaagtatctaaacaaggtggtcgtgttggatgacgatgtagttgttcaacgtgatctgtctttcttgtggaatattgatatgggagacaaggtaaatggcgctgtcgaactttgtggtctgaaactgggtgagatgaaaaatgtcttgggtaaaacagcatatgatccaaagtcgtgtgcgtggatgtcgggggtgaatttgattaatctggataaatggagggagcataatgtcacagagaactatctgcggctcatgaaaaagttcgaagtcaaggatgagctgtccctgcgagcagcagcatttcctctaagcttgctatccttccaacatctaatataccccctagatgaaaaattgacgctggctggacttggatatgattacggaatcgatgaagaggttgcgcggagatctgcatcattgcactacaatggcaacatgaaaccttggcttgaattaggtataccggagtacaagaagtactggaagaggtttcttgtccgaggagatcgatttatggacgagtgcaacgtaaatccgtgacgtagagttggacccgaaacgagaacgattgcgtgaatctgtgacgcagagttggatctgaaatcagaacaactggaatagacatcagctagcctcactgaagtttgtgtcggcaaattgtgaacgagaatgaattctggtggtggagctaggatttttttgagtggagattccaaacatgaaagtagtaaacactaatatatatacggtagtataaatttgagtaaatgatggggac

SEQ ID NO: 200079 - DNA, 1901 bp, Zea Mays
cgaagcgctgtggccttccaaggacaaggttgattgttgaacacccaacgctctcacctcaccttccatcacggattcacggtcacggtcgaggaggaagaaacggtacctcgccgccgacccctccaacgccgacctcctcgaggttcatgaggagcttcttgctgcgattaaggatgccgaggagggtcttctccatttgaagcgctctaggctactgaagcaagtagatgagatctttccagataaggaatcaatatcccaatcacccgaagttgctattgagtcattagatccagatgatgttgagccagaaccactggagtcacatgatttttcagttggatcaaagtgtagattccggcacaacaatgggcgctggtataatggatgcattataggctttgaaggttcaggcgatgcaaggatctcatttctgacacctacatctgaaaatatgtcgatatgcaagttcttcctacagcagcgatgtcgatttggtagtaactgccgcatgtctcatggtattgtaatgccttctaaagccttgaagcgattcactccaactaggtgggagcagtccttggtaggctccagcatactggcaacttctgggtataactctggcctttggaggagagcagagcttgagtcatgggatgataatctgaagattggccaagttgtttttcaagatgatgggagttctgcgagtctgccaagtgattctctttctgtctcggaatacgctgacatgagtgacgaagatgaaggaagcttaagtgacgaagaatctgagttcagtgacgatgctgatcaagaggacggaagtgttcatcagggtcttggccttttagaattcacaaattttagtggcattcagacagataccatgatcttcgcaaaatgggagcaccacaccaggggtgttgcctccaaaatgatggcaaaaatgggttaccgagaggggatggggcttggtgtgtctggccaaggcatgcttgatccaattccagttaaggtactacccccaaagcaatcacttgatcatgcacttgcttcaagcgaggctgacggaggcagtgggaaaaagcgcagtaggggtgggaaaaggaagcgtgagaagaagtttgcagaacaggccagggctgctaaagctgaagaagctgagagatctgtctttaattttatcaacagccatctagtaagccaagaaggttcgaccaccaaagttagaaagggttcatcagttgagaccaatggactcgctaagaaggaagacagaagatccttggttgcatacggtgaggaagtgaaggagctgaggattcgagttgagaaactggaagagatgaagaaccgtaactgcaaagacaaggcattctttgaagcagcttcaaggaaactggaagagactcggaaggcactcgctgatgctgaagctacccacgcttcagcgacgagtgcagttactagaaaggagaaagagaagaaatggttgaaattctgatgtcaatttcatgtgtgccaacgcttctctgtctgtgttctgacaagaacgtggcatgatgtatgcaacttacaattgttccccatgtcagctcttagccttctacacttgtatgtctatcaagttttagatctgttgtagaagcagtaacactaataattattcgaaggatgtggtatttagatgagttttcggctagtcatcacgtaatactatctctgaaccgccgatcatttggtactagtagacatttcatttgcattccgttatatccagatggatgaataatccgcctattctgctggatgcagctactttttttttgttcacatctgccatagcatcgtacagaacccatatgaaatttatgtgtatgattcgaaacatgcct

SEQ ID NO: 200080 - DNA, 875 bp, Zea Mays
caggatgagagtgatgacggagtgcaattcaacgcttgaacatccgaacaaaaatccttctatatgcaaccaaacaataaatgttgtattggttccatttctatttcaggctaaattggtactactcatgttcaatttaattctcctatgctcaatatctacatccaaatagcctccgtgcccgcctacagacacctcgaggaccgccccctctcccccagtcccactccaaccgcaccactgtgggcgtcgcccccgagctcggaccacgacctttccaccctccgtgcccgctgtcgctcctcgttgccggccgccatcgatcttagcggcggtgtcgacgcttgcatggacgatgccctcaatgtgttcggtgaaatgggcacacgtgttgggatggtgactatcatccacgggggctggacatcgaggttatatcgaggctgatacacagaccgtctcttcacgcatcgcttctcatagcgtctcagttcctcgatccagaaatggtgtgctcatcatgttgtccgtggcctctattttctcaggcgcaaatgcacctctcctcggctatgttccaactttgtttagctggggagagaaagataagcccgattacatatccattttagtgttctaatgacgtcaccaatagttcccatttaagagtaatcaataagctcacaacataaataaattacagcagagtacattgcttattggagcatgggtgaaacctgtttattaagttttatgctgctcataagtttccgtttaggcaaggaaaaactaatatgtatccttacaagctggattcattttttaagttatttatattttagaatttcggttgttctgaggattttaactatttg

SEQ ID NO: 200081 - DNA, 1883 bp, Zea Mays
cccagatccttgcgccaagggccggcctagagattcggcccatcgccggtgttctggtggatcacgcgtccttctctccaaccgcaccgaccgatatcttcctctccgctagggcaagggcggtgccggtgaggcgatccgtcggtggtgtcggagcggtggaggaggatggccgacgtgcagggagacaacgaagcagttctggaggacgacgctttccccgacgacgggcccttagatacggaggagggaggtggaggagaacccatcagcggaggcgacgaggaagaggaggaggacgtcgacggcctcgccagcttccttgagtcggagatcctctccggatccagcgacgaggatcctattgaccaatcgaattggttgccgcggcaggagcagcggcagcagaaggaggaaggtgatgctgcgaagaataagcggaagcagggttcaggatcggacggggatggctgcagcggcagcgagggggagcagacgaagagggcgaggagggaggagaagaggaggcaggcgaaagggaaagccgtggcgcctcagatcgacacgggcttgttcagcaacgtcccccctgagctgttcctgcagatcttcaagttcctctcctcggaggacctcatctcctgcgctctagtctgccgcttcatgaatgctgccgcgtccgacgagaccctctggcgccgcctgtactgcatgaggtggggactggcctccaatgccaaattcagggagtgcgcttggaagaacctctacatacagagagatagagaggatatggttgaatttgtgaggaatactcctacagagttcaaggagtactatattcagatgcaggctgcaaaaaggagtcaagctccccgtccgtcagaagtcaacgacgacaaggttatgcttgataagacagtagctgaccaggtatctagttggaaaaacagccgggggcttactgatgaagctgtcaaggggcactcttgttctggaaatacatgctcgtacacccagattggtgatgcttacatttgtgagaagactggtcgtgtccacgtgggctgcttctttgtacgatatctggccactgctttgagaggtggctgtgtcctgatgatgaatgggatgctgatgataccgatctgcaacaggctggtgtagtggatgaagcagagccattcatgggatctggacgttacgcacgggcgattatgttgggctacaactgcactgatgagaaggagcttgaggatgccttgcgtttctgttgacgtgtttctgtcgatatgcccttcactcttgatcaagtgaagacgaagccagcggggatatgccggatgtatagctctgtgctatgttttcactgtatttcaccctcgagcatgtacctaagaatagaaggatgtacctaagaatagaacttgtttttgaggtagatcgctgatatgttttgatcagcagagggagccgttatgttgtcgtatgatttcataaattatgcctgtaataaaatataatttacataatgagttttttgtttgtatgatatgatggtggtatatcgtagatgcatgtgagatgccgacgcgtctcgactctacgaatttcaggtccagctcaggctggagggctttaatccaagtatttcatgtctgttgtagcttctacctaaataggtgcgttgtagcttcttctacctaaaaatagctgcttcaaaaacaaggttttcgtaccccttcgtaaagttacacgaaaattactcaccagattgcatgtcattatgttttgcttctattcgcttgtgtttttcttgtaattgattgtgcacccaggagatggatcgagtcctcttctagcgaggcgtccccatcgagcgg

SEQ ID NO: 200082 - DNA, 1535 bp, Zea Mays
cgagccgggttggacacgtaagacatcagcctctgttatcctggcccacacatcagcctccctggagtaagcgtggtagttgccactgccgtcccctccagaagtgcgatacagttcggattcagatcgcggccggtgcgaacccacgaaggcacgaacggtagaacccgaccgagcgcggcagcgcaaacctccgatccctgctgcgagcaagggattccgctctgatgatgctaaggaggtagtccattatcaaacaatctcaccaaagaacttagctaaatctgttcttgaggaaggtggctggtcaacctttatgtgttcaagggaggatactgagaagcatgttgatgttgccattgtttttattggctcaaagctacaatcatcagacatatcgaaagataagcaagttgatccagctttagcagatacattgaagctctccttcacagaatcagagttttctatggcattcccctacgtttccacatcagacgatgagaaactggaggagtcattgctatcaggcttcactgagaactgtaaaagtggttttggaagaaaccgtatcacctacacagacacgtgcgccgtgagtggccaagatctgaagacgtatcacaacatggatgctatcaatgacttggtagtgtcaggaagaaccaacccgagtggacagactgatgtaatcgtcttctgcagcggcgggttcgagaagttaggcaccacggaatcggaaggggagctgctttcccagcttgtcgacttgctgaagctgtctggggctagacacacgattctctacgcttcccagccatctggttatctactggagaacccttccggctcgccagtggctaggcaccttgcggagaggactaacggtacaaaaactggcctactgagcaaatgtgacggagagtgcctagtcaaatcaactcttcttgaaggaacctttgtcggaatagtgctccttatcatcttgatatcagggctcatgtgtatgatgggaatcgatactccctccaagtttgaagctccccaggagtcttgatctcccttcgaagcagaacccttgttttgttggtctgcactgtggatagatattattcagtttccccctttgaaagcgcctttcgtataattattattatttttttactgagccatctgttatttacgatgtgctcaaacttttgacaccaaacgaatgcatgtgtgtgaggcttgtgctgtgaccagacatagcattgcctccaggtgttttctgtgaataacctggaatttcaggtgggtactgtgcatcaaataaaaaagatgaaatcttgctgttgcaccttgtgcctcaaccaaaaactgtaaaatgtcatggtcgatgttgtcagcatccatgattaggacagaaacaaaagccaacttttgtagctttcactgcttgcgcggttacggtcactgcgcagccttaccgcgcaagcaagtgatcaagtcaggagccatgcatcgattatgatctgcttctaaaagaaatggga

SEQ ID NO: 200083 - DNA, 670 bp, Zea Mays
atttttttgtaatgtataatcacaataaatggagaggacgatgtactcagggtgtttgtctcgcacccaagcagaagatcagaatcaagctgcggtcctactgggtgccgttgatagaggactcatgcaagaagataattgaagctgcccaaacaaccaacgcaaagaccatgggtcctgttcctctgcccactaagcggagagtctattgtgtgctcaactctcctcacgtgcacaaggattcacggttccattttgagatccggacgcatcagcggctgattgatatcatgtatccaactgcccaaacaattgattcattgatgcaactccagctccctgccggtgtggatgttgaggttaagctatgattctgttggagctaaacttttccaagtttgatgtaatgtggtactcattttctgcagcttttcttcttgatccttttgttgtctggatgggcaaaacactttttcatgctggttgcactgattctgggacaagactaacgaagctttctaacttgcagactactttcatattttcttttagagacttttggactgagctcaactggtcatatcaaactattatttggtcaattttatatgtatccaagtaaacaacagttgtaaatcaattattaggataactacatagcaaaaattgt

SEQ ID NO: 200084 - DNA, 1776 bp, Zea Mays
atttgttaggtcttctatcaaatgatgtttgtttagtaaaagggtatctgtgagcaatccagtgatgcttctagatgaaattgacaagactggttctgatgtacgtggtgatccagcatcagcactactggaagttcttgatcctgagcagaacaaagcattcaacgatcactatttgaatgtgccgttcgacctgtcgaaagtcatatttgttgcaactgccaataagatgcaacctataccccctcctctgttagataggatggaagtcattgagctgccaggctacacacctgaagagaagttaaaaatagccatgaaacatctcataccaagggtattggagcagcatggcttgagtacggcaaatcttcagattcctgaggctatggtcaaactgatcatcgagaggtacactagagaagctggtgtgcgcaatcttgagcggaacctagctgcattggcccgtgcagctgctgttaaggttgcagagcaagttaaaactcttagacttggcaaggaaatacaaccaatcactacaactcttcttgattcgaggcttgctgatggtggtgaagttgaaatggaagttattcccatggggcatgatatgtcaaacacttatgaaaatccatctcctatgactgttgatgaggctatgctagaaaaagtacttgggcctcctagatttgatgatacagaagctgcagatcgtgtagcaagcccaggagtatcagttggccttgtctggacttcggttggtggggaagttcagtttgtggaggctacagccatggtgggcaagggtgacttgcatttgactgggcagcttggtgatgttattaaggagtcagcacagttagctttgacatgggtgagagcaagagctgctgacctcaatttgtcacctgcttctgatatcaacttattggagagccgtgatattcacatacattttccagctggtgctgtgccaaaggatggcccttctgcaggcgtgacattggtaacggcactggtgtcactttttagtaacagaaaagtcagagcagatactgctatgactggagagatgactctaaggggcattgtattgccagttggtggtgttaaggacaaggtacttgcggcacatcgttatggaatcaagagagtaattttacgtgaaaggaacatgaaggacttatcagaggttccatcaccgattctctctggcatggagattctgcttgtgaaacacatcgaggacgtactcgaccatgctttcgaaggcggatgtccacttaaatcacgctccaagttatagcatccaactcgcctttgctatggatatttgcttcggaggatcatcgtcaacagtaccacgaatggtcaacagtcagaataagagcctagctctcttgccagcacaggtcttgacacgcccatttttgttaggcttcgcatctgaatgtgtatactggtcagaattcggagagcagtcagaagatctgctcgttcacctgctgggactcattgcatagtttctcgacaccagctgttgatgtttatgcacagatgcaacagaaatcagggaggaattacgctggttggtttctctgtcgtgggtgtatatatgtatgtatgcatgtaatctaatccagggaaatatagctacaacaaggttgtcaaaactaaagacatcgagaaacatcacacgtcctttgggcttgggtgactttattataaatgtatgtacatataacccaaaatgcgcacgtgcgtggtcctgcattc

SEQ ID NO: 200085 - DNA, 2656 bp, Zea Mays
gaaattatcaatgggggtgtagcttacaatgacgctgttttattctaactgcagaagcagaagacagttggtaggacaaaggtgctccttgatacggttcctgtttacaggctagctgatatttttgttgctagctttgagataagttttgaggagcagctttcaatgctggattcagttgacttgaaagttagactttcaaaggcaaatgaacttgtagatagacacttgcagtccattcttgtagctgaaaaaataactcaaaaggttgaggggcagctatcaaagtcacaaaaagagtttctactgcgccaacagatgagggccataaaagaggaacttggcgataacgatgatgaagaagatgatgtggctgcactggaaagaaagatgcagaatgcaggaatgcctgctaatatttggaagcttgctcaaagggaaatgaggtaagctatcatgccatatccttctatctttgtgcacatgtggtattggagatttttgtatctagttagcctttttgtacaggcgcctacgaaagatgcaacctcagcaacctggttatagtagctctcgagcctacttggaacttcttgctgaccttccttggcaaaaggtcagtgaagaaagggagcttgaccttagagctgcaaaagagagccttgaccaggatcattatggactaacaaaagttaagcaaaggattattgagtatttggctgttcgtaaggggtccagtgctgtgttttgttggaccacctggtgttgggaagacttctttggcctcctccatagcaaaggccctgaacagaaaattcttaagaatctctcttggtggtgtaaaagatgaagctgatattaggggccaccgaaggacatacattggaagcatgccagggagacttattgatggactaaagagggtatctgtgagcaatccagtgatgcttctagatgaaattgacaagactggttctgatgtacgtggtgatccagcatcagcactactggaagttcttgatcctgagcagaacaaagcattcaacgatcactatttgaatgtgccgttcgacctgtcgaaagtcatatttgttgcaactgccaataagatgcaacctataccccctcctctgttagataggatggaagtcattgagctgccaggctacacacctgaagagaagttaaaaatagccatgaaacatctcataccaagggtattggagcagcatggcttgagtacggcaaatcttcagattcctgaggctatggtcaaactgatcatcgagaggtacactagagaagctggtgtgcgcaatcttgagcggaacctagctgcattggcccgtgcagctgctgttaaggttgcagagcaagttaaaactcttagacttggcaaggaaatacaaccaatcactacaactcttcttgattcgaggcttgctgatggtggtgaagttgaaatggaagttattcccatggggcatgatatgtcaaacacttatgaaaatccatctcctatgactgttgatgaggctatgctagaaaaagtacttgggcctcctagatttgatgatacagaagctgcagatcgtgtagcaagcccaggagtatcagttggccttgtctggacttcggttggtggggaagttcagtttgtggaggctacagccatggtgggcaagggtgacttgcatttgactgggcagcttggtgatgttattaaggagtcagcacagttagctttgacatgggtgagagcaagagctgctgacctcaatttgtcacctgcttctgatatcaacttattggagagccgtgatattcacatacattttccagctggtgctgtgccaaaggatggcccttctgcaggcgtgacattggtaacggcactggtgtcactttttagtaacagaaaagtcagagcagatactgctatgactggagagatgactctaaggggcattgtattgccagttggtggtgttaaggacaaggtacttgcggcacatcgttatggaatcaagagagtaattttacgtgaaaggaacatgaaggacttatcagaggttccatcaccgattctctctggcatggagattctgcttgtgaaacacatcgaggacgtactcgaccatgctttcgaaggcggatgtccacttaaatcacgctccaagttatagcatccaactcgcctttgctatggatatttgcttcggaggatcatcgtcaacagtaccacgaatggtcaacagtcagaataagagcctagctctcttgccagcacaggtcttgacacgcccatttttgttaggcttcgcatctgaatgtgtatactggtcagaattcggagagcagtcagaagatctgctcgttcacctgctgggactcattgcatagtttctcgacaccagctgttgatgtttatgcacagatgcaacagaaatcagggaggaattacgctggttggtttctctgtcgtgggtgtatatatgtatgtatgcatgtaatctaatccagggaaatatagctacaacaaggttgtcaaaactaaagacatcgagaaacatcacacgtcctttgggcttgggtgactttattataaatgtatgtacatataacccaaaatgcgcacgtgcgtggtcctgcattc

SEQ ID NO: 200086 - DNA, 994 bp, Zea Mays
ctgcgtggtccaaatatccggcccaggcatgaatggtcggttacaccggccaatcctcccctcgagcctggacgcagcacgacctcagatcacggcgcgccggcgcgggacgacggcatgacgccgccgtcaatcttccaccacccttgacgacattgatgagttttttagaagtagggaatatgttcaggatgaaatggaggacagcaagagtccaaaggatttaccccacctgaacagtgagactgtgcgagccaagggcagccattacagcatttatgtgtttagattttacaatacaatagtataaaaacgaattgatgctcgttaaatagcacgtgatgcatctagtcagctcaattcctgttttggatgttgggtggttgatttgatcataactccttgtttcgaatgtggacctcatcattatttccctgacatcctgtctagaattgagatgccttcatttaagattcggaccacttaattggaagttatctggactgtaggaataaataggtgctgggaggaataatgaggtaaattacaatggtcccgtaacaatgataaaaggccattgagacctgaatatagagatgatcacatgctcttggtgtagcttgccactctcaccaatcaagttttcatgtctgatctcgacattcagatcccaactgccttcgatcccttcgctgaggccaatgctagggactctggtgcggcagcagggtcaaaggactacgttcacgtgcgcatccagcagcgtaatggtcgcaagagcctgactaccgtccagggattgaagaaggagttcagctacagcaagatcctcaaagatctcaagaaagagttctgctgcaatggtacagtggtccaggacccagaacttggacaatgttacttttatgaaagaatgcactgattgctgtttggccaattggttgaaataacaatttagtttagagcaactttgttcttcaccttgcatcattct

SEQ ID NO: 200087 - DNA, 1657 bp, Zea Mays
atgcctcctggtcgtgagaaggttggagtcaaaaggccacatggacctcagctatcagggctcaaaggaatgtaacataagaactactgataattctcttggtgcaatcaagctctggtctaagagagtttttgcgcaacaagaaactactagaattacaaggtcaaagaaaaatattgctcaacctgatgcaactcttacaccaaggcacaacattgattaccacacacaggctaatggccatgcccatttggatgagaacactaacatgaccaatgaaggtcatgttgctccttttgatgggaagaaccctacaggcaatgaagataatgtggatgtcctagctgataacaacatgacgattggaggtcaagttgatgacactaatcagatgtcgaacggagatttagaattaggtcagaatgatcggtgggaaaggggaatcaatatgggacatggtcttcatagaattaaccgaggtttgcgtggaaagttgcaagttgttattcctgaagggaagataaggcctatggcaccacttgttgctgctaagtttgcaactgaatgcaacattgttgtgaggaaccatgtgccagtgttcaaacattggaaggattacaagaaccattcaggcctattcaatctatttacaggaaaacttagtgcaaagtttgacattaacacaagtgatgcaccagttcaaaaggcttgttcccagatgatgaagagtgcagttcgacaacaacgataccggctcaagaaaaagtactttgatccttttccgctacatctagtggcaaaaaaatctccaatcagatctatgactgatgaagagtggaatgaacttgtggagtattggaagagtccaaaaaagtggtatgagacatctcaaaaaaacaaagagaatcgatccaaagttaaattccatcaaacaactggctctcgtagctacatggttcatgtagaaaatttgggagataaatacattgatcaagaacctgatgcactggatttatttaaggagtgtcactacagcaagataaagaaatgctattcatcttctgttcaacaagttataactgaaatagaaaacaagtggtctacaccaacagaaggtgaacaagaaatgtttgtgactgaagttgttgctgatgtacttgctcaaaatacaaagaaaaatttgttccttcaaaatgtggggatacaaagtgcttatccaaggtctagtgtaagaaatatcgaagcacaacttgaagtagagaagagagcaaatagtgctcttcgatctgttgtcaacacccaacgggaggaactagaagtattgtcaaagcaaatgcatgaagcagaagagtcacggatcaaggagcaagaggaattgaagaagaggcaagttgagatggaagcagagatgaagaagaggcaagctgccatggatgccaagctccaacttttgtttagtaaatttcaaccacgttagttgcatgtgtggtatgtgaagtcaggttcaatataggttttggtgttgtagtcttatgttattactgtgatggagtgactttggatggcaacttgatttgtgttggaatgatattggttggcaattttatccttgtgatgttattatattattgatgttgagatattattttgaactgtg

SEQ ID NO: 200088 - DNA, 1570 bp, Zea Mays
acagcagcagcagagccgcgcatctccttcctcgcgaaaccgagtaggtggaggccttatcctcttcgttgccacgacccacgacgcagaccccaacccactcccactccgacaggaaaagaaaagggaggacgacggagtcgctcgccgtagatcggatgagaacagagatggactgctgtagataatgctacacttttccggggttttctctctctctctctcccgcgagctgactgacggctcctttatctcctcccgcgtgcatcccccagctactcgtcattcttatccgcctgcctccgccctccgccaccgctacctttatagctctagcttccttcctccattccctcctcatgccttcgtcttcgtcgtcctgcagccccgcaatagagcatcgtacttcatcgttccacttacatcgtttgttcgttcgttcttccgcgtgatctgcttgggagttgggggcaatggaggcctacgtcctgttcgcgcgcgccaaggagcaggaggaggacatcggctgcccgtccgagtcgtccgcggcgcgttccacgtcctcgtcgtcggacggggtggacctcgccgacgacgccagctcgtccgggtccacctgccacttcgagatggcctccctcatgacgcacctcccgatcaagaggggcctgtccaagttcttcgccggcaagtcgcagtcgttcgcgtcgctggcggcggtgggcggcatcgatgacctgcccaagccgccggcgaagcggctcaagacgtcgtggagctgcggcgtcggcctcgaggacgcgcgccgcggccctccctccgtgacgaccgccaataagcaggcgtccagcagggcacggctgacgccgtcggcgctcggctcgacgccgagaaggctggtgcgagcgcggccgcttgtaacggcgagaccggaggcggcggccgggaagcccctgttatttgcatagggggaagggattcgcctgcctaccaagctaacatgttacaaaggtgtccttttttcatggatttgacccagtttgcaatgcatcatattgaacacgcttgataaatgtgctgccgatagttttagaggtcttagtgatgctacgctgactattgcctaggagtacaagtacacaaaattacaaagacaaggtgagctcccctattctctacttttttttttttgaacaagcaggcactttcttgccgtttttttgctttttgactttttttgaaaaattttcacaactacacactttctagtttgaattcacgaaatgaacctttactcggcgccattatcattgacgtcaaggtcacacgtctcaacgtcaatataaataacgtccagatctagctctggtaagtcgatctggcgcctatatggcaggatgtcagcgccgtggttattggtgccgacctccttttcaagaaacggcggctcggctcatatctcaacaagtggtgcgcgtggctcgtatgtgttatatatatatattagtatatctatgtatttatattaatataacatataatttattaatattataatatatatattata

SEQ ID NO: 200089 - DNA, 1700 bp, Zea Mays
aaaacagtggtggagctcaatcaatccaaagtgcgggcgaaaccgaaagcgagaggggggagactgggagagagagggacgagcggcgcggtctgctggtccgtcggcggcgaccgcgacgcctcgctgcagcggccgacgcatccgccgcgggcgtggagctcgccctctcctggctcgcaggagctcgcgagttgtttcgggtgcgagaggagctctgctgtccagttgctacgcaaacgggaacattctgttgatacagaaagtgttcctgcggctgaagaactcagagtacaggccgaaccattggcaggtgacacaaatacagaaacaatatcaaattctgcctcctcaccgagcacatctcttcaagcttctcagaccgaacttggtacaaaggagcatcaggctgctgtagttatccaatctgcctttcgagcattcttggctaggcgggccttgcgggcgttaaaaggactagttagactccaggcacttgttcggggtcatgctgtaagaaaacaagcagcagaaacacttcagtgcatgcaagcgctagtaagagctcaagctcgtgtcagagcgagacgagtccgtgtttctttggaaagccaagggactcaaaagaaacctcctgaagaaaatgttcatgaggatcatgttcgagatattgaggaagactggtgtggcagtataggctcggtagaagaaatgaaagctaagacattaaaaaggcaagaggctgctgctaagcgggaaagggcgatggcatatgctttaacccatcagtggcaggcaagttcaaggaaacagaaagcagcaagcctccaaggccaaggactcgccggggacgagaaccagtggggacgaaactggctcgagaggtggatggccgcgcgcccgtgggagaacaggttacttgacagcaacgccagggacagtgtcactgccggcgacgacgacgacaaaccagcggaggaaggcaaggcaaaagctccggacctgagcaaaccaaaaggaaaagctcccgttttggcctctcagtctaacgggtcgcggcaggagaaagctgcagaccacgagaagtcgcattctgatgtcagcggctgtggctcttcgtcggggcggtctgcggacgtgcagccaacggtttctctagagtcgtccaaggtggaagtgaaggtgaaggcaccgcaggaggtcgcagatgaagcgagctctggaccgtcgaatccggcttcccggtccgcaagcaatccgaaagaaaggccggcgcgaaccgatgcgccagcgaggaagcggttatcgcttcctaacaacgcaacagcagccagtcggggagtagggaagcgccctaccaacagtagtcggagtcggacgaacgtggcctcgagaccgaagaatggcagaggcgcctccagcccaggcctcgagtagtgtcgtagggtggttgtgttgtgctggtgtacattgtttacgttgctgtgtattctaccattgtgttatgtattttttgtgcgtgtgtgtgtctgtgttctgttcaaattgcgtcctttcgaactgctcagtctgtggacgtttggaaaagcatgtttctggattctgtgattcggtcttcagcaccagtgtttggttggttgggtggtggtgatattatggatatcatagttagggcatgtttggtttgtggctaaatgtgc

SEQ ID NO: 200090 - DNA, 1936 bp, Zea Mays
aaaacagtggtggagctcaatcaatccaaagtgcgggcgaaaccgaaagcgagaggggggagactgggagagagagggacgagcggcgcggtctgctggtccgtcggcggcgaccgcgacgcctcgctgcagcggccgacgcatccgccgcgggcgtggagctcgccctctcctggctcgcaggagctcgcgagttgtttcgggtgcgagttgcttcttagtgctagctgtcgaaggcaacgaggaaaagactgccatggggatttcagctaagtggatcaaatcacttgttgggataaaaaagcacgaaaaagggcgaaatgctgaatgcagcgatgcgcatggactctgcaaccacttctattgttggcgtgtctttgtcatttgatacccatcaagggttattggcgcactattcagtcctagttatgagcagtgtcacatttggccaaaggagctctgctgtccagttgctacgcaaacgggaacattctgttgatacagaaagtgttcctgcggctgaagaactcagagtacaggccgaaccattggcaggtgacacaaatacagaaacaatatcaaattctgcctcctcaccgagcacatctcttcaagcttctcagaccgaacttggtacaaaggagcatcaggctgctgtagttatccaatctgcctttcgagcattcttggctaggcgggccttgcgggcgttaaaaggactagttagactccaggcacttgttcggggtcatgctgtaagaaaacaagcagcagaaacacttcagtgcatgcaagcgctagtaagagctcaagctcgtgtcagagcgagacgagtccgtgtttctttggaaagccaagggactcaaaagaaacctcctgaagaaaatgttcatgaggatcatgttcgagatattgaggaagactggtgtggcagtataggctcggtagaagaaatgaaagctaagacattaaaaaggcaagaggctgctgctaagcgggaaagggcgatggcatatgctttaacccatcagtggcaggcaagttcaaggaaacagaaagcagcaagcctccaaggccaaggactcgccggggacgagaaccagtggggacgaaactggctcgagaggtggatggccgcgcgcccgtgggagaacaggttacttgacagcaacgccagggacagtgtcactgccggcgacgacgacgacaaaccagcggaggaaggcaaggcaaaagctccggacctgagcaaaccaaaaggaaaagctcccgttttggcctctcagtctaacgggtcgcggcaggagaaagctgcagaccacgagaagtcgcattctgatgtcagcggctgtggctcttcgtcggggcggtctgcggacgtgcagccaacggtttctctagagtcgtccaaggtggaagtgaaggtgaaggcaccgcaggaggtcgcagatgaagcgagctctggaccgtcgaatccggcttcccggtccgcaagcaatccgaaagaaaggccggcgcgaaccgatgcgccagcgaggaagcggttatcgcttcctaacaacgcagccagtcggggagtagggaagcgccctaccaacagtagtcggagtcggacgaacgtggcctcgagaccgaagaatggcagaggcgcctccagcccaggcctcgagtagtgtcgtagggtggttgtgttgtgctggtgtacattgtttacgttgctgtgtattctaccattgtgttatgtattttttgtgcgtgtgtgtgtctgtgttctgttcaaattgcgtcctttcgaactgctcagtctgtggacgtttggaaaagcatgtttctggattctgtgattcggtcttcagcaccagtgtttggttggttgggtggtggtgatattatggatatcatagttagggcatgtttggtttgtggctaaatgtgc

SEQ ID NO: 200091 - DNA, 1933 bp, Zea Mays
gtccaaaacagtggtggagctcaatcaatccaaagtgcgggcgaaaccgaaagcgagaggggggagactgggagagagagggacgagcggcgcggtctgctggtccgtcggcggcgaccgcgacgcctcgctgcagcggccgacgcatccgccgcgggcgtggagctcgccctctcctggctcgcaggagctcgcgagttgtttcggttgcttcttagtgctagctgtcgaaggcaacgaggaaaagactgccatggggatttcagctaagtggatcaaatcacttgttgggataaaaaagcacgaaaaagggcgaaatgctgaatgcagcgatgcgcatggactctgcaaccacttctattgttggcgtgtctttgtcatttgatacccatcaagggttattggcgcactattcagtcctagttatgagcagtgtcacatttggccaaaggagctctgctgtccagttgctacgcaaacgggaacattctgttgatacagaaagtgttcctgcggctgaagaactcagagtacaggccgaaccattggcaggtgacacaaatacagaaacaatatcaaattctgcctcctcaccgagcacatctcttcaagcttctcagaccgaacttggtacaaaggagcatcaggctgctgtagttatccaatctgcctttcgagcattcttggctaggcgggccttgcgggcgttaaaaggactagttagactccaggcacttgttcggggtcatgctgtaagaaaacaagcagcagaaacacttcagtgcatgcaagcgctagtaagagctcaagctcgtgtcagagcgagacgagtccgtgtttctttggaaagccaagggactcaaaagaaacctcctgaagaaaatgttcatgaggatcatgttcgagatattgaggaagactggtgtggcagtataggctcggtagaagaaatgaaagctaagacattaaaaaggcaagaggctgctgctaagcgggaaagggcgatggcatatgctttaacccatcagtggcaggcaagttcaaggaaacagaaagcagcaagcctccaaggccaaggactcgccggggacgagaaccagtggggacgaaactggctcgagaggtggatggccgcgcgcccgtgggagaacaggttacttgacagcaacgccagggacagtgtcactgccggcgacgacgacgacaaaccagcggaggaaggcaaggcaaaagctccggacctgagcaaaccaaaaggaaaagctcccgttttggcctctcagtctaacgggtcgcggcaggagaaagctgcagaccacgagaagtcgcattctgatgtcagcggctgtggctcttcgtcggggcggtctgcggacgtgcagccaacggtttctctagagtcgtccaaggtggaagtgaaggtgaaggcaccgcaggaggtcgcagatgaagcgagctctggaccgtcgaatccggcttcccggtccgcaagcaatccgaaagaaaggccggcgcgaaccgatgcgccagcgaggaagcggttatcgcttcctaacaacgcagccagtcggggagtagggaagcgccctaccaacagtagtcggagtcggacgaacgtggcctcgagaccgaagaatggcagaggcgcctccagcccaggcctcgagtagtgtcgtagggtggttgtgttgtgctggtgtacattgtttacgttgctgtgtattctaccattgtgttatgtattttttgtgcgtgtgtgtgtctgtgttctgttcaaattgcgtcctttcgaactgctcagtctgtggacgtttggaaaagcatgtttctggattctgtgattcggtcttcagcaccagtgtttggttggttgggtggtggtgatattatggatatcatagttagggcatgtttggtttgtggctaaatgtgc

SEQ ID NO: 200092 - DNA, 3584 bp, Zea Mays
ccgcacccgccccggacaacagcgcgcaggcctgtgaattgcttccctctccacgcgcaccttcccgcctccgcgcccagcccaaccccaccgttgccacgcccacctccggcgtccacctcgcggttctccgctgcacaatcctccggaagacttccccagtgcccctgcgacccgtctgcacacctccgcggctgctcgccctcctctacccaaaccctaaccctaggtccgcgcgccggtgagtccttcgcgctggaaggatacatctgtttgctggtgccatcagaatgaactgccgctttcagtgacatgcatgcgatgcatgcttttgcttttcttcaatggtgaatgctgagccatgctcgatgggtggaattatggattacggtgttggtgtgggcaccaaatcttcaccacgcagtatggccattgagaaagctcaggaggagctcaggcaggagtctgatgttcgcgatgaatggaggagagaattggaatttctagagaaaggaggcaacccattggatttcaattttgcacatctggaaacggtcggtgtacactctgcttctctcacaaatcaagtagaagcacaaactgtgataagtgacgcgaaaggtagtttttctgcatcacctcttggagattcggtcgagagtaccgacaaaccaggaggttccatgtgccgcgaaaccaacacagcagacaatcttatgcttttgggtggaggtaaaaatgacattgcagaagaaaaggttgtaaaaagaggaaccaaaagattaaatgcagcacaacccaaacattcattgcccagtgacggtcacaaaaacacaaaaaagcctgctgcttctggtttgtcacacctcggtgtcaaaagccaggcatatgttcggcgcaacaggtcaaagccaagtagggagagcgggaatgtcacatctattagatcttctatgatccctgctaaagtctatgagccaaatgatgaaaaggttacagcacagaaaaacaatgcagacgatcatggtgtattgtccgtttctagtataaaacagtctggacctaaccgtgacattgcaccaaagagtatagcttctgatgaccatgcagcaatggagctggatggcattcaaacaattctcgaaagtgaatgtgtggtgaacgacaaagtaaacaaagctggcaataataacaaagctaaacagttgtcatcaaatgacacaaatcatgatcgtttccttgttgggtgtggtgagatagctgctgaagtttcatctgcggaaacccctgatgccaatttaaaagttgttataaagccatgttattctagtgcatctacatatgatgagaaagagtcatgtgctgttcacgaaaaggctgatgatggacacctggatgaatgtatggcccatatccgtgaaggggaacttggtcacagcaggacacttccttgtgttgtagaagcttctacttcacacaatgatgtagtgggcccatcttgtgaaggcactgtgaatattgttgatgaacatgcagatggggacatcaatactgttgcagggaagattgattctcatgaagacctagatagtagtagacattctaacatgattctcaaggtaagtggcacatcgatagatttcagcaggcctgcttctttgaaggaaagttctgatcttgtacgacctgaagccagtaatatttctcatgtgaaagatgaaattgaagtttgtaacagtgcaatagttgcacagaaagacacagagtgcttgtcttctggccgcagcatgaacattgaggaaagtccagtttcggttaggaaaaatagctatgttgggaattcaaactctgcacatcctatatccgtaggcatcgatttgtctgatgccttgtctccaccaaaaaatgatgaatctaacgtggagagtgagattaaaaaatatgagaacctgaataagatggaaaagaaggcctatgaagattctattcttaaaaatgctcgcgttatagaggcaaatattaaaaaggctggtcaacgatctccctgtaacattgctttagagaagaggagaaagagtcactgggattttgtccttgaggagatgacttggatggctaatgatttcatgcaggaacgactttggaaaagtgtggctgcagctcaggtgtgccattggattgcctctgatgcccacgccaagtttgaaaaagcaagcattctgaaaaagcagaaagctgttataaagatcattgcaaagggtatcatgagtttctggcgttcagctgaggctttacagactgctgacaggacagctaaagtgatgccacacaattcaactatgctggaggagatagatccttcgggagtcaaagcaggaaaagaacagggtcacaattcactggaagcgaaagaatccagccagcaacggtcacagattcatgattatgcagttcgatttcttgaatataatagaacagctgatttgcacgtgttgcctgaagctccaccaactcctgacaggctgaatgactttggagtcttgaaagtgtctgatcatctctcagaagaaagtctcttttatacagtagcagcacctggtgcagtgctggcatacagggactctctggaatctcttttcatgtatcacaaggaagatggcaatgctgagctcaacgatgactatgaggcatctgcgtgtgattctgttgcagatttgccccaggagaatgcatacgaggaggatgaaggcgagacatgtacttttctttctcctaaagcatatgttggtggttccatatcgaatatggttcacaagaagaaacatgtaatgccacaaaggattagccttgctaggccatatgaaattggtacctatgtgccttatcaaccatgcatggaaagcaagtcaaggaaccaaccattgttatcaaatggcaaaagacctacttctttccttgcaattcctccaaagcgcacacgcacagctgcaaggcaacaagttgtaagcccgtttcatgctggtgctagtgtaccgccccaagatttctcaagtggcaacacaaactcctaccaagatgatcaaagttcattgcatagtgagtctttgccgtggaggaacatggattttgaatctacagttgattctgatagacaactgccttatgatgctggtgaaatgtgcactaaagtcaacaacaagaaaaaactgaagaactcaggatacaaaattgctcaaaatgcagccaatttgtatgtgccaacttctgcaaagtttcagggccatatttatgatccaagaaagcaaatgcaagttgacttggttaataaatatgagcaggaatatctcaagaagagaacagatgtgcaccaatatggttcaaatggaaacaaagttgcatatggtggtcaacatgcttctaagaagcttaaaatggggaagcaagggatagatatttcacaagaaacttctgttgcatcacagatgagcaacatggcacatcctgctagatttataaagatcattgctaatagggatcgtgggagaaaatgcaaagcactaaagataacacgcatactgggttga

SEQ ID NO: 200093 - DNA, 3570 bp, Zea Mays
cccgcacccgccccggacaacagcgcgcaggcctgtgaattgcttccctctccacgcgcaccttcccgcctccgcgcccagcccaaccccaccgttgccacgcccacctccggcgtccacctcgcggttctccgctgcacaatcctccggaagacttccccagtgcccctgcgacccgtctgcacacctccgcggctgctcgccctcctctacccaaaccctaaccctaggtccgcgcgccggtgagtccttcgcgctggaaggatacatctgtttgctggtgccatcagaatgaactgccgctttcagtgacatgcatgcgatgcatgcttttgcttttcttcaatggtgaatgctgagccatgctcgatgggtggaattatggattacggtgttggtgtgggcaccaaatcttcaccacgcagtatggccattgagaaagctcaggaggagctcaggcaggagtctgatgttcgcgatgaatggaggagagaattggaatttctagagaaaggaggcaacccattggatttcaattttgcacatctggaaacggtcggtgtacactctgcttctctcacaaatcaagtagaagcacaaactgtgataagtgacgcgaaaggtagtttttctgcatcacctcttggagattcggtcgagagtaccgacaaaccaggaggttccatgtgccgcgaaaccaacacagcagacaatcttatgcttttgggtggaggtaaaaatgacattgcagaagaaaaggttgtaaaaagaggaaccaaaagattaaatgcagcacaacccaaacattcattgcccagtgacggtcacaaaaacacaaaaaagcctgctgcttctggtttgtcacacctcggtgtcaaaagccaggcatatgttcggcgcaacaggtcaaagccaagtagggagagcgggaatgtcacatctattagatcttctatgatccctgctaaagtctatgagccaaatgatgaaaaggttacagcacagaaaaacaatgcagacgatcatggtgtattgtccgtttctagtataaaacagtctggacctaaccgtgacattgcaccaaagagtatagcttctgatgaccatgcagcaatggagctggatggcattcaaacaattctcgaaagtgaatgtgtggtgaacgacaaagtaaacaaagctggcaataataacaaagctaaacagttgtcatcaaatgacacaaatcatgatcgtttccttgttgggtgtggtgagatagctgctgaagtttcatctgcggaaacccctgatgccaatttaaaagttgttataaagccatgttattctagtgcatctacatatgatgagaaagagtcatgtgctgttcacgaaaaggctgatgatggacacctggatgaatgtatggcccatatccgtgaaggggaacttggtcacagcaggacacttccttgtgttgtagaagcttctacttcacacaatgatgtagtgggcccatcttgtgaaggcactgtgaatattgttgatgaacatgcagatggggacatcaatactgttgcagggaagattgattctcatgaagacctagatagtagtagacattctaacatgattctcaaggtaagtggcacatcgatagatttcagcaggcctgcttctttgaaggaaagttctgatcttgtacgacctgaagccagtaatatttctcatgtgaaagatgaaattgaagtttgtaacagtgcaatagttgcacagaaagacacagagtgcttgtcttctggccgcagcatgaacattgaggaaagtccagtttcggttaggaaaaatagctatgttgggaattcaaactctgcacatcctatatccgtaggcatcgatttgtctgatgccttgtctccaccaaaaaatgatgaatctaacgtggagagtgagattaaaaaatatgagaacctgaataagatggaaaagaaggcctatgaagattctattcttaaaaatgctcgcgttatagaggcaaatattaaaaaggctggtcaacgatctccctgtaacattgctttagagaagaggagaaagagtcactgggattttgtccttgaggagatgacttggatggctaatgatttcatgcaggaacgactttggaaaagtgtggctgcagctcaggtgtgccattggattgcctctgatgcccacgccaagtttgaaaaagcaagcattctgaaaaagcagaaagctgttataaagatcattgcaaagggtatcatgagtttctggcgttcagctgaggctttacagactgctgacaggacagctaaagtgatgccacacaattcaactatgctggaggagatagatccttcgggagtcaaagcaggaaaagaacagggtcacaattcactggaagcgaaagaatccagccagcaacggtcacagattcatgattatgcagttcgatttcttgaatataatagaacagctgatttgcacgtgttgcctgaagctccaccaactcctgacaggctgaatgactttggagtcttgaaagtgtctgatcatctctcagaagaaagtctcttttatacagtagcagcacctggtgcagtgctggcatacagggactctctggaatctcttttcatgtatcacaaggaagatggcaatgctgagctcaacgatgactatgaggcatctgcgtgtgattctgttgcagtttgttcagatttgccccaggagaatgcatacgaggaggatgaaggcgagacatgtacttttctttctcctaaagcatatgttggtggttccatatcgaatatggttcacaagaagaaacatgtaatgccacaaaggattagccttgctaggccatatgaaattggtacctatgtgccttatcaaccatgcatggaaagcaagtcaaggaaccaaccattgttatcaaatggcaaaagacctacttctttccttgcaattcctccaaagcgcacacgcacagctgcaaggcaacaagttgtaagcccgtttcatgctggtgctagtgtaccgccccaagatttctcaagtggcaacacaaactcctaccaagatgatcaaagttcattgcatagtgagtctttgccgtggaggaacatggattttgaatctacagttgattctgatagacaactgccttatgatgctggtgaaatgtgcactaaagtcaacaacaagaaaaaactgaagaactcaggatacaaaattgctcaaaatgcagccaatttgtatgtgccaacttctgcaaaggttcatttctcaagcttcattggcgctcctttgttactgctggaatatctcaagaagagaacagatgtgcaccaatatggttcaaatggaaacaaagttgcatatggtggtcaacatgcttctaagaagcttaaaatggggaagcaagggatagatatttcacaagaaacttctgttgcatcacagatgagcaacatggcacatcctgctagatttataaagatcattgctaatagggatcgtgggagaaaatgcaaagcactaaagataacacgcatactgggttga

SEQ ID NO: 200094 - DNA, 1837 bp, Zea Mays
ctcatccatcataaagacaaaaaagacaaaagattctgattctgccaaaaaacatgaaatagaaatgagggaggaacttgaagttgtattggtagacacaagaaagcagcatgaagaccttataaagaataaagagagagcagtatcagtactggactcttctacgaggagatcagctattctagatgcccatgctgaaaaaataaagcttcagatagatgagttctcggcagagcttgaagtgatccaatcttccatagaaactcttcgccagaagaaactaaaaatgcaaaggctagaaagcaaacatattgacctggataaggggtgcacatacagccatgccacactgtcaaattgcgcctcaaatgcttttggagatgatttatacggcttcagagaatttacagtgttggatatgcaatctgctacgtgtaaattctcagagagcttcaggatgtggtcgcaaggtcgtgggtgtgtttacaaaggagaaattatgaacagaactgtgatgatctataagctgcactgccatagcattgagagcgtgaggcagttccagcaagaggtttatatcctcagcaatgtgaggcaccctcatctagtgacactggttggggcgtgcccggaagcgctgtgcctcgtttatgaatacctgccaaacgggagccttcacgaccgcctcttcagcagacgcagcagccgtcacttgccgtggagaattcgtgcacgcatcgtcgccgagatctcagacgcgctgctgttcttgcattcctgtaagcctcagacgatcgtacacggcaacttgaaactcgagaacatccttctagataccgaatgccattgcaagatagccgatttcggtatctctcggctattcacaggcgacgtgaaggattacccgtcggggggttctgagcctccggaagggtcttttccctacgcagatccggagtacatgagaagcaaagtgttgacacccaagtctgacgtatactgcttcggaaccgtgatactccagctactgaccggaagacaggagcctgcacggcggcttgctggtgaagtaaggtgtgccatggcttgtggcaagctatcgtcaattctcgaccctgctgctgggcattggcctatggaggtggccggaaggctagcggaactgggcctgaggtgcagtgaggacagaagccgggatcgcccagacctgactgctgagaccgtacgagagctggaacagctacacttgacgagggaggaggaacaagcaccctcctctttcctgtgcccgattatgcaggcaagtaccatcgtcttgcaccattgttaactagggaaacgggtatgggggttggatcgatgtgaattgtgatgatgacaagaaactcggtgcgtttcttttattctttccctcttctgttttggcttgcaggagataatgcatgatcctcaggtgtgcgctgctgatggggtgacctacgaagggcgggcgatccgtgagcggatggagttggagactgggcaggggacagcgcctctgaacaacctgaaactggagcatctcagtctcacacctaaccacgcccttcggttcgctatccaggattggcttcgtcgctctcgccgatgaaactttttgcctggcgtttcttttgggttttcgacctgtacagatttcacgtgtaaaggggtatagcatatctgcatatgaataatttgaatagctgttctaaggttttgtctgtacttcatgaaatgtatcaggatgcatgtacgcggcaatgcagcttcaggatcgatcgcataaatcttaaaataatactgtctatgccatgtc

SEQ ID NO: 200095 - DNA, 1038 bp, Zea Mays
ctagatgttacacagtgcgctccgactctggcctgcgcgcggccggcggcccccacctctctgtcggccgacgacgaccctgcctccctcccggtcccgtcccggatgatgccccatcgcgcgcgtaaacactaaacatgagcggtgagagaagaggatcggcatctgcacgattcgtggatatccctcgaagttggcgctggccggccggacggccgggaccatgagagcactccgccgtgttggtttggtcgggggacgcggcgaccgcgacaggaggagaaggtgaaatggctgtcagggagtgatttgaagaagcttgccttgtttgggtgtcccactgttgagcgaagaacggtttttgcatcaaaaagattaagagccttcttcaacatccaggaagacaaaatatgcggttcctgtaaactgagaagttcgtgcaagtttgtgaaccaggaagtggccaggcataatagagtgattctatcagatacgatgagaattatctccttgtttgtactggacgcttgcccacaagagctcgagattaccgctgagttaaaagccagtgtctgcaagctgctaaaggacgccataaatctcagcagttaactgctgagcattacggagcagaagtttgctagttttcttgtccttgtagttctaatagcgtgctgtcagcatttatctggacttatggaggaaattgccgaggcccatgtttgacgttgcgctcgcaatcgctccctgtgaaggttggagtggtgaaccccagcgacttccttctgatccgtgttttcttttgtgcaactaatatgaagatgaagtacagagtatgtaaaaacttaagatgcatatcgctctgtagctccttttcaactaatatgaagatgaagtacagagtatgtaaaaacttaagatgcatatcgctctgtagctccttttctttttgatgtacgtagtcatataccatagtactgttatcgtttgctgcctcgcctccatttcgttaaactttggtgaactcaggttcaatct

SEQ ID NO: 200096 - DNA, 4426 bp, Zea Mays
ccaatttcttcgaccgaacgaaaacacagccgtcgtcgccgtcccgcccgcccacggccgccgccgccgccagctgccgtttcccaaaagcgagcgaacggcaaaccaaataaaaactcctcgaactaccggcttctactaaaaccctcgacgtcggcagcgcggcgtcggcgagatgaagaacctgcgccttgtgacgaggctcccgcagcagctccagctccagatagacggcgaaaccctcgtcgcctccgccatcgacgcagagagccgccgcgctttcttcgcttcctccgccaacttcatctacaccgtctcactgccctcgtcctccacccaggaacagcaactactgcaatggagcaaaactgctactcaacactctgacatggaggaggttgttcttgatcctggagatcgcattgttgccatggattatcttatggagagggagtctctactccttgggtcgtcagatggttgtcttctcttatataacgtggaggagaaaacaactgaagttgtcggaagactggaaggtggtgtcaacaccattgcctctagccccgatggggcccttctctctgtcaccactggactcggccaactgcttgtcatcacacaggactgggaagtgctgtttgagacttcacttgaccctcaagacgagaccattgacaacacagacagtaccggtggtcagagtcgaagtgcaatttcttggcgaggggatgggaagtatttcgctacacttgtagcccctgagagcttttctagccctacaaaacttaatgtctgggaacgtgaatcgggaaaactgcattcttcttcagatgccaaaacttttatgggagcatcgctagattggatgcctagtggagcgaaggttgctacagcccttgataggaggacagagggaaagtgtcctcttattattttctatgagaagaatggcttagagaggagtcacttttctattgatgagccaggagaggttgccattcaagctttaaagtggaactgcaattctgagatccttgctgctctggtttcttctggtcagcatgatgttatcaagatatggacctgcaggaacaatcactggtacttgaaacatgaactgcggtacacaaaggaagagggggtgaagttcttttgggatccaacgaaaccaatgcatctgatttgctggacactgagtggccaggtcattattcacaagtttgcttggactacggcagtcagtgagagttcaattgcacttgtgattgatggttctcatgttcttgttactcctcttattttgggcctcatgccacctcccatgtctctgttccaccttgcatttccttgtgcagtgaatgaggtttcttttgtgaccaataactcgaagagccatttggctgcttatctctcaaatggcagcctgtctgttgtggaacttccagcacctgatacctgggaagaatttgaaggcaatgggataagtgttgatccttgctgttctgacttcactttgaataactgtatgcacctcacttggatagatacacgcaccttgatcggtatctgttgctatagtgaacacctctcttcaacaaaaatcaggtccagtgaagccagtaaccttgtagataaacatgattcgctgtttttcatccatgagattgaacttaaatgttcagagagttctgtgccaggttcagtgtgttcatctggttggcatgctagagtatcaaagaaagtgcagttggagagttcagtcattggagtctctccaaacccagcaaaaagaggttcagccttcattcaagttagtggtggaaagattattgagtactgctcaagtttaaatctgttgaatatgtgtccaccagcacaattcagtggcattggttctgacctttgttttccagcatcatgtccttggatgactgcagttctgtgctatgaaaatggtatgacagaaccgcttctctttggacttgatgaaagcggcaagctttatatgggcaaaaggttattgagcaacaactgcagcagcttcacattatactccagtgtttatggagccactgagccagttatgagccacttgcttgtgactactaagcaagatcttctattcattgtggatgtcaatgaggtcttacttaaagacatcgaggtcacaattgatggccttgtcagtagtcctgctcgcggtaagcaaaacaaagagtacatcactgtgtgggaaaagggagcgaagttggttggtgttctccatggtgatgaagcagctgtcataatgcaaacaacacgtggtaacttagagtgtacctaccccaggaagctagtccttgtttcaattgttcaggcactggttcagaagcgtttcaaagatgcaataggcatggtgaggaggcatcggatagattttaatatcattgttgactattgtggtttgaatgcttttatggattcagctgcagacttcgttaaacaagttaataaccttacccatgtcactgaatttgtttgctcaatgaagaatagcaatgtcagcagcaaattgtatgaagcctatatatcatttcctgatcagtgtgcaatcccaatggcggataatgaaagttcacctggtttatttttgggtaacaaagtcacttctgtacttatggccattcgaaaagcccttgaggaacaaatagaagagagctcatcaagagaactttgtatattgaccactttggcccgtagtgaacctccattgttggagcaggcactgaatagaataaagctccttcgagaatcagaacttcttgggcttgacgatgccaagcgaaagctctacccttctgctgaagagtcactgaagcatttgctttggttaacggacactgaagctgtttttagtgctgccttgggattgtatgatctgaatcttgctgctattgttgctttgaattcccaaaaagatccaaaagagttccttcctttccttaagagtcttgaatgccttcctcctgctatcatgaggtatacgattgatttaagacttggaagatacgagagtgctctcagaaacattgtttctgctggcgacgcgtaccatgaggattgcatgaaactcctcaatgataatcctcagctgttcccactgggcctccagttatttaatgaaccagataaaaggaatcaaattcttgaggcatggggtgaccatctctctggagagaaatgctttgaagacgccgctttgacttatcagtgctgttcatcatatcagaagtcactgagagcttaccgtgcctgtggagactggagaggtgtttttaccgttgcaggtcttctggagttaaaaagggaagaaatcgttcaactcgcacacgagttatgtgatgagttccaggcacttggcaagccaggagatgctgctagagtagcactggagtactgttcagatgctgaaagaggtgtaagctactatatcatggcaagggaatgggaagaggctcttagagtcgcttacatgcttagcacgcatgatctggttgaagctgtcagagacgcagcttcagaatgcgccgcatcactgatagccgagtaccaggaaggactgttgaagatcggtaaatatgcagcacgctatttggccgtacggcagaggagattgtcgctcgctgccaaactccggtcggaagatcggtttatggatgttgaagatgacagcgtttcagaaacgagcactagcttcagtgaaatgagcgcatataccacaagggagtcgagcgcttcggtcatgtccagcaacgccagcaaatcacgggcggcaaggcggcaaaagaagggcggcaaaatacgagctggaagccccggggaggaaatggccctcgtggagcatctcagggggatggcgttgacaggcggtgcccaaaacgagctgaagagcctgctcgtggctctaatacagctggggaaagcggagacggcccgtcgggtgcaggaggctgcagacagcttcgaagtgtcccagagggccgcagtgaagctggccgaggacacggtgtccagcgaccgcgtagaggagagagcgcacaccctcgagcgttacgtgaggatgctgagggatcgggagtctggccatggcgaggctggtggtacgtggcggatcaatgcgttgtctccccccgtgacagggtgagagggttttttttttactggttagcagtttagcattgtttaaatcgggacgaagagtgctgtgttctttcttgtgggtggcatcgtggcgtgcgtcaggctttgaccttgtcgattaactgctgtagcatcagttggaattcttggtgcctggtggggctgttgtattggatctatgtttgccaataccagatttgtccggttttttttctgacaggaacaaacaatcggcagagtcgga

SEQ ID NO: 200097 - DNA, 740 bp, Zea Mays
gcttccgctgggcaaaaaccctaatcgcatctgcttccagagccccccgccgccgctgcgccctcctctcggtcctgccgtccgtcgaggttagtctccaccatggtgagggtcagcgtgctcaatgatgctctcaagtccatgtacaatgctgaaaagatagggaaacgtcaggtcatgatcaggccgtcatccaaggtgatcatcaagttcctgacggtcatgcagcgccatggttacattggcgagttcgagtacgtggatgaccacagagctgggaagatcgtggtggagctgaatggaagactgaataaatgtggtgttattagcccacgttttgatgtaggtgttaaggagatcgagggatggacggcgaggcttcttccatctcgccagtttggctacatcgtcctaacaacttctgctggaattatggaccatgaggaggcccgccgtaagaatgttggtggcaaggttctaggtttcttttattgaaaatgtgtttttttgagccacagatgcgtccaagaactcgtctgatgttttgaggtttgttaagactgggtgtccgagcctttgtggtttgttaagacagcgatgtgtcatgtatttcagaaattgggatttttatgagatgtacctgcgagagccctgtctgtttcgattttcagatattggttttgatttatgcgatacaaacaggtcctttagtccatataactttttgatgctgactttat

SEQ ID NO: 200098 - DNA, 2334 bp, Zea Mays
ccttttctgaactgcatcttcacgagacatccttgagcagagcaccttttactctctcctccagcggtccagcctatccccgcggtctggggtcaacaacagtacaccgtaccagagcttctcaagggtgccagagacggagaggagaggaggactcgaggaggaacaaggagagctagccgctagcgtccccttcttcccgctgcgcctgcgcgtgcctgcctttattcgctttcgtgccgttttgcatcctcccagaagctcgcatcggatagcagctggcatatcgtgagagtggtggtggacggacgcggcggcgcggtgagcaatgcccgtggaggtggcgcgggcgtcgtccggcgtgtcgcaacgtcgtcgatcgcgttggtagcgcagtagtgccgtagtggtaccgacgccggccaaacatgccgtgtgcgacgtcgtgctcctgctgcgaatcttgatcctggcgccccacatgctctcctgcttccggctgccgcggccggtcggcggcggcggcggggacgcggaccagcaggccgcggcggtgtctccccggcgggggccgtcgctgccgttcgcggcgagcctgttcgctgcgtccccgtcgacgtcgacgtcggggcgcgggaggagcgcgtggccgccggaggcggacggcatggagaagaagcggtgggacagcatggagtcgtggtccatgctgctggacacggtgatggggtccggcggcgaggggtcgtcccgggacagcgggcggcgggaggagtggatggccgacctgtcgcagctcttcatcggcaacaagttcgcgtcgggcgccaacagccgcatctaccgcggcatctacaagcagcgcgccgtggccgtgaagatggtgcgcatcccggagcgcgacgaggcccggcgcgccgagctcgaggagcagttcaactccgaggtcgccttcctctcccgcctctaccaccccaacattgtgcagttcatcgcggcgtgcaagaagccgccggtgtactgcatcatcacggagtacatgtcccaggggacgctgcggatgtacctgaacaagaaggacccctactcgctgtcggcggagacgatcctgaagctggcgctggacatctcgcgcggcatggagtacctgcacgcgcagggcgtgatccaccgggacctcaagtcccagaacctgctgctcaacgacgagatgcgcgtcaaggtggccgacttcggcacctcctgcctggagaccaagtgccaggccaccaagggcaacaagggcacctaccggtggatggcgccggagatgaccaaggagaagccctacacgcgcaaggtggacgtgtacagcttcggcatcgtgctctgggagctcaccacctgcctcctcccgttccagggcatgacgccggtgcaggccgcgtacgccgcgtcggagaagaacctgcgcccgccgctgtcgagctcgtgcccgccggtgctcaacaacctgatcaagaagtgctggtcggcgaacccggcgcggcggccggagttcagctacattgtgtcggtgctggagaagtacgaccactgcgtgaaggaggggatgccggtgacggcgcaccaggagctcaggctctggcgctccttcgccaagatcttcaggacgggctgcatcaccaacaacctgtccataccggtgcatgcgtgatccatctccatccttcttccttccgtaactgaagtgctgctgctgctgctgtttgcctaggaactactgctctgctactaagtagtagtgtgtgtgtgtgtgtcaaacaaatggcataaaaagacgttgtcggccgggaactaaatgtaatgtaactcgatcaaatttgtaaattataaaccactctgatctgatcatttaaatccaaaagaatcgacgcatcgggattcggaacaggcagaacaaccatgctacatacagatacagtacatggaagacaatcgaatgctatgctatacaccgcgattgattgattagtagcaatagcaagcagcgtccagcatcacaggagctgctcgtagcacaggtccagcgtcttcttggcgaagaactggttcaccttctgggtggggtggaaggagtcccagaagaagtacttgtcggcgtcggcgcacgtgtgggggctcttgtcgttgcacaggtaagacatctccaccttccccgtcgcgcagcagccctcctccacgttctccagccctgccatacatgccatgccagtcagcccatcagcaggtcgtcgtattgcattggagatcgatctctctctctctctctctctctctctctctctctctctc

SEQ ID NO: 200099 - DNA, 3619 bp, Zea Mays
aaccatttcactgctccacgctccagcgaaggcacacaaccgctgccgtttcttcatctcccaatcttcatcttcctcgcagcgtcccttgctcgcgttcggcacataggcgacggcggcggcgctcaggatcgggctctcggcgacggcgctcagggtcgggctcttagcgacggcgtcagcggcttcccctcccgcctcccgagcatgaatcactgacttgtgaaccattacctttatgggaaaagaaaaactccataagcagccctctggccgtctgattgaatctctcaaaatggagaggatgaggaacatcctgactcatagatatccatatccgcatgaacactcaagacattttatcattgctgtgtttgcttgttggcttttcttcatttcctcggataatttgcaaaaccttataatgaagttggacaagaattttaaatggtggtccatgtatgcttgtttgattggcttcttctatttcttctcatcgccttttatcaggaagaccatcaaaccaaactattcgaacttcaatcgatggtatattgcatggatattcttggcagcactataccatctgcccagttttcagtcaatgggcttggatttgcggatgaatctttccctcttcctcaccatttatatttcttctctaattttcttgatggtcttccatatcatatttcttggcctttggtatttgggttttgtttctcgtatggcagagaaaaaaccagagatgcttactataatacaaaactgtgcagttataagcatagcttgctgtgtgttttacagccactgtggtaacaggactgtttcaagagacaaatctattgatcgtagaactgctagctggattgtattctcactttggacaaagcatgatgacaacacactgatttcaaggctattgcgtatgcataaatttaaagaacagatttgctcctcctggtttgctccagttggttctgctagtgattaccctcttctctctaaatgggccatttatggagaattgtcttcaaatggatcaggttcctccaatgaaatttcaccagtctactctttgtgggctacattcatgggtctttacattgccaattatgtcatagagcgttcaacgggatgggttttaactcatcctttgacaatttcggagtatgagaaattgaagaaacagttgaaaccagattttgaggacatggttccctggtactctgggacatcaactgatttatttaaaactgtctttgacctcatgatatctgtgactctgtttgttggtcgatttgacatgcgtatgatgcaggctgctatgaataaaactcctgatgaagctaacagccatgaccttttgtatgatcatcttgatggaaaagatgagctttggtttgacttcattgcagatactggtgatggtggcaactctacatatgctgtagcacgattacttgctcaacccttgttagttataaactctgatgactcgaggctaacatttcctcgtgggcaactgcttctcgttggtggtgaccttgcgtatcccaatccatcctcattttcgtatgaacgacgttttttctgtccttttgagtacgctctccagcctcctgcttggtataagcctgaacatatagcactggagaagcctgaacttccccttggggtttctgagcttaggcggtacagaggaccacagtgtttcatgatacccggaaaccatgattggttcgatggattaaacacattcataaggtatatctgtcataagagttgggtgggtgggtggttcctacctcagaagaagagttattttgcattgaagcttcccaatggatggtgggtttttggtcttgaccaagctcttcatggtgacattgatgtttaccagttcaagttttttgctgagttgtgtcaacagaaggtcggagaaagtgattccgtaattattataactcatgaaccaaactggctccttgattggtattggggtgatagcactggcacaaatgttgcatatttgatacgggagtaccttaggggaagatgcaaactgcggatggctggggacctgcaccattatatgcgacattcttgcattgagtcaaaagaaccagttcatgtacaacacttactcgtaaatggctgtggtggggcctttttgcatccaacacatgtcttcgaaaacttcagggtattttatgggaacaagtatgaaacaaaatctacatatccttcttaccacgattctagcaagattgcacttggtaatattttgaagttccgaaggaaaaattggcaatttgatgtaattggtggttttgtgtactttgtcttggttttctcaatgtttccacagtgtgactcatttcacatcttacatgaagactcctgggctggtcgtatcaatggtttcttcactgcaatgtggaatgctgtttttgagattctagagagatcttatgtgtccctaggtggtgttgttactctattgatgtgctactgatgctacttatggaattagctattgaaatctgcattcggaaccatctattagcaacatcaggttaccataccctttatgaatggtaccgaaaagtggaaagcgaacattttcctgatcccacaggacttcgcgctcgtctcgagcattggacctttggactttaccctgcatgtattaagtacctcatgtctgcattcgacatcccagaggttatggcagtaactagaagtacaatctgcaaaaaaggaatagagtcccttcccaggggaggtgccatcatctattatgtctgtgttttcctgtacttctgggtcttgtcaacacctgtcgtatcgctggtgtttgggagctacttatatttatgcataaactggttccatatccatttcgatgaggccttctcctcgctgcgcatagcaaactataaggcattcacacggctccacatcaagaaaaacggagaccttgaggtcttcaccctggctgtggacaaggtgccaaaggattggatgctggatccagactgggacatggaacccaagcagccattccagatgagctacaccaggaaattcccaagcaaatggagggctgcgtcgggccttgacccaatcaatgctgtgcgcattgttgaccggtttgtcatcccgcgaacgccctcaagtcctacaacaccaggaggctctgtttcaagtcctacaacaccaggaggctccgtttcaagtcctacaacaccaggaggctttatgagatgatgttcatgctgctgtgaaatataatgtaatgtacacaaggatatcttcgacttctcgggagaaattgtacagtacacaaggtcctctaacataccacgggagaaatagttgggaaaaaaaatagagggcaaatctccacaagatccaaatgttgtacatctggtgttatatcagttgtcctgatcaggtgtaatgataagtttttcaaacttagggtgtgattggtaggctgaatccggccctgcctggttgcatggatgcagcctgaacatgtttggttggttggctctgtgttgggccaagtactggagatacatttcctggccttgggcctgggaatttgtct

SEQ ID NO: 200100 - DNA, 3709 bp, Zea Mays
cactgctccacgctccagcgaaggcacacaaccgctgccgtttcttcatctcccaatcttcatcttcctcgcagcgtcccttgctcgcgttcggcacataggcgacggcggcggcgctcaggatcgggctctcggcgacggcgctcagggtcgggctcttagcgacggcgtcagcggcttcccctcccgcctcccgagcatgaatcactgacttgtgaaccattacctttatgggaaaagaaaaactccataagcagccctctggccgtctgattgaatctctcaaaatggagaggatgaggaacatcctgactcatagatatccatatccgcatgaacactcaagacattttatcattgctgtgtttgcttgttggcttttcttcatttcctcggataatttgcaaaaccttataatgaagttggacaagaattttaaatggtggtccatgtatgcttgtttgattggcttcttctatttcttctcatcgccttttatcaggaagaccatcaaaccaaactattcgaacttcaatcgatggtatattgcatggatattcttggcagcactataccatctgcccagttttcagtcaatgggcttggatttgcggatgaatctttccctcttcctcaccatttatatttcttctctaattttcttgatggtcttccatatcatatttcttggcctttggtatttgggttttgtttctcgtatggcagagaaaaaaccagagatgcttactataatacaaaactgtgcagttataagcatagcttgctgtgtgttttacagccactgtggtaacaggactgtttcaagagacaaatctattgatcgtagaactgctagctggattgtattctcactttggacaaagcatgatgacaacacactgatttcaaggctattgcgtatgcataaatttaaagaacagatttgctcctcctggtttgctccagttggttctgctagtgattaccctcttctctctaaatgggccatttatggagaattgtcttcaaatggatcaggttcctccaatgaaatttcaccagtctactctttgtgggctacattcatgggtctttacattgccaattatgtcatagagcgttcaacgggatgggttttaactcatcctttgacaatttcggagtatgagaaattgaagaaacagttgaaaccagattttgaggacatggttccctggtactctgggacatcaactgatttatttaaaactgtctttgacctcatgatatctgtgactctgtttgttggtcgatttgacatgcgtatgatgcaggctgctatgaataaaactcctgatgaagctaacagccatgaccttttgtatgatcatcttgatggaaaagatgagctttggtttgacttcattgcagatactggtgatggtggcaactctacatatgctgtagcacgattacttgctcaacccttgttagttataaactctgatgactcgaggctaacatttcctcgtgggcaactgcttctcgttggtggtgaccttgcgtatcccaatccatcctcattttcgtatgaacgacgttttttctgtccttttgagtacgctctccagcctcctgcttggtataagcctgaacatatagcactggagaagcctgaacttccccttggggtttctgagcttaggcggtacagaggaccacagtgtttcatgatacccggaaaccatgattggttcgatggattaaacacattcataaggtatatctgtcataagagttgggtgggtgggtggttcctacctcagaagaagagttattttgcattgaagcttcccaatggatggtgggtttttggtcttgaccaagctcttcatggtgacattgatgtttaccagttcaagttttttgctgagttgtgtcaacagaagtatgcaggtcggagaaagtgattccgtaattattataactcatgaaccaaactggctccttgattggtattggggtgatagcactggcacaaatgttgcatatttgatacgggagtaccttaggggaagatgcaaactgcggatggctggggacctgcaccattatatgcgacattcttgcattgagtcaaaagaaccagttcatgtacaacacttactcgtaaatggctgtggtggggcctttttgcatccaacacatgtcttcgaaaacttcagggtattttatgggaacaagtatgaaacaaaatctacatatccttcttaccacgattctagcaagattgcacttggtaatattttgaagttccgaaggaaaaattggcaatttgatgtaattggtggttttgtgtactttgtcttggttttctcaatgtttccacagtgtgactcatttcacatcttacatgaagactcctgggctggtcgtatcaatggtttcttcactgcaatgtggaatgctgtttttgagattctagagagatcttatgtgtccctaggtggtgttgttactctattgatggtatcgtttttctttgtacccacgaaactgtcccgtaggagacgtgttttgcttggttttcttcatgccgctgctcatcttacttcggcagtgctactgatgctacttatggaattagctattgaaatctgcattcggaaccatctattagcaacatcaggttaccataccctttatgaatggtaccgaaaagtggaaagcgaacattttcctgatcccacaggacttcgcgctcgtctcgagcattggacctttggactttaccctgcatgtattaagtacctcatgtctgcattcgacatcccagaggttatggcagtaactagaagtacaatctgcaaaaaaggaatagagtcccttcccaggggaggtgccatcatctattatgtctgtgttttcctgtacttctgggtcttgtcaacacctgtcgtatcgctggtgtttgggagctacttatatttatgcataaactggttccatatccatttcgatgaggccttctcctcgctgcgcatagcaaactataaggcattcacacggctccacatcaagaaaaacggagaccttgaggtcttcaccctggctgtggacaaggtgccaaaggattggatgctggatccagactgggacatggaacccaagcagccattccagatgagctacaccaggaaattcccaagcaaatggagggctgcgtcgggccttgacccaatcaatgctgtgcgcattgttgaccggtttgtcatcccgcgaacgccctcaagtcctacaacaccaggaggctctgtttcaagtcctacaacaccaggaggctccgtttcaagtcctacaacaccaggaggctttatgagatgatgttcatgctgctgtgaaatataatgtaatgtacacaaggatatcttcgacttctcgggagaaattgtacagtacacaaggtcctctaacataccacgggagaaatagttgggaaaaaaaatagagggcaaatctccacaagatccaaatgttgtacatctggtgttatatcagttgtcctgatcaggtgtaatgataagtttttcaaacttagggtgtgattggtaggctgaatccggccctgcctggttgcatggatgcagcctgaacatgtttggttggttggctctgtgttgggccaagtactggagatacatttcctggccttgggcctgggaatttgtct

SEQ ID NO: 200101 - DNA, 3410 bp, Zea Mays
cactgctccacgctccagcgaaggcacacaaccgctgccgtttcttcatctcccaatcttcatcttcctcgcagcgtcccttgctcgcgttcggcacataggcgacggcggcggcgctcaggatcgggctctcggcgacggcgctcagggtcgggctcttagcgacggcgtcagcggcttcccctcccgcctcccgagcatgaatcactgacttgtgaaccattacctttatgggaaaagaaaaactccataagcagccctctggccgtctgattgaatctctcaaaatggagaggatgaggaacatcctgactcatagatatccatatccgcatgaacactcaagacattttatcattgctgtgtttgcttgttggcttttcttcatttcctcggataatttgcaaaaccttataatgaagttggacaagaattttaaatggtggtccatgtatgcttgtttgattggcttcttctatttcttctcatcgccttttatcaggaagaccatcaaaccaaactattcgaacttcaatcgatggtatattgcatggatattcttggcagcactataccatctgcccagttttcagtcaatgggcttggatttgcggatgaatctttccctcttcctcaccatttatatttcttctctaattttcttgatggtcttccatatcatatttcttggcctttggtatttgggttttgtttctcgtatggcagagaaaaaaccagagatgcttactataatacaaaactgtgcagttataagcatagcttgctgtgtgttttacagccactgtggtaacaggactgtttcaagagacaaatctattgatcgtagaactgctagctggattgtattctcactttggacaaagcatgatgacaacacactgatttcaaggctattgcgtatgcataaatttaaagaacagatttgctcctcctggtttgctccagttggttctgctagtgattaccctcttctctctaaatgggccatttatggagaattgtcttcaaatggatcaggttcctccaatgaaatttcaccagtctactctttgtgggctacattcatgggtctttacattgccaattatgtcatagagcgttcaacgggatgggttttaactcatcctttgacaatttcggagtatgagaaattgaagaaacagttgaaaccagattttgaggacatggttccctggtactctgggacatcaactgatttatttaaaactgtctttgacctcatgatatctgtgactctgtttgttggtcgatttgacatgcgtatgatgcaggctgctatgaataaaactcctgatgaagctaacagccatgaccttttgtatgatcatcttgatggaaaagatgagctttggtttgacttcattgcagatactggtgatggtggcaactctacatatgctgtagcacgattacttgctcaacccttgttagttataaactctgatgactcgaggctaacatttcctcgtgggcaactgcttctcgttggtggtgaccttgcgtatcccaatccatcctcattttcgtatgaacgacgttttttctgtccttttgagtacgctctccagcctcctgcttggtataagcctgaacatatagcactggagaagcctgaacttccccttggggtttctgagcttaggcggtacagaggaccacagtgtttcatgatacccggaaaccatgattggttcgatggattaaacacattcataaggtatatctgtcataagagttgggtgggtgggtggttcctacctcagaagaagagttattttgcattgaagcttcccaatggatggtgggtttttggtcttgaccaagctcttcatggtgacattgatgtttaccagttcaagttttttgctgagttgtgtcaacagaaggggaagatgcaaactgcggatggctggggacctgcaccattatatgcgacattcttgcattgagtcaaaagaaccagttcatgtacaacacttactcgtaaatggctgtggtggggcctttttgcatccaacacatgtcttcgaaaacttcagggtattttatgggaacaagtatgaaacaaaatctacatatccttcttaccacgattctagcaagattgcacttggtaatattttgaagttccgaaggaaaaattggcaatttgatgtaattggtggttttgtgtactttgtcttggttttctcaatgtttccacaggagacgtgttttgcttggttttcttcatgccgctgctcatcttacttcggcagtgctactgatgctacttatggaattagctattgaaatctgcattcggaaccatctattagcaacatcaggttaccataccctttatgaatggtaccgaaaagtggaaagcgaacattttcctgatcccacaggacttcgcgctcgtctcgagcattggacctttggactttaccctgcatgtattaagtacctcatgtctgcattcgacatcccagaggttatggcagtaactagaagtacaatctgcaaaaaaggaatagagtcccttcccaggggaggtgccatcatctattatgtctgtgttttcctgtacttctgggtcttgtcaacacctgtcgtatcgctggtgtttgggagctacttatatttatgcataaactggttccatatccatttcgatgaggccttctcctcgctgcgcatagcaaactataaggcattcacacggctccacatcaagaaaaacggagaccttgaggtcttcaccctggctgtggacaaggtgccaaaggattggatgctggatccagactgggacatggaacccaagcagccattccagatgagctacaccaggaaattcccaagcaaatggagggctgcgtcgggccttgacccaatcaatgctgtgcgcattgttgaccggtttgtcatcccgcgaacgccctcaagtcctacaacaccaggaggctctgtttcaagtcctacaacaccaggaggctccgtttcaagtcctacaacaccaggaggctttatgagatgatgttcatgctgctgtgaaatataatgtaatgtacacaaggatatcttcgacttctcgggagaaattgtacagtacacaaggtcctctaacataccacgggagaaatagttgggaaaaaaaatagagggcaaatctccacaagatccaaatgttgtacatctggtgttatatcagttgtcctgatcaggtgtaatgataagtttttcaaacttagggtgtgattggtaggctgaatccggccctgcctggttgcatggatgcagcctgaacatgtttggttggttggctctgtgttgggccaagtactggagatacatttcctggccttgggcctgggaatttgtct

SEQ ID NO: 200102 - DNA, 3651 bp, Zea Mays
agcgaaggcacacaaccgctgccgtttcttcatctcccaatcttcatcttcctcgcagcgtcccttgctcgcgttcggcacataggcgacggcggcggcgctcaggatcgggctctcggcgacggcgctcagggtcgggctcttagcgacggcgtcagcggcttcccctcccgcctcccgttagtcgcctcgcgccctcgcctccggtcctccgcccacccgctggtgaccctgcgagcatgaatcactgacttgtgaaccattacctttatgggaaaagaaaaactccataagcagccctctggccgtctgattgaatctctcaaaatggagaggatgaggaacatcctgactcatagatatccatatccgcatgaacactcaagacattttatcattgctgtgtttgcttgttggcttttcttcatttcctcggataatttgcaaaaccttataatgaagttggacaagaattttaaatggtggtccatgtatgcttgtttgattggcttcttctatttcttctcatcgccttttatcaggaagaccatcaaaccaaactattcgaacttcaatcgatggtatattgcatggatattcttggcagcactataccatctgcccagttttcagtcaatgggcttggatttgcggatgaatctttccctcttcctcaccatttatatttcttctctaattttcttgatggtcttccatatcatatttcttggcctttggtatttgggttttgtttctcgtatggcagagaaaaaaccagagatgcttactataatacaaaactgtgcagttataagcatagcttgctgtgtgttttacagccactgtggtaacaggactgtttcaagagacaaatctattgatcgtagaactgctagctggattgtattctcactttggacaaagcatgatgacaacacactgatttcaaggctattgcgtatgcataaatttaaagaacagatttgctcctcctggtttgctccagttggttctgctagtgattaccctcttctctctaaatgggccatttatggagaattgtcttcaaatggatcaggttcctccaatgaaatttcaccagtctactctttgtgggctacattcatgggtctttacattgccaattatgtcatagagcgttcaacgggatgggttttaactcatcctttgacaatttcggagtatgagaaattgaagaaacagttgaaaccagattttgaggacatggttccctggtactctgggacatcaactgatttatttaaaactgtctttgacctcatgatatctgtgactctgtttgttggtcgatttgacatgcgtatgatgcaggctgctatgaataaaactcctgatgaagctaacagccatgaccttttgtatgatcatcttgatggaaaagatgagctttggtttgacttcattgcagatactggtgatggtggcaactctacatatgctgtagcacgattacttgctcaacccttgttagttataaactctgatgactcgaggctaacatttcctcgtgggcaactgcttctcgttggtggtgaccttgcgtatcccaatccatcctcattttcgtatgaacgacgttttttctgtccttttgagtacgctctccagcctcctgcttggtataagcctgaacatatagcactggagaagcctgaacttccccttggggtttctgagcttaggcggtacagaggaccacagtgtttcatgatacccggaaaccatgattggttcgatggattaaacacattcataaggtatatctgtcataagagttgggtgggtgggtggttcctacctcagaagaagagttattttgcattgaagcttcccaatggatggtgggtttttggtcttgaccaagctcttcatggtgacattgatgtttaccagttcaagttttttgctgagttgtgtcaacagaaggtcggagaaagtgattccgtaattattataactcatgaaccaaactggctccttgattggtattggggtgatagcactggcacaaatgttgcatatttgatacgggagtaccttaggggaagatgcaaactgcggatggctggggacctgcaccattatatgcgacattcttgcattgagtcaaaagaaccagttcatgtacaacacttactcgtaaatggctgtggtggggcctttttgcatccaacacatgtcttcgaaaacttcagggtattttatgggaacaagtatgaaacaaaatctacatatccttcttaccacgattctagcaagattgcacttggtaatattttgaagttccgaaggaaaaattggcaatttgatgtaattggtggttttgtgtactttgtcttggttttctcaatgtttccacagtgtgactcatttcacatcttacatgaagactcctgggctggtcgtatcaatggtttcttcactgcaatgtggaatgctgtttttgagattctagagagatcttatgtgtccctaggtggtgttgttactctattgatgtgctactgatgctacttatggaattagctattgaaatctgcattcggaaccatctattagcaacatcaggttaccataccctttatgaatggtaccgaaaagtggaaagcgaacattttcctgatcccacaggacttcgcgctcgtctcgagcattggacctttggactttaccctgcatgtattaagtacctcatgtctgcattcgacatcccagaggttatggcagtaactagaagtacaatctgcaaaaaaggaatagagtcccttcccaggggaggtgccatcatctattatgtctgtgttttcctgtacttctgggtcttgtcaacacctgtcgtatcgctggtgtttgggagctacttatatttatgcataaactggttccatatccatttcgatgaggccttctcctcgctgcgcatagcaaactataaggcattcacacggctccacatcaagaaaaacggagaccttgaggtcttcaccctggctgtggacaaggtgccaaaggattggatgctggatccagactgggacatggaacccaagcagccattccagatgagctacaccaggaaattcccaagcaaatggagggctgcgtcgggccttgacccaatcaatgctgtgcgcattgttgaccggtttgtcatcccgcgaacgccctcaagtcctacaacaccaggaggctctgtttcaagtcctacaacaccaggaggctccgtttcaagtcctacaacaccaggaggctttatgagatgatgttcatgctgctgtgaaatataatgtaatgtacacaaggatatcttcgacttctcgggagaaattgtacagtacacaaggtcctctaacataccacgggagaaatagttgggaaaaaaaatagagggcaaatctccacaagatccaaatgttgtacatctggtgttatatcagttgtcctgatcaggtgtaatgataagtttttcaaacttagggtgtgattggtaggctgaatccggccctgcctggttgcatggatgcagcctgaacatgtttggttggttggctctgtgttgggccaagtactggagatacatttcctggccttgggcctgggaatttgtct

SEQ ID NO: 200103 - DNA, 3543 bp, Zea Mays
gtttcttcatctcccaatcttcatcttcctcgcagcgtcccttgctcgcgttcggcacataggcgacggcggcggcgctcaggatcgggctctcggcgacggcgctcagggtcgggctcttagcgacggcgtcagcggcttcccctcccgcctcccgttagtcgcctcgcgccctcgcctccggtcctccgcccacccgctggtgaccctgcgagcatgaatcactgacttgtgaaccattacctttatgggaaaagaaaaactccataagcagccctctggccgtctgattgaatctctcaaaatggagaggatgaggaacatcctgactcatagatatccatatccgcatgaacactcaagacattttatcattgctgtgtttgcttgttggcttttcttcatttcctcggataatttgcaaaaccttataatgaagttggacaagaattttaaatggtggtccatgtatgcttgtttgattggcttcttctatttcttctcatcgccttttatcaggaagaccatcaaaccaaactattcgaacttcaatcgatggtatattgcatggatattcttggcagcactataccatctgcccagttttcagtcaatgggcttggatttgcggatgaatctttccctcttcctcaccatttatatttcttctctaattttcttgatggtcttccatatcatatttcttggcctttggtatttgggttttgtttctcgtatggcagagaaaaaaccagagatgcttactataatacaaaactgtgcagttataagcatagcttgctgtgtgttttacagccactgtggtaacaggactgtttcaagagacaaatctattgatcgtagaactgctagctggattgtattctcactttggacaaagcatgatgacaacacactgatttcaaggctattgcgtatgcataaatttaaagaacagatttgctcctcctggtttgctccagttggttctgctagtgattaccctcttctctctaaatgggccatttatggagaattgtcttcaaatggatcaggttcctccaatgaaatttcaccagtctactctttgtgggctacattcatgggtctttacattgccaattatgtcatagagcgttcaacgggatgggttttaactcatcctttgacaatttcggagtatgagaaattgaagaaacagttgaaaccagattttgaggacatggttccctggtactctgggacatcaactgatttatttaaaactgtctttgacctcatgatatctgtgactctgtttgttggtcgatttgacatgcgtatgatgcaggctgctatgaataaaactcctgatgaagctaacagccatgaccttttgtatgatcatcttgatggaaaagatgagctttggtttgacttcattgcagatactggtgatggtggcaactctacatatgctgtagcacgattacttgctcaacccttgttagttataaactctgatgactcgaggctaacatttcctcgtgggcaactgcttctcgttggtggtgaccttgcgtatcccaatccatcctcattttcgtatgaacgacgttttttctgtccttttgagtacgctctccagcctcctgcttggtataagcctgaacatatagcactggagaagcctgaacttccccttggggtttctgagcttaggcggtacagaggaccacagtgtttcatgatacccggaaaccatgattggttcgatggattaaacacattcataaggtatatctgtcataagagttgggtgggtgggtggttcctacctcagaagaagagttattttgcattgaagcttcccaatggatggtgggtttttggtcttgaccaagctcttcatggtgacattgatgtttaccagttcaagttttttgctgagttgtgtcaacagaaggtcggagaaagtgattccgtaattattataactcatgaaccaaactggctccttgattggtattggggtgatagcactggcacaaatgttgcatatttgatacgggagtaccttaggggaagatgcaaactgcggatggctggggacctgcaccattatatgcgacattcttgcattgagtcaaaagaaccagttcatgtacaacacttactcgtaaatggctgtggtggggcctttttgcatccaacacatgtcttcgaaaacttcagggtattttatgggaacaagtatgaaacaaaatctacatatccttcttaccacgattctagcaagattgcacttggtaatattttgaagttccgaaggaaaaattggcaatttgatgtaattggtggttttgtgtactttgtcttggttttctcaatgtttccacaggagacgtgttttgcttggttttcttcatgccgctgctcatcttacttcggcagtgctactgatgctacttatggaattagctattgaaatctgcattcggaaccatctattagcaacatcaggttaccataccctttatgaatggtaccgaaaagtggaaagcgaacattttcctgatcccacaggacttcgcgctcgtctcgagcattggacctttggactttaccctgcatgtattaagtacctcatgtctgcattcgacatcccagaggttatggcagtaactagaagtacaatctgcaaaaaaggaatagagtcccttcccaggggaggtgccatcatctattatgtctgtgttttcctgtacttctgggtcttgtcaacacctgtcgtatcgctggtgtttgggagctacttatatttatgcataaactggttccatatccatttcgatgaggccttctcctcgctgcgcatagcaaactataaggcattcacacggctccacatcaagaaaaacggagaccttgaggtcttcaccctggctgtggacaaggtgccaaaggattggatgctggatccagactgggacatggaacccaagcagccattccagatgagctacaccaggaaattcccaagcaaatggagggctgcgtcgggccttgacccaatcaatgctgtgcgcattgttgaccggtttgtcatcccgcgaacgccctcaagtcctacaacaccaggaggctctgtttcaagtcctacaacaccaggaggctccgtttcaagtcctacaacaccaggaggctttatgagatgatgttcatgctgctgtgaaatataatgtaatgtacacaaggatatcttcgacttctcgggagaaattgtacagtacacaaggtcctctaacataccacgggagaaatagttgggaaaaaaaatagagggcaaatctccacaagatccaaatgttgtacatctggtgttatatcagttgtcctgatcaggtgtaatgataagtttttcaaacttagggtgtgattggtaggctgaatccggccctgcctggttgcatggatgcagcctgaacatgtttggttggttggctctgtgttgggccaagtactggagatacatttcctggccttgggcctgggaatttgtct

SEQ ID NO: 200104 - DNA, 3726 bp, Zea Mays
gtttcttcatctcccaatcttcatcttcctcgcagcgtcccttgctcgcgttcggcacataggcgacggcggcggcgctcaggatcgggctctcggcgacggcgctcagggtcgggctcttagcgacggcgtcagcggcttcccctcccgcctcccgttagtcgcctcgcgccctcgcctccggtcctccgcccacccgctggtgaccctgcgagcatgaatcactgacttgtgaaccattacctttatgggaaaagaaaaactccataagcagccctctggccgtctgattgaatctctcaaaatggagaggatgaggaacatcctgactcatagatatccatatccgcatgaacactcaagacattttatcattgctgtgtttgcttgttggcttttcttcatttcctcggataatttgcaaaaccttataatgaagttggacaagaattttaaatggtggtccatgtatgcttgtttgattggcttcttctatttcttctcatcgccttttatcaggaagaccatcaaaccaaactattcgaacttcaatcgatggtatattgcatggatattcttggcagcactataccatctgcccagttttcagtcaatgggcttggatttgcggatgaatctttccctcttcctcaccatttatatttcttctctaattttcttgatggtcttccatatcatatttcttggcctttggtatttgggttttgtttctcgtatggcagagaaaaaaccagagatgcttactataatacaaaactgtgcagttataagcatagcttgctgtgtgttttacagccactgtggtaacaggactgtttcaagagacaaatctattgatcgtagaactgctagctggattgtattctcactttggacaaagcatgatgacaacacactgatttcaaggctattgcgtatgcataaatttaaagaacagatttgctcctcctggtttgctccagttggttctgctagtgattaccctcttctctctaaatgggccatttatggagaattgtcttcaaatggatcaggttcctccaatgaaatttcaccagtctactctttgtgggctacattcatgggtctttacattgccaattatgtcatagagcgttcaacgggatgggttttaactcatcctttgacaatttcggagtatgagaaattgaagaaacagttgaaaccagattttgaggacatggttccctggtactctgggacatcaactgatttatttaaaactgtctttgacctcatgatatctgtgactctgtttgttggtcgatttgacatgcgtatgatgcaggctgctatgaataaaactcctgatgaagctaacagccatgaccttttgtatgatcatcttgatggaaaagatgagctttggtttgacttcattgcagatactggtgatggtggcaactctacatatgctgtagcacgattacttgctcaacccttgttagttataaactctgatgactcgaggctaacatttcctcgtgggcaactgcttctcgttggtggtgaccttgcgtatcccaatccatcctcattttcgtatgaacgacgttttttctgtccttttgagtacgctctccagcctcctgcttggtataagcctgaacatatagcactggagaagcctgaacttccccttggggtttctgagcttaggcggtacagaggaccacagtgtttcatgatacccggaaaccatgattggttcgatggattaaacacattcataaggtatatctgtcataagagttgggtgggtgggtggttcctacctcagaagaagagttattttgcattgaagcttcccaatggatggtgggtttttggtcttgaccaagctcttcatggtgacattgatgtttaccagttcaagttttttgctgagttgtgtcaacagaagtatgcaggtcggagaaagtgattccgtaattattataactcatgaaccaaactggctccttgattggtattggggtgatagcactggcacaaatgttgcatatttgatacgggagtaccttaggggaagatgcaaactgcggatggctggggacctgcaccattatatgcgacattcttgcattgagtcaaaagaaccagttcatgtacaacacttactcgtaaatggctgtggtggggcctttttgcatccaacacatgtcttcgaaaacttcagggtattttatgggaacaagtatgaaacaaaatctacatatccttcttaccacgattctagcaagattgcacttggtaatattttgaagttccgaaggaaaaattggcaatttgatgtaattggtggttttgtgtactttgtcttggttttctcaatgtttccacagtgtgactcatttcacatcttacatgaagactcctgggctggtcgtatcaatggtttcttcactgcaatgtggaatgctgtttttgagattctagagagatcttatgtgtccctaggtggtgttgttactctattgatggtatcgtttttctttgtacccacgaaactgtcccgtaggagacgtgttttgcttggttttcttcatgccgctgctcatcttacttcggcagtgctactgatgctacttatggaattagctattgaaatctgcattcggaaccatctattagcaacatcaggttaccataccctttatgaatggtaccgaaaagtggaaagcgaacattttcctgatcccacaggacttcgcgctcgtctcgagcattggacctttggactttaccctgcatgtattaagtacctcatgtctgcattcgacatcccagaggttatggcagtaactagaagtacaatctgcaaaaaaggaatagagtcccttcccaggggaggtgccatcatctattatgtctgtgttttcctgtacttctgggtcttgtcaacacctgtcgtatcgctggtgtttgggagctacttatatttatgcataaactggttccatatccatttcgatgaggccttctcctcgctgcgcatagcaaactataaggcattcacacggctccacatcaagaaaaacggagaccttgaggtcttcaccctggctgtggacaaggtgccaaaggattggatgctggatccagactgggacatggaacccaagcagccattccagatgagctacaccaggaaattcccaagcaaatggagggctgcgtcgggccttgacccaatcaatgctgtgcgcattgttgaccggtttgtcatcccgcgaacgccctcaagtcctacaacaccaggaggctctgtttcaagtcctacaacaccaggaggctccgtttcaagtcctacaacaccaggaggctttatgagatgatgttcatgctgctgtgaaatataatgtaatgtacacaaggatatcttcgacttctcgggagaaattgtacagtacacaaggtcctctaacataccacgggagaaatagttgggaaaaaaaatagagggcaaatctccacaagatccaaatgttgtacatctggtgttatatcagttgtcctgatcaggtgtaatgataagtttttcaaacttagggtgtgattggtaggctgaatccggccctgcctggttgcatggatgcagcctgaacatgtttggttggttggctctgtgttgggccaagtactggagatacatttcctggccttgggcctgggaatttgtct

SEQ ID NO: 200105 - DNA, 3437 bp, Zea Mays
gtgataaattacactaaatggttgcaggagcatgaatcactgacttgtgaaccattacctttatgggaaaagaaaaactccataagcagccctctggccgtctgattgaatctctcaaaatggagaggatgaggaacatcctgactcatagatatccatatccgcatgaacactcaagacattttatcattgctgtgtttgcttgttggcttttcttcatttcctcggataatttgcaaaaccttataatgaagttggacaagaattttaaatggtggtccatgtatgcttgtttgattggcttcttctatttcttctcatcgccttttatcaggaagaccatcaaaccaaactattcgaacttcaatcgatggtatattgcatggatattcttggcagcactataccatctgcccagttttcagtcaatgggcttggatttgcggatgaatctttccctcttcctcaccatttatatttcttctctaattttcttgatggtcttccatatcatatttcttggcctttggtatttgggttttgtttctcgtatggcagagaaaaaaccagagatgcttactataatacaaaactgtgcagttataagcatagcttgctgtgtgttttacagccactgtggtaacaggactgtttcaagagacaaatctattgatcgtagaactgctagctggattgtattctcactttggacaaagcatgatgacaacacactgatttcaaggctattgcgtatgcataaatttaaagaacagatttgctcctcctggtttgctccagttggttctgctagtgattaccctcttctctctaaatgggccatttatggagaattgtcttcaaatggatcaggttcctccaatgaaatttcaccagtctactctttgtgggctacattcatgggtctttacattgccaattatgtcatagagcgttcaacgggatgggttttaactcatcctttgacaatttcggagtatgagaaattgaagaaacagttgaaaccagattttgaggacatggttccctggtactctgggacatcaactgatttatttaaaactgtctttgacctcatgatatctgtgactctgtttgttggtcgatttgacatgcgtatgatgcagatactggtgatggtggcaactctacatatgctgtagcacgattacttgctcaacccttgttagttataaactctgatgactcgaggctaacatttcctcgtgggcaactgcttctcgttggtggtgaccttgcgtatcccaatccatcctcattttcgtatgaacgacgttttttctgtccttttgagtacgctctccagcctcctgcttggtataagcctgaacatatagcactggagaagcctgaacttccccttggggtttctgagcttaggcggtacagaggaccacagtgtttcatgatacccggaaaccatgattggttcgatggattaaacacattcataaggtatatctgtcataagagttgggtgggtgggtggttcctacctcagaagaagagttattttgcattgaagcttcccaatggatggtgggtttttggtcttgaccaagctcttcatggtgacattgatgtttaccagttcaagttttttgctgagttgtgtcaacagaaggtcggagaaagtgattccgtaattattataactcatgaaccaaactggctccttgattggtattggggtgatagcactggcacaaatgttgcatatttgatacgggagtaccttaggggaagatgcaaactgcggatggctggggacctgcaccattatatgcgacattcttgcattgagtcaaaagaaccagttcatgtacaacacttactcgtaaatggctgtggtggggcctttttgcatccaacacatgtcttcgaaaacttcagggtattttatgggaacaagtatgaaacaaaatctacatatccttcttaccacgattctagcaagattgcacttggtaatattttgaagttccgaaggaaaaattggcaatttgatgtaattggtggttttgtgtactttgtcttggttttctcaatgtttccacagtgtgactcatttcacatcttacatgaagactcctgggctggtcgtatcaatggtttcttcactgcaatgtggaatgctgtttttgagattctagagagatcttatgtgtccctaggtggtgttgttactctattgatggtatcgtttttctttgtacccacgaaactgtcccgtaggagacgtgttttgcttggttttcttcatgccgctgctcatcttacttcggcagtgctactgatgctacttatggaattagctattgaaatctgcattcggaaccatctattagcaacatcaggttaccataccctttatgaatggtaccgaaaagtggaaagcgaacattttcctgatcccacaggacttcgcgctcgtctcgagcattggacctttggactttaccctgcatgtattaagtacctcatgtctgcattcgacatcccagaggttatggcagtaactagaagtacaatctgcaaaaaaggaatagagtcccttcccaggggaggtgccatcatctattatgtctgtgttttcctgtacttctgggtcttgtcaacacctgtcgtatcgctggtgtttgggagctacttatatttatgcataaactggttccatatccatttcgatgaggccttctcctcgctgcgcatagcaaactataaggcattcacacggctccacatcaagaaaaacggagaccttgaggtcttcaccctggctgtggacaaggtgccaaaggattggatgctggatccagactgggacatggaacccaagcagccattccagatgagctacaccaggaaattcccaagcaaatggagggctgcgtcgggccttgacccaatcaatgctgtgcgcattgttgaccggtttgtcatcccgcgaacgccctcaagtcctacaacaccaggaggctctgtttcaagtcctacaacaccaggaggctccgtttcaagtcctacaacaccaggaggctttatgagatgatgttcatgctgctgtgaaatataatgtaatgtacacaaggatatcttcgacttctcgggagaaattgtacagtacacaaggtcctctaacataccacgggagaaatagttgggaaaaaaaatagagggcaaatctccacaagatccaaatgttgtacatctggtgttatatcagttgtcctgatcaggtgtaatgataagtttttcaaacttagggtgtgattggtaggctgaatccggccctgcctggttgcatggatgcagcctgaacatgtttggttggttggctctgtgttgggccaagtactggagatacatttcctggccttgggcctgggaatttgtct

SEQ ID NO: 200106 - DNA, 2784 bp, Zea Mays
atcaccttagttgatatgagcaactaactgcaaaattactctacggtgtaactatataatcgtagatgggttttaactcatcctttgacaatttcggagtatgagaaattgaagaaacagttgaaaccagattttgaggacatggttccctggtactctgggacatcaactgatttatttaaaactgtctttgacctcatgatatctgtgactctgtttgttggtcgatttgacatgcgtatgatgcaggtacatcactttttccctccgccatagtgcctttattgcatggtttctgcttgattccttatgcatttctttccgttataggcacataacagtactgatttatgtattgcactacaaagttattaacagtttttttactaaccttgaccaggctgctatgaataaaactcctgatgaagctaacagccatgaccttttgtatgatcatcttgatggaaaagatgagctttggtttgacttcattgcagatactggtgatggtggcaactctacatatgctgtagcacgattacttgctcaacccttgttagttataaactctgatgactcgaggctaacatttcctcgtgggcaactgcttctcgttggtggtgaccttgcgtatgtttcctgttgacgctgactactaaataaccaataaaaaatcatctagttcttggcaactcgtcatcccagctacagaagataccatgtattgctattgcccgtttcatcgttaatttgtttgcctatataatgggagttttccttgcttatattcacaggtatcccaatccatcctcattttcgtatgaacgacgttttttctgtccttttgagtacgctctccagcctcctgcttggtataagcctgaacatatagcactggagaagcctgaacttccccttggggtttctgagcttaggcggtacagaggaccacagtgtttcatgatacccggaaaccatgattggttcgatggattaaacacattcataaggtatatctgtcataagagttgggtgggtgggtggttcctacctcagaagaagagttattttgcattgaagcttcccaatggatggtgggtttttggtcttgaccaagctcttcatggtgacattgatgtttaccagttcaagttttttgctgagttgtgtcaacagaagtatgcaggtcggagaaagtgattccgtaattattataactcatgaaccaaactggctccttgattggtattggggtgatagcactggcacaaatgttgcatatttgatacgggagtaccttaggggaagatgcaaactgcggatggctggggacctgcaccattatatgcgacattcttgcattgagtcaaaagaaccagttcatgtacaacacttactcgtaaatggctgtggtggggcctttttgcatccaacacatgtcttcgaaaacttcagggtattttatgggaacaagtatgaaacaaaatctacatatccttcttaccacgattctagcaagattgcacttggtaatattttgaagttccgaaggaaaaattggcaatttgatgtaattggtggttttgtgtactttgtcttggttttctcaatgtttccacaggagacgtgttttgcttggttttcttcatgccgctgctcatcttacttcggcagtgctactgatgctacttatggaattagctattgaaatctgcattcggaaccatctattagcaacatcaggttaccataccctttatgaatggtaccgaaaagtggaaagcgaacattttcctgatcccacaggacttcgcgctcgtctcgagcattggacctttggactttaccctgcatgtattaagtacctcatgtctgcattcgacatcccagaggttatggcagtaactagaagtacaatctgcaaaaaaggaatagagtcccttcccaggggaggtgccatcatctattatgtctgtgttttcctgtacttctgggtcttgtcaacacctgtcgtatcgctggtgtttgggagctacttatatttatgcataaactggttccatatccatttcgatgaggccttctcctcgctgcgcatagcaaactataaggcattcacacggctccacatcaagaaaaacggagaccttgaggtcttcaccctggctgtggacaaggtgccaaaggattggatgctggatccagactgggacatggaacccaagcagccattccagatgagctacaccaggaaattcccaagcaaatggagggctgcgtcgggccttgacccaatcaatgctgtgcgcattgttgaccggtttgtcatcccgcgaacgccctcaagtcctacaacaccaggaggctctgtttcaagtcctacaacaccaggaggctccgtttcaagtcctacaacaccaggaggctttatgagatgatgttcatgctgctgtgaaatataatgtaatgtacacaaggatatcttcgacttctcgggagaaattgtacagtacacaaggtcctctaacataccacgggagaaatagttgggaaaaaaaatagagggcaaatctccacaagatccaaatgttgtacatctggtgttatatcagttgtcctgatcaggtgtaatgataagtttttcaaacttagggtgtgattggtaggctgaatccggccctgcctggttgcatggatgcagcctgaacatgtttggttggttggctctgtgttgggccaagtactggagatacatttcctggccttgggcctgggaatttgtct

SEQ ID NO: 200107 - DNA, 1114 bp, Zea Mays
agaagagcaatatgattcatgagtatcatgacccatcctatattctctggatagtgtaatacttgcaacagctgttaccataccctttatgaatggtaccgaaaagtggaaagcgaacattttcctgatcccacaggacttcgcgctcgtctcgagcattggacctttggactttaccctgcatgtattaagtacctcatgtctgcattcgacatcccagaggttatggcagtaactagaagtacaatctgcaaaaaaggaatagagtcccttcccaggggaggtgccatcatctattatgtctgtgttttcctgtacttctgggtcttgtcaacacctgtcgtatcgctggtgtttgggagctacttatatttatgcataaactggttccatatccatttcgatgaggccttctcctcgctgcgcatagcaaactataaggcattcacacggctccacatcaagaaaaacggagaccttgaggtcttcaccctggctgtggacaaggtgccaaaggattggatgctggatccagactgggacatggaacccaagcagccattccagatgagctacaccaggaaattcccaagcaaatggagggctgcgtcgggccttgacccaatcaatgctgtgcgcattgttgaccggtttgtcatcccgcgaacgccctcaagtcctacaacaccaggaggctctgtttcaagtcctacaacaccaggaggctccgtttcaagtcctacaacaccaggaggctttatgagatgatgttcatgctgctgtgaaatataatgtaatgtacacaaggatatcttcgacttctcgggagaaattgtacagtacacaaggtcctctaacataccacgggagaaatagttgggaaaaaaaatagagggcaaatctccacaagatccaaatgttgtacatctggtgttatatcagttgtcctgatcaggtgtaatgataagtttttcaaacttagggtgtgattggtaggctgaatccggccctgcctggttgcatggatgcagcctgaacatgtttggttggttggctctgtgttgggccaagtactggagatacatttcctggccttgggcctgggaatttgtct

SEQ ID NO: 200108 - DNA, 1678 bp, Zea Mays
cgaagggtttaacattgttatggatggctgggggcactacagcaatcgtggcgctacagtactgccggtactgtttttgtgatgctgcaccctgcgctacagtacccccgggtgctgttcatggttagggctgcaagcgaggggagggagaagggggtggtggctgcgttgtcgccggcggaggcgaggaggatgtgcatggcgcagggcgtcgtggctgatctagagagagaacttgcggctaggactaggaggcgctgggaaggccgaccgcagggctttgccgacagctggcaagagagaagggatttccttctaatctcttgcttaccttcaattgatacaatctcttcttatatagagagggttacttgaccccttaacactagatctaatcttatctctaattctaatcttatcccaaactagtctatctttatctaaacaacctgagggcgtgctacagtgccacttggcccctgacaaacatcatggtatgttttgcaagatcccctatgtatcatgtcaagaagaaatagtggcctccgtcttttaaccttctgtttcctggttatttggtaaccatttgctagttagttttatcagtctgctttcgttataaggtttaaactaaggttagtagtgatgtgtaaataattgttgccctagcaacgtcactttgtggaatcagtctgttttgctttccttttaacagtggaaagctgcaaaagaggagcttcgtgatgaagaggaagatgagcctgaaactgctctagaggcattagaaaggaagcgacaaaaggaaatagaggagtggcggaaacaacagatagcttttggacatgctcaggaaaatgccaattttgttcctgttcgtggtgattggcgtgaccgtgtaaaacgcagaagggctgaagcaaaaaaggagtcaaaagatgacattgttgttgcatctttaagtagttccaaacagcataaaggatctcctgatctagcagagctttccaagggtcttcctactggttggcaggcatacttggatgagtctactaagcaggtctattatgggaacagtctcacgtctgagacgtcctgggagcggccaacaaatgaatgaagatctataaccttggtgtgcggtcaaccgaacgatacaagttgatttgttaatgtagttgatgctgttgaatgggcagcccaattttgtttggcagccaaccccatcctttagagaagaacaaaccacacctcaccaggagatggctgattgtttcattgtcttggtcacaaggcacaaaatttttgatgggataggttttgcttggctaacctatctgcagtacaacatctcttattaatcactaactagatgaaggcacatttcggtcataggcctcaagaatgacgatccatgcaacaaaacctcacgccgatttggctgaatacttgccaatgggtgaaaacatctaggtatgcttatccagctacccctgctgcagggagacaatggaaaggagctcccagacttcaaaaaatccctgtaatatttcctatgatactgacccatcattccatcaatatcatgcacctaggactagtcaaacaaggcatcattcaccagtcgcttgttaaccaagcgtcttgggatcaatactgaatatcaaagggtcaaatcttt

SEQ ID NO: 200109 - DNA, 1983 bp, Zea Mays
gtcccacgacccttccagggaagagagtgttcgtgacgcgggcggcccccaaatccgcataacaatctctgttgcccccccgccaaaatcctcagatccccttgctgcagtgcagatctctctataatccgcgctcgtggcgacctctcctccagcttccgttcctgaaatccatctctagtttcgccatttgggttttttctcgagggtttcgctcctcactcatctgatttaacgaagggagctgggtcacacccacaggccgcggcttctgaaattcgatggccgtggctgcagcgcgcctgacgctcccagatcgattcgacgaggtttacatagcctctgcccggtgaaaagatgggctcgtgggttatacgcgcctcgcacatgcacgagctgaatttcttctcgccttttcgatcatgacgtctttcgtttttttgacgtatatgattttccctggtgctagcgccgagcgcaactgtggttgagatccaatgctcctcgttactccgtccacctttacctatggaccagtttgcatgtagttgcagtctttttctaatgtcgataatctgatgttgtggctagttctcctcgagtggcaatataatattctccggatgcacatgatttggatcatccgctgtggagtttagggttttgttcaggttttacaggctctgctttctggtatctagcagtgtttgtttctttcgttctgaatctcgcttttcgttctgaatcatctctcgtttcgggacatcctgagtcatctaattttttccttttgaataacgtctcctactaagacgggtatacccttttcaagcattggatttatcagttattattacccatgtctctcctttttcttttcaagaatatatctcttacttattatttatatacatcatgataagcctcagcactaagagacaatgttcatatttgtgtgtataaatagggaagtcaatggatcaggatccaaatgttttttcacaatatggttaattaattttagtttaaaaataaataaaaatatacatttaaataattttagtttaaaaatcatatgaatagagtttaatcctaatctaatttgatctttaaattttatagtctaaaatctaaaccacattaccacctctatgtacggtgttagtatttttttaacaaaatccgagcctaaacgagtattttagctcgtgagcttattgggccgtatgtctgagcagtccaagtcccagatctagggttcctagttccttccacaatactggcactcgactcccagtcccagaggctacggcggctaccttctcacttctaggttcgctctgaatccagcggcgcgaagagcaccgcgctcctttccggctcgcaccgaagccctaataccgtcttcttccgtccggcgcggactgctgggttcccgttcccgcatcgcggactgctgggttcgccgtttctgcacggtgcggacgccatgtcgggtgtcggcccacccccgtgaagcggttttgccgcccatgatcccggaaaaaacccaatcgaggcgtcaagtcgatccctgtccccaggcgatcggcggcggcggatcgtttccgttgcagacagcaggtcctagagcgtcaacggctggcctctggatgcgatgtcccaagaatgacgtactcccctcacctacgttttacgggggccaccctgctgcgttgatttcctccgagaacggaaggttaggagcaaaatctgggagtttcccagaccaattttttctgacttccagtggctagcaggtttatgtaattttgagtttccatcctcagataatgggtggactactgtagtactgcctaatgtagtaatgttggcatgtactactacctagtaccataggtttacttgacattctgtaatgttctcgcatttaccatagcctacgtttccaatctgagtgtgtcatgtcttatttattttgtt

SEQ ID NO: 200110 - DNA, 1830 bp, Zea Mays
gtcccacgacccttccagggaagagagtgttcgtgacgcgggcggcccccaaatccgcataacaatctctgttgcccccccgccaaaatcctcagatccccttgctgcagtgcagatctctctataatccgcgctcgtggcgacctctcctccagcttccgttcctgaaatccatctctagtttcgccatttgggttttttctcgagggtttcgctcctcactcatctgatttaacgaagggagctgggtcacacccacaggccgcggcttctgaaattcgatggccgtggctgcagcgcgcctgacgctcccagatcgattcgacgaggtttacatagcctctgcccggtgaaaagatgggctcgtgggttatacgcgcctcgcacatgcacgagctgaatttcttctcgccttttcgatcatgacgtctttcgtttttttgacgtatatgattttccctggtgctagcgccgagcgcaactgtggttgagatccaatgctcctcgttactccgtccacctttacctatggaccagtttgcatgtagttgcagtctttttctaatgtcgataatctgatgttgtggctagttctcctcgagtggcaatataatattctccggatgcacatgatttggatcatccgctgtggagtttagggttttgttcaggttttacaggctctgctttctggtatctagcagtgtttgtttctttcgttctgaatctcgcttttcgttctgaatcatctctcgtttcgggacatcctgagtcatctaattttttccttttgaataacgtctcctactaagacgggtatacccttttcaagcattggatttatcagttattattacccatgtctctcctttttcttttcaagaatatatctcttacttattatttatatacatcatgataagcctcagcactaagagacaatgttcatatttgtgtgtataaatagggaagtcaatggatcaggatccaaatgttttttcacaatatggttaattaattttagtttaaaaataaataaaaatatacatttaaataattttagtttaaaaatcatatgaatagagtttaatcctaatctaatttgatctttaaattttatagtctaaaatctaaaccacattaccacctctatgtacggtgttagtatttttttaacaaaatccgagcctaaacgagtattttagctcgtgagcttattgggccgtatgtctgagcagtccaagtcccagatctagggttcctagttccttccacaatactggcactcgactcccagtcccagaggctacggcggctaccttctcacttctaggttcgctctgaatccagcggcgcgaagagcaccgcgctcctttccggctcgcaccgaagccctaataccgtcttcttccgtccggcgcggactgctgggttcccgttcccgcatcgcggactgctgggttcgccgtttctgcacggtgcggacgccatgtcgggtgtcggcccacccccgtgaagcggttttgccgcccatgatcccggaaaaaacccaatcgaggcgtcaagtcgatccctgtccccaggcgatcggcggcggcggatcgtttccgttgcagacagcaggtcctagagcgtcaacggctggcctctggatgcgatgtcccaagaatgacgtactcccctcacctacgttttacgggggccaccctgctgcgttgatttcctccggtaaatacgaggaagtaaatggcggggcttcatccatgtgacggccacaggacgcaaatgtgacgcctcctcgcgcgccaatgttaaaccggagggcattga

SEQ ID NO: 200111 - DNA, 2784 bp, Zea Mays
aaccattagctgctggtgtctactgttcatgggctgcgtatgacccatatgggcgtattgctattttgagaacgggatgggagtggatcagttcgatggatgttaattcgggcggtgttttgagttaaccccggtaataagagacgataatttcagatggtcatgcgtgcttacgagttttatgtccgtccggcaaggctccagcagtcgttgctaagggcgggttctccggactatttcccgattccagtgactatgcttatcagtttgttggcatatctagttcccctgacaccaccgtgtggtgtgatgttcggctgacgaaggatggtgctggtatctgcctaccgagcataaacatggataactgcacaataatagccagtgttttcccacaagggaagaagacctacaaggttaatggtgtatctacagcgggctggttctccgtagactatacaagcactgttctgctgcaaaacgtatctttgaagcaatcggtcctatctcgtacccctgcatatgatggtttgttccaaataaatcctgttgaaaatattttcaccttatataaggcacctgctgtttggttaaatgtccagcacgacagtttctacagccagtttaagcttagcatgagaagctatatcctgtccttatcgaaacaattcattgtcgattacatctcatcgcctgaagtgaacttcctcaccagtatatctggaagagttagcaagaagacaaagcttgtgttccgatttctcgacgaacgctctattgagccatcaacaaaccagacatatggctcaatgctgaaaaatctgacatttgtcaagacttttgcctctggaatacttgttcccaaaagctatatctggcctgttacaccagataattacctgctgccttatacttcagtggttgatgatgctcacaaagcaggactagaaatctatgctgctgattttgcaaatgacttaaccatcagctataactacagctttgatccattagcggaatatcttttcttcattgataacggtgccttctctgttgatggtgtattgactgatttcccgattactccttcagaggcagttggttgctttagtaacctgaacaccagcaagattgatcatgctaaacctctagttatctcgcataatggtgctagtggtgactacccagactgcactgaccaagcttatgaaaaggcagttgccgatggtgcggatgtcattgactgtcctgttcaagtgactaaagatggcatactgatatgcatgagctctgttgacctaatggatgttactactgttgcaaaatcacaatttgcttcgcaagtaactaccatcaacagtctgaaggctgggtctggagtcttcaccttcaaccttacttgggatgatatttctaagaacctaaagcccatgatatcgaacccaatgagcacctataatctgtacagaaatcctagaaacaagaacgcaggaaacttcatgagattgtcagactttttgacctttgcaaacggaaaggatttgtcaggaatcatgataactgttgagcatgctgcattcatggcagaggagcttgggtttggtgtggtagatgcagtgatcaaagcacttgatgactctggttatagcaaacagactgcccagaatgttatgattcagtcaaccaacagctcagttctggtgaagttcaagcaggaaaccaagtacaaccttgtctacatgatcgaagaaagtgtccgagatgccgcaccttcctcccttgcggacattaagaagtttgctgatgctgtttctgttggcaccacatctgttttcccggaaacccattactatttgacaaaccagaccaataagcttgttccgacccttaagtctgccggcctccaagtttacgtttacgtgctcatgaatgagtttgcttcccagccaaatgacttcttcgcagacgccacttcacagatcaatgcttatgtgcaaagtgctaaggtggatggtgtcatcactgatttccctgggactgctcacagatacaaactgaactcctgcacgagcatgggaaagaacatgccactattcatgcagcctccgcaaccaggtggcctcctttcaaccattctcccagatgcacagccaccagcagcagcgccaatgccgctcttgacggacgctgacgtcgcagaaccagcccttcctccggtcagcaacaccaccacggctgcatcgccttcgcatgccgccctcagaatgcgaacccatgtcttgagcatcgccacattgctgatgctatgtgcttccctcctcatctgaagatagtcctgctcaacatcatacgcggcgtggcgcattagagctgaggattttcacattgagctgctaatagcaattctttccaccacctttatgtagctatttttttcttgttctgtccggtgttttggaggatggatggatgttcagcttgatacctcaaaggtggcacttgagcgtgctgccagctgtctctaggtacattttggtacatacgtgtggtgatacattgtccatgtcaccgtttctactgccaacctgcctgtggagggcaaaatattccctacaaacatacagtttagggtctgtcttggatacacctcaatcctgtcagggtgttctatgatttggtaagaggctgtctccaatagatctacatatagttatgcaaaatactattttgtattgtagattattgtttacagagtgaagtttggaatagaaaacacgataatag

SEQ ID NO: 200112 - DNA, 1133 bp, Zea Mays
cgtgtgtgcaccttacaagagagaagtcggcccaagtagcgtgcgcgcagaagctactcccgaagagtcgctctcctgcgtccacgcctcgcttgcggcgactagggcgactgccgccgccgcccttcgcccagctgcccaggtcttcgtcgggcgctttaccggtgaagagcgcccaccataccagattggccaccagaggattgctacatttgggaaggatgagcaaaggccctgttccattcgccaacattgggaagagagcaaaagatctcttgtacaaggactacaactttgaccaaaagttttctttgtcgacatgttctaactctggtttgaatctcacagccactggtgtgaagatcaatgaagacttcattggtgatatacggacacagcataaaagcggcagaaccactgttgatgtcataatcgatagtgattctaaagtgtcaaccacagtcactgttgatgaagcactaactggtttgaagacttcatttgccttcaaggttccagatcacaagtctgggaagcttgatctgcaatatgcccacaatcgtttttcaatgaattcgaccattggtttgacatcaacacctttggttgagctcgctgcaactgtcggcacaagtgaacttgccattggtgctgagttcgggtttgatagtacttcagctgctgttaccaaatacaactcaggggttggatacaacaagtctgatttctctgtttccttgctactggctgataaaggggagactttgaaggcatcttacgttcatttattcaatccgaccaacggggctacagttgcagctgaggtaacacacaagctgaaaaccaaggagaactatttcacacttgggagctcccatgcacttgatccttcaacattgctaaagacgagattcagcaactcggggaagacacatgataatttatttgataagaatatgttcactttgttggaacttgagagttttttcatgcaatggaaagagatacatgcatcattttcatattacttagtgattatttgtatagactacaattttacaatgatcattcttacacaagaagttccagcagtgaaccaaggtcgagtgaatatactaagactatttgtttga

SEQ ID NO: 200113 - DNA, 2594 bp, Zea Mays
gcaccttacaagagagaagtcggcccaagtagcgtgcgcgcagaagctactcccgaagagtcgctctcctgcgtccacgcctcgcttgcggcgactagggcgactgccgccgccgcccttcgcccagctgcccaggtcttcgtcgggcgctttaccggtgaagagcgcccaccataccagtcgtggcgccgagccctactcctcctcccgccgccgccgccgccgccgcagactcttcctcgcgactcgccgctcgcccgactttccgagctccgacaccaaggtctgagtgtctgactaccacgctgcacctacgacctcgaggcgtctccaccgcgccattggcaaactaactcactttacaggaacaccatgggagagtcgagcaaggagctcctggacctgccctccgaccccaggcctcccgcctccttcatcgagtcgcttctcgctggcagggagcagcagcagcaggataaggagggaaagcgtaagttgggggcgtccactgatcccctgcccaaaagccaaggtactgttgaactagctcttcagcttgtacaagtgtctgatcagaaacgcggtaaggccgtaagggggctaaatagaagctcgaaatctttctagcggcacaatatagataaataatgatatcaatttcattgcctgcagtcagaaaatcataatgctacatgcaactttaagcagttattaagtctaaactaagcagggccacttaaaaaagggtgcatacccagtgccggagctttgtacatacagggatctaggaactgaggcaagatttctctcacgactgcaccagtcctacccttcaagcagggacacttaccagaagtttttttcccaatggtgcagtcagcaacttgtcctttgcattaggtaaatcatgtgtctctagacaggttccaaaacttaccaacatcagaattacaaatgtccaacaagcttcctatcctctacaataagtggcaatgcaaatagaactgatttgtgttaaaaggaggaccgtgaaagcggaacctgggacaggattggaacacagcaggttgtcttgcatcagcatttggcaaataatgaaaaaatattgaaaatcctgagatagtagccctcttacttgtgtgatgcggcaaacatgcttttctgtgttccctgtcgattcgacttgggtgtttggttctcggttgtgaaccaagttactgtggcggcagtggatgctggaacagttgcagatgcaggaatagcagaagcaagcaagcaatggtgttggtgcaggtggatctgtgcagtgtgcccactgcccactgcctagccatagcgtcagctagcccaagcagtgaggcctgtggaagaggaggtgaggtctcgaggggtgaggggcagagggtcgatggtgaggccgggaggtaccaccgcaccagcgtgaaggagaacagatacggagtggaggggaggcttctcgctcggcactcagagaggtgggcagctgccaattcagctagggtggctggagtccttttgtgggctgttcttggattacacagaagagttgtagtggaatttttctgggctcgccccaggctgcagccacccccagccctggggcctgaatccgcctctggctcgtacagtactttttgtattataacatttgtcgactagccctagatcccaagttatcacattacctttttatttgtactgtatttccttatagtcttaaatcacaccactgaatcatgtagtttcctaggtttaaggctgcagtacggcatagttagtaggtggtacacaaaagaatttctggtgttcttttgtgtgccagttcactgaattttgattgattgttttggtgtgtcagttatcgggaaagtgaaggatttcttgggggagattgcaagggccaaccagaagttgcagcttgatgcacagaacaagcctcctgtggagtacgatattgaagcccttactgggaacgaggaggaatacattgagatggatctgcttctaggtgtcgctgatcttcattcagagcaggctgtggaggcagctgaagcaacaataaacggacgccagacttcagaaatgtcatttgctttgcagctcatctgactcggaagatgatagtgatgacagcgatgaagatgctgatgacaaacctctcacgtctgacaaagataataaatgtaaaagtcctgatgatgcggagatgggtccagcgaaaggaaagaagcccaataaaagacagaaaattgttgttctcaactagtacccttgtcttctgtacacctaagaacaagggctggagcgcaagtggtgaatgtgttggcctggtattatcagaagttacggagggactctctctgttcttttttatttgtcacggtttagtttaaaaatgaacaggggacaaatattcgagaagggaggttgtatttttttcagtgttgtgcaatgttcaggccagctagggcaacgtgcacgggggctaaaagaagtaatgcatattccagtttatacaatgcgttccaatgttctggcctctgtatggtttccttgtgattttttaggtagag

SEQ ID NO: 200114 - DNA, 1356 bp, Zea Mays
gcaccttacaagagagaagtcggcccaagtagcgtgcgcgcagaagctactcccgaagagtcgctctcctgcgtccacgcctcgcttgcggcgactagggcgactgccgccgccgcccttcgcccagctgcccaggtcttcgtcgggcgctttaccggtgaagagcgcccaccataccagattggccaccagaggattgctacatttgggaaggatgagcaaaggccctgttccattcgccaacattgggaagagagcaaaagatctcttgtacaaggactacaactttgaccaaaagttttctttgtcgacatgttctaactctggtttgaatctcacagccactggtgtgaagatcaatgaagacttcattggtgatatacggacacagcataaaagcggcagaaccactgttgatgtcataatcgatagtgattctaaagtgtcaaccacagtcactgttgatgaagcactaactggtttgaagacttcatttgccttcaaggttccagatcacaagtctgggaagcttgatctgcaatatgcccacaatcgtttttcaatgaattcgaccattggtttgacatcaacacctttggttgagctcgctgcaactgtcggcacaagtgaacttgccattggtgctgagttcgggtttgatagtacttcagctgctgttaccaaatacaactcaggggttggatacaacaagtctgatttctctgtttccttgctactggctgataaaggggagactttgaaggcatcttacgttcatttattcaatccgaccaacggggctacagttgcagctgaggtaacacacaagctgaaaaccaaggagaactatttcacacttgggagctcccatgcacttgatccttcaacattgctaaagacgagattcagcaactcggggaaggtcggtctgctctgtcagcatgagtggaggccaaagtcactagaagatgcaaaacatagttaatcatatatggcgtatcactagaagttctttcctgccactgaatttactgtctgtagaagatgttccttgctgatttgtagtatcttaagatggaaatctagccatagggacaactatagaagattgttgaattgatgattcttggacatacattactgttgagtcctggagaaggaatccaatcaaaactattttctaggaaaaaagagctcaggtgcataaagcttaaactttacacaaatgtcactacctggttgcctgggattcgaaagggtgaatcaagcaatgaatatgactgatctagcacaaacgaatatccatcatcatttgctttcaaagtgggatccatagaaacatggtaaactgacacc

SEQ ID NO: 200115 - DNA, 1827 bp, Zea Mays
gcaccttacaagagagaagtcggcccaagtagcgtgcgcgcagaagctactcccgaagagtcgctctcctgcgtccacgcctcgcttgcggcgactagggcgactgccgccgccgcccttcgcccagctgcccaggtcttcgtcgggcgctttaccggtgaagagcgcccaccataccagattggccaccagaggattgctacatttgggaaggatgagcaaaggccctgttccattcgccaacattgggaagagagcaaaagatctcttgtacaaggactacaactttgaccaaaagttttctttgtcgacatgttctaactctggtttgaatctcacagccactggtgtgaagatcaatgaagacttcattggtgatatacggacacagcataaaagcggcagaaccactgttgatgtcataatcgatagtgattctaaagtgtcaaccacagtcactgttgatgaagcactaactggtttgaagacttcatttgccttcaaggttccagatcacaagtctgggaagcttgatctgcaatatgcccacaatcgtttttcaatgaattcgaccattggtttgacatcaacacctttggttgagctcgctgcaactgtcggcacaagtgaacttgccattggtgctgagttcgggtttgatagtacttcagctgctgttaccaaatacaactcaggggttggatacaacaagtctgatttctctgtttccttgctactggctgataaaggggagactttgaaggcatcttacgttcatttattcaatccgaccaacggggctacagttgcagctgaggtaacacacaagctgaaaaccaaggagaactatttcacacttgggagctcccatgcacttgatccttcaacacctttggttgagctcgctgcaactgtcggcacaagtgaacttgccattggtgctgagttcgggtttgatagtacttcagctgctgttaccaaatacaactcaggggttggatacaacaagtctgatttctctgcttccttgctacttgctgataaaggggagactttgaaggcatcttacgttcatttattcaatccgaccaacggggctacagttgcagctgaggtaacacacaagctgaaaaccaaggagaactatttcacacttgggagctcccatgcacttgatccttcaacattgctaaagacgagattcagcaactcggggaaggtcggtctgctctgtcagcatgagtggaggccaaagtccctcgtgactctttcagctgagtatgatccaaaggtggtaagtgcgccttcaaggatcggcgtggccatatcgctcaagccttgagatatgggtcaagtcaccttctgtaaaacagtacaagcgttacgtactgatactcgtgtccaagaacataaacttttggagcgatacctagaacaaccctctccattttagccttgtttttggtaagagccttgggcaaagaagtgttgtcagggagttggacttgttttgtggaatgtttccattaagagccaaccccacaccgaggattgcaaacacagaagtttgtattagtgcagaagtttcactctgcgatattttttccccatgttttcctagtcgacgcaaaatgattttggaggtgattgaacacctaacgtcttgagttgatggtagctttaacagctgtgatgataaaggggccacttgtacccagcaacagaagaatttgctcccaattcgtcgaattggttattctggtggatcattttttgttgtcgttggattggttcttttgaaattcatgtattcagagcagtctagtt

SEQ ID NO: 200116 - DNA, 1321 bp, Zea Mays
gcaccttacaagagagaagtcggcccaagtagcgtgcgcgcagaagctactcccgaagagtcgctctcctgcgtccacgcctcgcttgcggcgactagggcgactgccgccgccgcccttcgcccagctgcccaggtcttcgtcgggcgctttaccggtgaagagcgcccaccataccagattggccaccagaggattgctacatttgggaaggatgagcaaaggccctgttccattcgccaacattgggaagagagcaaaagatctcttgtacaaggactacaactttgaccaaaagttttctttgtcgacatgttctaactctggtttgaatctcacagccactggtgtgaagatcaatgaagacttcattggtgatatacggacacagcataaaagcggcagaaccactgttgatgtcataatcgatagtgattctaaagtgtcaaccacagtcactgttgatgaagcactaactggtttgaagacttcatttgccttcaaggttccagatcacaagtctgggaagtgctgataaaggggagactttgaaggcatcttacgttcatttattcaatccgaccaacggggctacagttgcagctgaggtaacacacaagctgaaaaccaaggagaactatttcacacttgggagctcccatgcacttgatccttcaacattgctaaagacgagattcagcaactcggggaaggtcggtctgctctgtcagcatgagtggaggccaaagtccctcgtgactctttcagctgagtatgatccaaaggtggtaagtgcgccttcaaggatcggcgtggccatatcgctcaagccttgagatatgggtcaagtcaccttctgtaaaacagtacaagcgttacgtactgatactcgtgtccaagaacataaacttttggagcgatacctagaacaaccctctccattttagccttgtttttggtaagagccttgggcaaagaagtgttgtcagggagttggacttgttttgtggaatgtttccattaagagccaaccccacaccgaggattgcaaacacagaagtttgtattagtgcagaagtttcactctgcgatattttttccccatgttttcctagtcgacgcaaaatgattttggaggtgattgaacacctaacgtcttgagttgatggtagctttaacagctgtgatgataaaggggccacttgtacccagcaacagaagaatttgctcccaattcgtcgaattggttattctggtggatcattttttgttgtcgttggattggttcttttgaaattcatgtattcagagcagtctagtt

SEQ ID NO: 200117 - DNA, 1470 bp, Zea Mays
atgtactttatctgttacgatctcttgtacaaggactacaactttgaccaaaagttttctttgtcgacatgttctaactctggtttgaatctcacagccactggtgtgaagatcaatgaagacttcattggtgatatacggacacagcataaaagcggcagaaccactgttgatgtcataatcgatagtgattctaaagtgtcaaccacagtcactgttgatgaagcactaactggtttgaagacttcatttgccttcaaggttccagatcacaagtctgggaagcttgatctgcaatatgcccacaatcgtttttcaatgaattcgaccattggtttgacatcaacacctttggttgagctcgctgcaactgtcggcacaagtgaacttgccattggtgctgagttcgggtttgatagtacttcagctgctgttaccaaatacaactcaggggttggatacaacaagtctgatttctctgtttccttgctactggctgataaaggggagactttgaaggcatcttacgttcatttattcaatccgaccaacggggctacagttgcagctgaggtaacacacaagctgaaaaccaaggagaactatttcacacttgggagctcccatgcacttgatccttcaacattgctaaagacgagattcagcaactcggggaagtgctgataaaggggagactttgaaggcatcttacgttcatttattcaatccgaccaacggggctacagttgcagctgaggtaacacacaagctgaaaaccaaggagaactatttcacacttgggagctcccatgcacttgatccttcaacattgctaaagacgagattcagcaactcggggaaggtcggtctgctctgtcagcatgagtggaggccaaagtccctcgtgactctttcagctgagtatgatccaaaggtggtaagtgcgccttcaaggatcggcgtggccatatcgctcaagccttgagatatgggtcaagtcaccttctgtaaaacagtacaagcgttacgtactgatactcgtgtccaagaacataaacttttggagcgatacctagaacaaccctctccattttagccttgtttttggtaagagccttgggcaaagaagtgttgtcagggagttggacttgttttgtggaatgtttccattaagagccaaccccacaccgaggattgcaaacacagaagtttgtattagtgcagaagtttcactctgcgatattttttccccatgttttcctagtcgacgcaaaatgattttggaggtgattgaacacctaacgtcttgagttgatggtagctttaacagctgtgatgataaaggggccacttgtacccagcaacagaagaatttgctcccaattcgtcgaattggttattctggtggatcattttttgttgtcgttggattggttcttttgaaattcatgtattcagagcagtctagtt

SEQ ID NO: 200118 - DNA, 1286 bp, Zea Mays
atgtactttatctgttacgatctcttgtacaaggactacaactttgaccaaaagttttctttgtcgacatgttctaactctggtttgaatctcacagccactggtgtgaagatcaatgaagacttcattggtgatatacggacacagcataaaagcggcagaaccactgttgatgtcataatcgatagtgattctaaagtgtcaaccacagtcactgttgatgaagcactaactggtttgaagacttcatttgccttcaaggttccagatcacaagtctgggaagcttgatctgcaatatgcccacaatcgtttttcaatgaattcgaccattggtttgacatcaacacctttggttgagctcgctgcaactgtcggcacaagtgaacttgccattggtgctgagttcgggtttgatagtacttcagctgctgttaccaaatacaactcaggggttggatacaacaagtctgatttctctgcttccttgctacttgctgataaaggggagactttgaaggcatcttacgttcatttattcaatccgaccaacggggctacagttgcagctgaggtaacacacaagctgaaaaccaaggagaactatttcacacttgggagctcccatgcacttgatccttcaacattgctaaagacgagattcagcaactcggggaaggtcggtctgctctgtcagcatgagtggaggccaaagtccctcgtgactctttcagctgagtatgatccaaaggtggtaagtgcgccttcaaggatcggcgtggccatatcgctcaagccttgagatatgggtcaagtcaccttctgtaaaacagtacaagcgttacgtactgatactcgtgtccaagaacataaacttttggagcgatacctagaacaaccctctccattttagccttgtttttggtaagagccttgggcaaagaagtgttgtcagggagttggacttgttttgtggaatgtttccattaagagccaaccccacaccgaggattgcaaacacagaagtttgtattagtgcagaagtttcactctgcgatattttttccccatgttttcctagtcgacgcaaaatgattttggaggtgattgaacacctaacgtcttgagttgatggtagctttaacagctgtgatgataaaggggccacttgtacccagcaacagaagaatttgctcccaattcgtcgaattggttattctggtggatcattttttgttgtcgttggattggttcttttgaaattcatgtattcagagcagtctagtt

SEQ ID NO: 200119 - DNA, 191 bp, Zea Mays
ggcaattggtgccacgagtatagaaaactaaaggcgaaggtcgagacaatacaaaaatgtcaaaagcacctcatgggagaggatcttgaaacgttgaatctcaaagagcttcagcaactagagcagcagctggagagttcactgaaacatatcagaaccaggaagccttgcgctctgcgcgttggagaaag

SEQ ID NO: 200120 - DNA, 3842 bp, Zea Mays
cagctgctactgtggaaaaccaacagatagaggatccaccaatatcgagatttacttggaccattgagaacctatcaagagttagcacgaagaagctgtactccgaaatctttgttgtcggaggctacaagtggcgaatcttgattttcccaaggggaaataatgttgaattcttatctatgtatttggatgtggctgattctggggtattgccctatgggtggactagatatgcacaattcagcctctctgtggttaatcaaattcacaacaaattcacaataagaaaagaaacacaacatcagttctctgctcgagaaagtgattggggtttcacttcatttatgccgttgggtgaactctacaaccacagtagaggttatcttgtaaatgatacttgtatagtggaagctgaagttgctgtatgtaaagttgttgactattggagttatgactctaaaaaggaaactggctatgttggtcttaaaaatcaaggtgctacctgctatatgaattctcttcttcagacgctgtaccacatcccatatttcagaaaggctgtttatcacatgcccaccactgagaatgatatgccctcaggaagcatccctttagctctacagtcactcttctataagttgcagtataatgacagcagtgtctctacaaaggagctcacaaaatcattcgggtgggacatgcatgattcatttatgcaacatgatgttcaagaattgaacagagttctttctgagaagttggaagataagatgaagggaactgttgtagagggcacaatacaacaattgtttgaagggcaccacatgaactacattgagtgcatcaatgtagatttcaaatcaacaagaaaggaatccttctatgatctccagcttgatgtcaaaggttgtcaggatgtctacgcttcatttgacaagtacgtagaagtggagcaattggaaggtgacaacaagtatcatgccgataagcatggtctgcaggatgcaaagaaaggagttctttttatcgacttccctcctgttctgcagcttcagctaaaacgttttgaatatgatttcatgcgtgacacgatggtgaagataaatgatcgctatgaattcccacttcaattggaccttgatagagatgatggaaaatatttatctcctgatgctgacaggaatgtgcgtaacctttatacccttcacagcgttcttgtccatagcggtggtgttcatggtggacattattatgctttcatacgacctaccctttctgatcaatggttcaagtttgatgatgagcgtgtgacaaaagaagatgcaaagagggcactggaagaacaatatggtggtgaggaggagacaaatcctggcttgaacaacactcccttcaagtttactaaatattcaaatgcatacatgcttgtgtacattcgtgaaagcgacaaggacaaaattatttgtaatgtggatgagaaagatatagcagagcatcttcggattagattggaaaaggaccgtgaagagaaggaacgtcggaagaaggaaaaagctgaggcacacctctataccataatcaaggttgcaagggatgatgacttaaaaactcagatagggaaagacatatattttgatcttgttgaccatgataaagtcccaagcttccgtatccaaaagcagatggcctttgctcaattcaaggaggaggtagcaaaagagtttggtattcccacacagttccaacgattttggctgtgggccaagcgacaaaaccatacttaccgacctaacaggccattgtgtcctcaagacgaagcgcatactgttggacagctaaaggaattggtgaacaaggcccacaacgctgaattgaaattgttcttggaagttgaacttggactggaccttaaacctcttcctcttccagacaagactagagaagatatatttcttctcttcaaactctatgaacctgaaaaggaacagctacggtatgttggtaggctctttgtaaaggcttcaggaagaccacaggacattctgccgaagctaaagatgttggcaggtttttcacaagatgatgatattgaactttatgaggaaattaagttcgaacccaatgtgatgtgtgaatacattgataacaggcttctgttccgatcttgccagcttgaagatggggacataatctgttttcaaaaatcttcaaaggcagatagtgctgaccgatatcgatttcctgacgtaccatcctttttgacgtatatacgtaaccgacaggtggtccactttcgttcactggagaagcccaaggaggacgattttttcctcgagatgtcaaagattttcacatatgatcaagtcgtggaaaaagtagctgaaaaacttggcgtggatgacccatcgaaaattcggcttacatcacataattgttattcgcagcagcctaagcctcagccaataaagtacagaggcgttgaacgtctactggacatgctgattcattataaccagacttctgatattctgtactatgaagtattggacataccacttccagaattacaagcgctgaagacattaaaagttacataccatcatgccacaaaagatgaggtgtcagttcacagtataagattgccaaaaaacagcactgttggcgatgtgctaaacgatatcaaaacaaaggttgagttatctcatcccaatgctgaactgagattacttgaggtcttttatcacaagatatacaaggtgtttgcaccaaatgaaaagattgaaaacattaatgatcagtactggacactgcgtgcggaggaggttccagatgaggaaaaaaaccttggtccctttgatcgattgattcatgtatatcattttacaaaagatactcaaaaccaaacgcaagttcagaactttggagaacctttttttatggttattcgtgaggatgagaccctatcttctatcaaagagcgtatacagagaaagcttaaggttccagatgaggatttctcaaagtggaagtttgcatacatttcacttggtcgtccagactattttgaagattcagatactgtagctttaaaatttcagagaaacatgtatggagcttgggagcagtatcttggactggaacatccagacacagctcctaggaaggcacacacaattaatcagaaccggcattcatttgagagacctgtaaaaatttataactaggcatgatagaaatttgagcaatgagctgccaagcaagggctaaaattgctgtcctgaaataaagcgtgccggggcatgttgctcaggtttttcgtggagctggtgagctagttcatgagactccaagtatgatcggggcggcttctcatctttccctgcttttccccggatacatataaagttgtgcagagatgaccccaccgaacaattgtctttagtagataagccagtacttcccgttagatgactttatacagtcgaatagccggcattttagtcgatctttccgttctccagttgctgttggtgctaggaggccttgagctgttgagggtacttgccctgctgtatattatgacgtagagtgtacaagtctttgttgttgacaattacacggtgttttgtaatttcagtgatacacttccaggtccttcagtacgtacttgcctggatggtgtcaatttggcattctatgttagatattgatccatctgttctaaattaaaattataaggcagtttgacttttttaagatatactgcctccgattttctattagttgtcgtttagaatagtgacacggtctccatattataacgtgtctccatattataactt

SEQ ID NO: 200121 - DNA, 3853 bp, Zea Mays
gccagctgctactgtggaaaaccaacagatagaggatccaccaatatcgagatttacttggaccattgagaacctatcaagagttagcacgaagaagctgtactccgaaatctttgttgtcggaggctacaagtggcgaatcttgattttcccaaggggaaataatgttgaattcttatctatgtatttggatgtggctgattctggggtattgccctatgggtggactagatatgcacaattcagcctctctgtggttaatcaaattcacaacaaattcacaataagaaaagaaacacaacatcagttctctgctcgagaaagtgattggggtttcacttcatttatgccgttgggtgaactctacaaccacagtagaggttatcttgtaaatgatacttgtatagtggaagctgaagttgctgtatgtaaagttgttgactattggagttatgactctaaaaaggaaactggctatgttggtcttaaaaatcaaggtgctacctgctatatgaattctcttcttcagacgctgtaccacatcccatatttcagaaaggctgtttatcacatgcccaccactgagaatgatatgccctcaggaagcatccctttagctctacagtcactcttctataagttgcagtataatgacagcagtgtctctacaaaggagctcacaaaatcattcgggtgggacatgcatgattcatttatgcaacatgatgttcaagaattgaacagagttctttctgagaagttggaagataagatgaagggaactgttgtagagggcacaatacaacaattgtttgaagggcaccacatgaactacattgagtgcatcaatgtagatttcaaatcaacaagaaaggaatccttctatgatctccagcttgatgtcaaaggttgtcaggatgtctacgcttcatttgacaagtacgtagaagtggagcaattggaaggtgacaacaagtatcatgccgataagcatggtctgcaggatgcaaagaaaggagttctttttatcgacttccctcctgttctgcagcttcagctaaaacgttttgaatatgatttcatgcgtgacacgatggtgaagataaatgatcgctatgaattcccacttcaattggaccttgatagagatgatggaaaatatttatctcctgatgctgacaggaatgtgcgtaacctttatacccttcacagcgttcttgtccatagcggtggtgttcatggtggacattattatgctttcatacgacctaccctttctgatcaatggttcaagtttgatgatgagcgtgtgacaaaagaagatgcaaagagggcactggaagaacaatatggtggtgaggaggagctacctcagacaaatcctggcttgaacaacactcccttcaagtttactaaatattcaaatgcatacatgcttgtgtacattcgtgaaagcgacaaggacaaaattatttgtaatgtggatgagaaagatatagcagagcatcttcggattagattggaaaaggaccgtgaagagaaggaacgtcggaagaaggaaaaagctgaggcacacctctataccataatcaaggttgcaagggatgatgacttaaaaactcagatagggaaagacatatattttgatcttgttgaccatgataaagtcccaagcttccgtatccaaaagcagatggcctttgctcaattcaaggaggaggtagcaaaagagtttggtattcccacacagttccaacgattttggctgtgggccaagcgacaaaaccatacttaccgacctaacaggccattgtgtcctcaagacgaagcgcatactgttggacagctaaaggaattggtgaacaaggcccacaacgctgaattgaaattgttcttggaagttgaacttggactggaccttaaacctcttcctcttccagacaagactagagaagatatatttcttctcttcaaactctatgaacctgaaaaggaacagctacggtatgttggtaggctctttgtaaaggcttcaggaagaccacaggacattctgccgaagctaaagatgttggcaggtttttcacaagatgatgatattgaactttatgaggaaattaagttcgaacccaatgtgatgtgtgaatacattgataacaggcttctgttccgatcttgccagcttgaagatggggacataatctgttttcaaaaatcttcaaaggcagatagtgctgaccgatatcgatttcctgacgtaccatcctttttgacgtatatacgtaaccgacaggtggtccactttcgttcactggagaagcccaaggaggacgattttttcctcgagatgtcaaagattttcacatatgatcaagtcgtggaaaaagtagctgaaaaacttggcgtggatgacccatcgaaaattcggcttacatcacataattgttattcgcagcagcctaagcctcagccaataaagtacagaggcgttgaacgtctactggacatgctgattcattataaccagacttctgatattctgtactatgaagtattggacataccacttccagaattacaagcgctgaagacattaaaagttacataccatcatgccacaaaagatgaggtgtcagttcacagtataagattgccaaaaaacagcactgttggcgatgtgctaaacgatatcaaaacaaaggttgagttatctcatcccaatgctgaactgagattacttgaggtcttttatcacaagatatacaaggtgtttgcaccaaatgaaaagattgaaaacattaatgatcagtactggacactgcgtgcggaggaggttccagatgaggaaaaaaaccttggtccctttgatcgattgattcatgtatatcattttacaaaagatactcaaaaccaaacgcaagttcagaactttggagaacctttttttatggttattcgtgaggatgagaccctatcttctatcaaagagcgtatacagagaaagcttaaggttccagatgaggatttctcaaagtggaagtttgcatacatttcacttggtcgtccagactattttgaagattcagatactgtagctttaaaatttcagagaaacatgtatggagcttgggagcagtatcttggactggaacatccagacacagctcctaggaaggcacacacaattaatcagaaccggcattcatttgagagacctgtaaaaatttataactaggcatgatagaaatttgagcaatgagctgccaagcaagggctaaaattgctgtcctgaaataaagcgtgccggggcatgttgctcaggtttttcgtggagctggtgagctagttcatgagactccaagtatgatcggggcggcttctcatctttccctgcttttccccggatacatataaagttgtgcagagatgaccccaccgaacaattgtctttagtagataagccagtacttcccgttagatgactttatacagtcgaatagccggcattttagtcgatctttccgttctccagttgctgttggtgctaggaggccttgagctgttgagggtacttgccctgctgtatattatgacgtagagtgtacaagtctttgttgttgacaattacacggtgttttgtaatttcagtgatacacttccaggtccttcagtacgtacttgcctggatggtgtcaatttggcattctatgttagatattgatccatctgttctaaattaaaattataaggcagtttgacttttttaagatatactgcctccgattttctattagttgtcgtttagaatagtgacacggtctccatattataacgtgtctccatattataactt

SEQ ID NO: 200122 - DNA, 2904 bp, Zea Mays
gaattcttatctatgtatttggatgtggctgattctggggtattgccctatgggtggactagatatgcacaattcagcctctctgtggttaatcaaattcacaacaaattcacaataagaaaagaaacacaacatcagttctctgctcgagaaagtgattggggtttcacttcatttatgccgttgggtgaactctacaaccacagtagaggttatcttgtaaatgatacttgtatagtggaagctgaagttgctgtatgtaaagttgttgactattggagttatgactctaaaaaggaaactggctatgttggtcttaaaaatcaaggtgctacctgctatatgaattctcttcttcagacgctgtaccacatcccatatttcagaaaggctgtttatcacatgcccaccactgagaatgatatgccctcaggaagcatccctttagctctacagtcactcttctataagttgcagtataatgacagcagtgtctctacaaaggagctcacaaaatcattcgggtgggacatgcatgattcatttatgcaacatgatgttcaagaattgaacagagttctttctgagaagttggaagataagatgaagggaactgttgtagagggcacaatacaacaattgtttgaagggcaccacatgaactacattgagtgcatcaatgtagatttcaaatcaacaagaaaggaatccttctatgatctccagcttgatgtcaaaggttgtcaggatgtctacgcttcatttgacaagtacgtagaagtggagcaattggaaggtgacaacaagtatcatgccgataagcatggtctgcaggatgcaaagaaaggagttctttttatcgacttccctcctgttctgcagcttcagctaaaacgttttgaatatgatttcatgcgtgacacgatggtgaagataaatgatcgctatgaattcccacttcaattggaccttgatagagatgatggaaaatatttatctcctgatgctgacaggaatgtgcgtaacctttatacccttcacagcgttcttgtccatagcggtggtgttcatggtggacattattatgctttcatacgacctaccctttctgatcaatggttcaagtttgatgatgagcgtgtgacaaaagaagatgcaaagagggcactggaagaacaatatggtggtgaggaggagacaaatcctggcttgaacaacactcccttcaagtttactaaatattcaaatgcatacatgcttgtgtacattcgtgaaagcgacaaggacaaaattatttgtaatgtggatgagaaagatatagcagagcatcttcggattagattggaaaaggaccgtgaagagaaggaacgtcggaagaaggaaaaagctgaggcacacctctataccataatcaaggttgcaagggatgatgacttaaaaactcagatagggaaagacatatattttgatcttgttgaccatgataaagtcccaagcttccgtatccaaaagcagatggcctttgctcaattcaaggaggaggtagcaaaagagtttggtattcccacacagttccaacgattttggctgtgggccaagcgacaaaaccatacttaccgacctaacaggccattgtgtcctcaagacgaagcgcatactgttggacagctaaaggaattggtgaacaaggcccacaacgctgaattgaaattgttcttggaagttgaacttggactggaccttaaacctcttcctcttccagacaagactagagaagatatatttcttctcttcaaactctatgaacctgaaaaggaacagctacggtatgttggtaggctctttgtaaaggcttcaggaagaccacaggacattctgccgaagctaaagatgttggcaggtttttcacaagatgatgatattgaactttatgaggaaattaagttcgaacccaatgtgatgtgtgaatacattgataacaggcttctgttccgatcttgccagcttgaagatggggacataatctgttttcaaaaatcttcaaaggcagatagtgctgaccgatatcgatttcctgacgtaccatcctttttgacgtatatacgtaaccgacaggtggtccactttcgttcactggagaagcccaaggaggacgattttttcctcgagatgtcaaagattttcacatatgatcaagtcgtggaaaaagtagctgaaaaacttggcgtggatgacccatcgaaaattcggcttacatcacataattgttattcgcagcagcctaagcctcagccaataaagtacagaggcgttgaacgtctactggacatgctgattcattataaccagacttctgatattctgtactatgaagtattggacataccacttccagaattacaagcgctgaagacattaaaagttacataccatcatgccacaaaagatgaggtgtcagttcacagtataagattgccaaaaaacagcactgttggcgatgtgctaaacgatatcaaaacaaaggttgagttatctcatcccaatgctgaactgagattacttgaggtcttttatcacaagatatacaaggtgtttgcaccaaatgaaaagattgaaaacattaatgatcagtactggacactgcgtgcggaggaggttccagatgaggaaaaaaaccttggtccctttgatcgattgattcatgtatatcattttacaaaagatactcaaaaccaaacgcaagttcagaactttggagaacctttttttatggttattcgtgaggatgagaccctatcttctatcaaagagcgtatacagagaaagcttaaggttccagatgaggatttctcaaaggttcctgacttccaaatgttttgttcttaaaccatttgatgtcttgct

SEQ ID NO: 200123 - DNA, 692 bp, Zea Mays
gagtttgatgcagcctctctgcaatgcagggttgcaatattggtgaaggtggcatttgtctagcagaagctgttcatggttctgctcctgatattgctggcaagaaccttgcgaacccgactgctcttatgctgagtgctgtcatgatgttgcgccacttgcaattcaacgacaaagcagaccggatccacaacgccatcctccagactattgctggggggaagtacaggactgctgatcttggtggaaaggcatcgacatccgagtttacaaatgcagtctgtgatcacatctgagaatcggatgtggttctttccttctgattgttctgtcttcctaatatctttttgtcgcatatggggaggagctttagctttaagaggttaactggcagcacctcgaacttctttgggtggttaacacggtttgagaccgtcaaatatttttgtcacatatcttgctgtccagaaattttttcaacttcagaatcgagtaaataattctgtaatcaacaacagcactacagcagtaggtagggtttatttcattgtcgttcttgaaatattgggctaactggttagaataccagttgggacatgttaatcctggggttttcatttatgcatacaaagaatcaaaatcttgtgtcaatggaaatttgcagctttattaacgtggtggtattatttatt

SEQ ID NO: 200124 - DNA, 1958 bp, Zea Mays
caggacaacagtttctcggtgtttgattattgcagcatgttttctgtcgggaccaaggatgggttcaagatctttgacgctcgtaatgggaggctctgctacgaaaagagtcttgggggattcaacattgtggaaatgctatttggcacaaacctacttgccattgtcggaaccggtgaacagcctgcaatgtctcctcgtcgtttgtgcctgttcaataccaaaacaggagcatcaaagagagatctgaactttaagacttcaattttggctgttcggttaagtaggaagaggcttgttgttgtattgcaggataggacttttgtttatgatctaaatagcactactatattggacgaaattgaaacggtacccaatacaaaaggtctatgcgcatttgctcctaattctgaagagtgttatttggctctcccagcaagcacatccaaaggatctgctttagtatacaaagcatcaaaaccggaattaatatgccagatagatgctcatctggctccgttagctgcaatggttttttctttgaacggcatgtacctggcaacggcttctgaaaagggtaccatgattagggtgcatcttgttgcacaagcaaccaagtcacatagctttcggcgaggaacatacccatcgacaatctattcactggcatttagtccctctgttgatctgcctgacgttcttgttgccacaagttcatcaggatctttgcacatgtttttccttgatgcttccaggaacgcaaggagacaagcaaatacattgttcagctcagtgattcctggatctgtaactgatgctttggatccagctaatcatcatgttattcacaatgttgtcactgcagacatcaagagttgtctagcagtacacagtgttgaaaattcccaaaattcttccaaatttccctcgctgaagactgttatttacattgtaacacacaatggatacttccgagagtatctgatcggcacaaccaagtcaaatgaatcttcatggttgttggagcgtgaatttaatctcctggatgcttattcgggtagtcccaagcagaacgagctgcacatagactgacttgtaatgctcgctcctctgaccggaacctgagcatctccaacagaagttctatatttgagtccttaaaattaaaatatgacctgatttaaagtgtttagggctataaaactgtttgtaactccaacaattgagttctatatcatattattaggaaataaatcatgttatttaggaaataaaagattaaaaatagtgtagaaaatgaagatatggctctagtagatggggtactatatttaagacccgggagactgagccctataactgtttgatgagtttttataaaataggacccctgttggagtatgttggagtatgtttctggtgttagggtcctatatttcaaaataggatcctatttaggactcttgttggagatgctctataggtgattatatcttgggccttgacttaaccggtcattgggactaacttcaactgtacatagtatagaggtgttcatcactggtgggaatctacatgttgcggctcgtggcgcgtgtaaattatcatacaagtggacagcaagtttggtgcaatgcataaaaagctttcctaattttgagtacgtttcactttgagccagttaccccacccacccagaaaaaaacacccttcatcacttttgatcattttgatcactttgaacaagtgtgtaattgttttaccgttgtaacaaaaacaagtcttgtcttcttgctaattacgcttcatcagattgtctttagtgaggactcccttccataggtaccacaagaagattttatttttgagggtacttttaactttttaactttcataaccgttttttatatttgggatccgtgtccttatcatggtttcatatagagatttcaccaaga

SEQ ID NO: 200125 - DNA, 5303 bp, Zea Mays
cgctcggctccgcctccgctggtaggtcacatcacactcgcttcaatattgacaccaccaacgcacgcacgacccttcttcctcctcccggcggctaggctgatttctccttgcatcgcctttattgcgctcagctgctctgccaagtgccaacgtcgtacacctccagcagtggagggagccggagcacgagcaacaccaaggtgtccgccacagaaatctacatataattgcagccccaaccacctcgttcctcttccccttcccccctccccagccaaatccgctttcctagctctaatcgccgccgatctcgccggaggaactgctagctagctgctcccttcacttctcaggagccaggattaaaagttgcctcaaagaagaagatccctctgcgccgctgcatgttgagcgagcctaccgtagcgacgagcgcggatatgaattggtgttgtgttcctagggccaacaagagagaagagaacccttactccaacagcatcggcggcatctactccgagaagaacataaggctgttctcctatgccgagttaagatctgctaccgacaacttcaaccgcaccaacaaagtgggacgaggcggattcgggacagtttataagggaaccatccgaagcgggcgagaggtcgcggtgaaggtcctctccgccgagtccaggcagggcatcagggagttcctgacggagatcgacgtcatcagcaacgtcaagcaccccaacctcgtcgaactcatcggctgctgcgtcgagggaagcaaccggattctggtgtatgagtacctcaagaacagcagccttgaccgtgcgctgctggtgagcctgccgacttcacctggagcgtcaggtctgctatatgcctcggagtcgctcggggccttgcgtacctgcacgaggagatcgcggcgccgatcgtgcacagagacatcaaggccagcaacatacttctcgacaggaactacgtccccaagatcggggatttcggtctggccaagctgtttcctgacaatgtcacccacatcagcacccgcgtcgcgggaacaacaggctaccttgcgcctgagtacgcctggcatggccagctcaccaagaaagcggacatctacagctttggtgtccttgtcctggagatagtgagcggcactagtagctccaggagcatactcatggatgacaagattctcctagagaaggcatgggagctgtacgaagcgaagaggctcaaggaactggtggatccagcccttgtagactgccctgacgaagaagccatcaggtacatcatggtggccctcttctgcctacaggcggccgccgcgcgccggccgacgatgccccaggtcgtcaccatgctgtccaagcccgtccggatcaacgagagcgagctgacggcgccggggtacctccaggagtacagcaggcggagccccttgtccaaggccaccacttccaccgactccaggttcaagaacctggcgtcccaggaggactccaacatgttcagcacggtggtgccacccacggtgaccgagatgagccccaggtgaagcaaccgccatgtaattttgactaattccttccttgcgttttgtcaaccggcggcgactatatgatgtagtgccaagtgtgttttcctcctgcaaatgcggcagctagatcttgtacatatagattagtgaatccatgccagacccagagcaatgcaagattgctgtttgttgcacagcttcagattattattagggcagtaccatatcatcgtaacagtttcagacctcaacttgtatgagatcacaggcatctcagtgacgacacaactggacaggggtgaaaacagcaaagatacgactactgtggtgatactaaattatgaatgttctgtgctcatacgaagacatcctgatgcagatctctgcaaaagatcagtacgggataaacgggtctgcgaaatcatcagaaacaaaaacacgtttccatctactgacagtcaagcctcttgtgtttctgtaatgctacgctttcctttccggtcactccgacgccgcaggctgctctttctcggcctccgaggggccattggcggtgctggtttcttggctctctgcaggctgcttggcgtcgtttgctggggctgccgcgccgtctttggcaccaccatcctttccaccttctttggagccatcctttgcgccctctttagcagcaggtgctggtggaggttgcaacatatgtggcggtggagcgtgcttcagcttcactaagatatggcgcatccgggagaggtcggtgggcttgccaggcttggggccctgaataactgtgacggatggcttcttgtccttgtctttctttccccgcttctcaatggtggctatttcatgcgggatgagatccgagatcgatttccagtactgcttgtctgcgttggcatggaatttctcctggctggctacaaaaatctgcagcagaccacaggagcgattagtaccaaacatagaaatagattagctaataaacacagagccctagctgcttacatatgataggcgcataccttctccctttctctgttgttgaccatattcgacgcacagttctgtatcctcttctcaaaaaaagctttcttgaattcttctgcttcagcaattatttgggcacgtagctccttctccttctgttcttttttctcaagttccatagcatttttcctaagacattgttgaaaaaggaagcaataacaaattaaaactagagtggcaggaaaaaaaatcaaggaagccaagaaaatgacatcattcgatttgagggacacaaaagacaggacagtaacttggtctgtacccttacaatagttacaggctccttacaaattgaccttactggactttccacaagataagcattaaacaaatcagaatcaacgccactccaaatatagacaaatctactactgctgcaagcctgggacaatgtcctgatgaagaacatcataccaaacacggcttacacaactccaatattcatgaacttctattagttaactaccaaagtaaattccgaagtaaatatagacgtgcactaaaccataaaataaacgaggttgtatcagcagacaattgcgtcatagtctcatagagcatattatgttaggaacctaatgcacacattttgcaaggttacaaagacgagcagtaccaaaagaatgtatggattttctctgggaggtacaccttcactgatttgaggatttcaagaaaaccagcagatatgaaaatctaaaaaaaatgtgtccacctggtgtgatgtcagcaaaacatacagttggaagaatgcagcaccagatgaagcattaagtggtcgcaaaagaacaatggtgaataactaactagttatatccacatacatagatagctaagacatcctacaatcaaggttttccagaaatgcatcaaacaccaggaagagaacaaacatacatgaggactgtaagtttgcaaaaaaaaacatcggttttctagagtacaaggtaatccaacaaagaacattctccaactaatatgacgtttttggaagcctctatgattgcatggcacaaattcatattttagaaggttggtttgacatactttttacctttattcctctagtttctgtgggacttagttcatacaatttcgatacaatatgataataggctgtataggtaagattgggacagatacaatctaggtaaaatgcaatagctaaggcagggttagttctgaattatgtcatgctagcttagtctgaattttactttctattgagtagcaaaccaaatctagatgtatatgcctatgtttattagaaacattactaggttgtaggttccttttggttcgagtataacaaaaaataaaattgagcaatacgcagttccattctaaccaaatctagttaagagataaaacacaaatttccaatgaaaatctgtcagtgtttaatactctgaatgacaagtcgttttgccttttctagattcatagtttttactaagggggtgtttgaatgcactaaatctaatagttagtggctaaaattagttgtagacatccaaacaccctagctaatagttcaactattagctatttttagtaaactagttaatagttagctagctatttgttagctagctaattccactagcaattttttagccaactaagggtgtgtttgaatgtactagaactaatagttagttggctaaaaaattgttagtggaattagctagctaactattaactaatttactaaaaatagctaatagctatggtgtttgaatgtttccagctaattttagctactaactattagctctagtgcattcaaacacccccctaattattagctctagtgcattcaaacaccccctaactattaggtctagtgtattcaaacaccccctaagtactatctagacacagtgtatacaggtgcatagcaaaaggtacctaaaaaggcaaaaacgacttataattcaggacggagtacctctgaattgcttcaataaactaatttcaggggtaaaattcacaaaacaactttaagtgctgggaccataggtgtcaagcggtcaaggaaaattactacacactgctgcatctagctacttatattcgtatttttcatattttatggtaatctgcatacagtagctccataccatcctattcatggcagtgatagtatggcaaaaacagagatactagcagatccaactatggttacacctatatggtatcaacgattcaaacacttaggctgatttggtgattatggatcccgagtggatccatggggagaaattctcttgctattcaataaccttgcaattcaattttgaatagcaagagaatttctccccatggatccactcgggatccccggtcaccaaatcagcccttatggagaacaaaacccaccctcgaaggtctgcagctatacttaagttctcagcttataaactagtccatgactggctattcccaacagcgcaatttctagtgtatcctaattcctaaccaaccgaagtaatagaaaccagcaatttccgtacagagcccctcgccgtgtttcgttcaccttcgtagtgcagaagaagcggctacagttagtcgaaagagcgccagaaagcgttagatctgactcgaacagcccgaaacctagcccacacgcaagcaagcatacaggcagcaaaacggcgtgtcccccaagcagatcggaaccggcgccggcggtcctcac

SEQ ID NO: 200126 - DNA, 748 bp, Zea Mays
cgtcaattcagctcggcaatccatcatggattcatgttactgctctagaaaggatcaatggtcgatcgatggagtgatgttgatcgattcaaaaatgaatggcacaggccatcgatagattgattcatccactgatgacgatacatgcgtctgtgcttagtttacatcgaccgcttacagcaggcagccattgacattgattgatgagcacacatcgatcatgagcatacgccggctggtgcaactactacacgcctacgatctgaacaagtagattagttgccggggacgaagttcgtggcgtatgcccaggcgttgttggcgacggggtcggcgacgtggtcgaagaggttctcgatggggcccttgccggtgacgatggccaacaacgcctgggcatacgccacgaacttcgtccccggcaactaactgactgagcaacgccgtacatgtgtactaccatcagatccatccattcgttcgtccgtccgtcgagtgaacagtgtggtcttctctgtactctacttgttcagatcgtaggcgtgtagtagttgcaccagccggcgtatgctcatgatcgatgtgtgctcatcaatcaatgtcaatggctgcctgctgtaagcggtcgatgtaaactaagcacagacgcatgtatcgtcatcagtggatgaatcaatctatcgatggcctgtgccattcatttttgaatcgatcaacataatataaacataaaaatttagaattaaaa

SEQ ID NO: 200127 - DNA, 503 bp, Zea Mays
tcagcgtacacgcgtacctgcgtttggcgtctccattcgtcggcgaggaagaagctcacgtcgagaaaaccctcggccaagggcgagggtgacatctccctgtctgcaacgattgggtccgccgccatatgggtgtcgaggccttagtcgatctcttccccagcgaagagcggcctccagagaactattttacctggaaaccctttcgtatttacccatcttcgtcatttgaagttagaactaattctgcctggcaagaaaaagataaagactgatgtcctcgactatgttatctcttggaggttgctcctttcatcgaaaaactggagctgctagttattctgaaattttgtcagcactgaggatacatgtcatgaatagaccccctatgttgtttatgatgcatgcatagcttcatttgtacgtttgtttttgtggggtttttctgaagaagtatgtgaatcataatgtaactctgctatatgttgcatagatgatgctga

SEQ ID NO: 200128 - DNA, 2292 bp, Zea Mays
aagatgaatgtttaactggaactagcgagtgtgataaaatgttccttatcggcggaaggggcagatatttttcggttctgtgacggctttccgagtttggtggattgtgtcgagagagtcagagagggacaccaaagccggctacggccagtccccagtcagcctagcttcgctcgctgttcgttcgtcctgatagcttgaaaccgccatggccatggggctccccggccaccgctgctgccgccttcccgctctcgggtcggtcactccactctgtcccgccctcgctcgcaggcccctcccgcggacctcggatctccgctactcctccctcgaagcccaagcccataaatcctaacactaacagctggggacactattggggaggaggtcctgcgcatgttccttgaggagaggcaactgcacggcgatttcgtcaccaagatctctgacatggtctggaggaggaatggcggcaatgttgatgcggttgaggcgaccacagaccaaggcaatgctgtagatgttgctcagcctgaagacgtgcgggaagatgttgtggacgacggaatgttgagactagcggcaaccagaggttgggtgcccggtgacagcagccctcctttgagcaagaggctttcagctaaggattggcagaatgagagagacaaaaggaaggagctgaatcttttgaaatatgaagcactcaaggatgaattgctgctcttgaccacagggattggagcagcatgtagtttatactgtctcctggttttctctctcgaggtacgtcctcatatcaaaagaaagaaacataacttaaatgtttccgtgtctaatctaaaactcttgtagcaactgatgtttacccacaaaacaacagcttggttgcctggataataaaatgcattaccataaatatgttcctgcataattggctgaactgggttatatcagcaattaagtgtccataaagggtagaactagtgccagaggctcctacataagtagggtctgatgaaagaataaatcgaagcaagtattctccgtaaatttggagagactgcttcaaaccgtgacctggtgatcaactttcactattgcaccaagtccaccctttgcagtgcccatagtttgtcatttatgcattctggaccttgcatcatatttgttagtttttgattcatgattagagcgcaccaaacatacagcctgatgtatgtatttttttcttgtatcaagtgttctttggtaagtgatttattaatcatctcatcattaattggacatccagacacctagcgaagaccatcagactgctgtcagttatgctttgggggttggtttcaggtaagcaagcccttcacagcttaggagtttttttgctcatgatttcagctgaagttttaacaagtgctttaagtattctgaaacttgttgctccatgtggaatagctgcttgtatcttcaacttctgtgtcaacatgctgataacctatcaaagcaagatattccacaagtttttctaaagaagaaagtgaagaaaattggcattacaagtgaagatttgaagaatacaatagagaagacattgggtggtggaagagtagctctttcatccccaaggcttgtgattcctgccgtgatttttggattgtcagctttatcagaccacttcaaaaatagttttttcagttttgaggttcttccagggatgatgggtttcctcgcatacaaggctgcagctttggttcaggtctacagagataacgaggatctccgcttgatacttcctgaggaagaggatgctgacagtgaaagcacttgatgcatacaaattagagattatgttaacctgttgataaaaacagaacggtctgatttactgagtcatgcttcagttctgaaaaaaaatctcttaaggatatcctaaaattcgtttgcttgaacagcctagtgccaggagtccaggacagctcactactattaaaatgagatgtaaaattacctgataatgtcataatttttcacaaaccaaacaacttcaactcgtcatagcaaggcttctgattgttaacccagacaagagagtttttttttactattatgatactcataagaagtggcttctctacaatagtatcaatagattggaattctctataatgatatttgtaagcgaggaacttctccaaaacggtatttcaccaatacttattgtattttcttattttcttttctaccatctaaaacgagcacaattcctatagttttattggtgcacactcaaga

SEQ ID NO: 200129 - DNA, 2192 bp, Zea Mays
agcacactgaaatgaatcgttatgtaaggactcctttttctgtaaccatacaagatgaatgtttaactggaactagcgagtgtgataaaatgttccttatcggcggaaggggcagatatttttcggttctgtgacggctttccgagtttggtggattgtgtcgagagagtcagagagggacaccaaagccggctacggccagtccccagtcagcctagcttcgctcgctgttcgttcgtcctgatagcttgaaaccgccatggccatggggctccccggccaccgctgctgccgccttcccgctctcgggtcggtcactccactctgtcccgccctcgctcgcaggcccctcccgcggacctcggatctccgctactcctccctcgaagcccaaggtcctgcgcatgttccttgaggagaggcaactgcacggcgatttcgtcaccaagatctctgacatggtctggaggaggaatggcggcaatgttgatgcggttgaggcgaccacagaccaaggcaatgctgtagatgttgctcagcctgaagacgtgcgggaagatgttgtggacgacggaatgttgagactagcggcaaccagaggttgggtgcccggtgacagcagccctcctttgagcaagaggctttcagctaaggattggcagaatgagagagacaaaaggaaggagctgaatcttttgaaatatgaagcactcaaggatgaattgctgctcttgaccacagggattggagcagcatgtagtttatactgtctcctggttttctctctcgaggtacgtcctcatatcaaaagaaagaaacataacttaaatgtttccgtgtctaatctaaaactcttgtagcaactgatgtttacccacaaaacaacagcttggttgcctggataataaaatgcattaccataaatatgttcctgcataattggctgaactgggttatatcagcaattaagtgtccataaagggtagaactagtgccagaggctcctacataagtagggtctgatgaaagaataaatcgaagcaagtattctccgtaaatttggagagactgcttcaaaccgtgacctggtgatcaactttcactattgcaccaagtccaccctttgcagtgcccatagtttgtcatttatgcattctggaccttgcatcatatttgttagtttttgattcatgattagagcgcaccaaacatacagcctgatgtatgtatttttttcttgtatcaagtgttctttggtaagtgatttattaatcatctcatcattaattggacatccagacacctagcgaagaccatcagactgctgtcagttatgctttgggggttggtttcagctgcttgtatcttcaacttctgtgtcaacatgctgataacctatcaaagcaagatattccacaagtttttctaaagaagaaagtgaagaaaattggcattacaagtgaagatttgaagaatacaatagagaagacattgggtggtggaagagtagctctttcatccccaaggcttgtgattcctgccgtgatttttggattgtcagctttatcagaccacttcaaaaatagttttttcagttttgaggttcttccagggatgatgggtttcctcgcatacaaggctgcagctttggttcaggtctacagagataacgaggatctccgcttgatacttcctgaggaagaggatgctgacagtgaaagcacttgatgcatacaaattagagattatgttaacctgttgataaaaacagaacggtctgatttactgagtcatgcttcagttctgaaaaaaaatctcttaaggatatcctaaaattcgtttgcttgaacagcctagtgccaggagtccaggacagctcactactattaaaatgagatgtaaaattacctgataatgtcataatttttcacaaaccaaacaacttcaactcgtcatagcaaggcttctgattgttaacccagacaagagagtttttttttactattatgatactcataagaagtggcttctctacaatagtatcaatagattggaattctctataatgatatttgtaagcgaggaacttctccaaaacggtatttcaccaatacttattgtattttcttattttcttttctaccatctaaaacgagcacaattcctatagttttattggtgcacactcaaga

SEQ ID NO: 200130 - DNA, 1473 bp, Zea Mays
ggcaggtgcgaggtgttcatgactaacggggccttcgtcgcggaacgctccggggtgcacgcgcgcgacctgcgcatcgttgggccccttctctctcgctgccccggcatcctcggctttgctcgtttcgcagctcgagagaaggccatggtaatcgatctagagttcataagagctattgtaactgcggacgaagtcctgctgctggaacctcttgctcaggaggttatccctttcatcgataaattgaggcggcattttccattgaagagcctggaggttgatgttggggccacacaagtgggtaatgtgaatggcaagcatgctaaaactgctgcagagtgtgagctccccctcccctttgagtttcaggtgttggagctcgccctagaagctgtatgcttgtcatttcattcaagcctatctgatctgaataggcacaccatctttgtgatggatgagttgactaagaatgtgagcaccaggaaccttgaacgtgttcgaagtctgaaaagaaatctaacctccctgctcgctggtgtgcaaaaggtcagagatgaagtagagcatcttttggatcataatgagaatatggcacaactgcacctatccaggaagcaaataaaatgtccgcaggatgaaattctactggcttctgctgctttaaatagcaatcttccttcaaaaacaaagctgggtacaccaaattctgttgttaaccaagccatgggcattgctatgactgcgccactggccgacaatgtaggagacctagagatattacttgaatcttatttcatgcagctggatggaattcgcaacagaattatgatggtccgaggatatattgttgacacagaagactacatcaacatacaacttgacaaccaacgcaatgaactcattcagttccatcttgtactgatcattgtatcatttggcatagctatgaacacattgatagctggagcgtttgccatgaacatgcctcacaatggggagatgaagaagtttgtaggcccgttttggccatttgttggggccacatcatctttctgcttgttggtcagcgttgttttactgggatatgcaagggggaacaggctacttggcagttgaaggcggcgttagataaatctatgcaagatcatcttcacattgcctcctgacttggcggaaactaacgtggcataatatgggtgaaggcaagtgcctggtccatctgtatattgatgctttccaatcatacccttttggagtttgcatcgggcattgcatgccatatatgtataccgacactgtctactactattataacaatgagagacgcgacaaaaaattcctgtcattagcacaccagaactcaattgtctgattcttcagaatggtgacatagaaacaagtgattgataacagcatgttactttctgcgtttaagatcacaacattttcttgctctttcctcttcttttt

SEQ ID NO: 200131 - DNA, 589 bp, Zea Mays
taggaattcagaccatgatgtctagcctcgacaaacctgaagtttgaacgtatgacagatgacatcttggttacttttgtggatggacatcttggtcgcttttgtggttggcttttgtggatgcgtgaagctacaattgtagttgtgtaagatttatgtgcataactatgtgggttgcatcagctctccgtactatgtatatacctcccgcgtagctgcctacctatccctaacttgcgacccataaacgtagacttcgatcctataatcttatttgggatcagtttcaggctgtaatagccctgaccgtcttactatggaacacgttaaagtatggtctaaaactttaatgcggattatgttcggtctatctatgtttggtctcatagttgctttgttgctccccgcgctaaacggttttattggagacttaatcatcctttgctgaattttaatatagcatatataattgtttgctcatgttttaccttgtgttggatagggcgcccgaatgggcgccacatgatccagtaatataaataaagaagcttaaatatgataaagatacaaactctcattgatactcgat

SEQ ID NO: 200132 - DNA, 1942 bp, Zea Mays
ccggctgactgaccggcccttgctttaccgccgcggcgaaagggcggcgcatgtcctgccggatatgccgtttccggcatggtataagtaggcgacgcccaccgttcctcctatcaccaccatcccccgatccgacccaaaacggcaggcatgcatacgtgcactaaagcaagtagtaacgatgtatctattccatccttgatcatgcatgtgtttgtggagtgtggaggtccattgcagggcaaccccccgttggcaggtgcgacggcgacgtacccctaccctgccaaaggggatttgcccggcgatgcgcctgcacacacagtggttctttctactctacctctccggctcaaggtaggagaagacgatgctccatccggctggccggttacatccggcctttcttcagcccatcggataggagcccaatatctgatcgactgatccgtcttggattggacaaaagccctaaagcccaccacaggatcctcaacagcctaaataggcccatgaaaagcctctcacagctccgagctagacccccacctccccgcctagacctagggttgcttccttccttttaacctcgcgccgccatccgacgcccatctgctccaccctccacccagccgccgccgccgccgcctaaggagaagagggtccggccgtctccttgccccgatggcgtccgagaagaagcagtccaacccgatgcgggagatcaaggtgcagaagctggtcctcaacatatccgtaggggagagcggcgaccgcctcacccgcgccgccaaggtgctggagcagctcagcggccagacccccgtcttctccaaggcgaggtacacggtgcgctcgttcggcatccggcgtaacgagaagatcgcctgctacgtcacggtcaggggcgacaaggccatgcagctgcttgagagcggcctcaaggtcaaggagtacgagctgctcaggaggaacttcagcgacaccggctgcttcgggttcggcatccaggagcacatcgaccttggtatcaagtacggctccgtcttatatactttacgtgaataatagatatgagtatgatccatcaacaggcatctatgggatggacttctacgtcgtgcttgagcgtgctggctatcgcgtcgcgcgccgcaggaggtgcaagtcccgtgttgggattcagcatagggtgaccaaggaggactccatgaagtggttccaggtcaagtatgaaggtgtcatcctcaacaaggctcaggccagcacgatttaaacctcacctgtggggcaaaacagctctcgcttcatctccatgtgaacgcaagatcaccttccaaggtttttgtttgagttgtatcctctggcctgactttttagtctactagcagagctataatcactatatgaattattttttgtgcccttaccatactctgctgttgcttgagaatatgttattagtctgtcctagctcttctttggttacatgctttgtttaccgcatctgcgtttaagtttttgttgactagttactctttagactacagtgcaaaacagcgtcataatcccgctttgcatagcacacatctttgctcgggctgactccagcatgcggtcgcggacacggaactcacggcggcggaggctattgcccgatgcggaaaaagcagcagctcgcgaaaaacaggagaggatacacaggtgtagtgaagacacccttttttcgcaaccgcgacctgctggatggggctacagtgcttcgtgatctaaaaaacgcattcgcgatcgtatatgtcatctgctggagtcagcctcagtcagcttctattttccagaccgggagatggtaactagtcaacaaaaacttaaacgcagatgcggtaaacaaagccaaggggtattttacactttttaataaatcatattaattacacttttt

SEQ ID NO: 200133 - DNA, 1892 bp, Zea Mays
ccggctgactgaccggcccttgctttaccgccgcggcgaaagggcggcgcatgtcctgccggatatgccgtttccggcatggtataagtaggcgacgcccaccgttcctcctatcaccaccatcccccgatccgacccaaaacggcaggcatgcatacgtgcactaaagcaagtagtaacgatgtatctattccatccttgatcatgcatgtgtttgtggagtgtggaggtccattgcagggcaaccccccgttggcaggtgcgacggcgacgtacccctaccctgccaaaggggatttgcccggcgatgcgcctgcacacacagtggttctttctactctacctctccggctcaaggtaggagaagacgatgctccatccggctggccggttacatccggcctttcttcagcccatcggataggagcccaatatctgatcgactgatccgtcttggattggacaaaagccctaaagcccaccacaggatcctcaacagcctaaataggcccatgaaaagcctctcacagctccgagctagacccccacctccccgcctagacctagggttgcttccttccttttaacctcgcgccgccatccgacgcccatctgctccaccctccacccagccgccgccgccgccgcctaaggagaagagggtccggccgtctccttgccccgatggcgtccgagaagaagcagtccaacccgatgcgggagatcaaggtgcagaagctggtcctcaacatatccgtaggggagagcggcgaccgcctcacccgcgccgccaaggtgctggagcagctcagcggccagacccccgtcttctccaaggcgaggtacacggtgcgctcgttcggcatccggcgtaacgagaagatcgcctgctacgtcacggtcaggggcgacaaggccatgcagctgcttgagagcggcctcaaggtcaaggagtacgagctgctcaggaggaacttcagcgacaccggctgcttcgggttcggcatccaggagcacatcgaccttggtatgatccatcaacaggcatctatgggatggacttctacgtcgtgcttgagcgtgctggctatcgcgtcgcgcgccgcaggaggtgcaagtcccgtgttgggattcagcatagggtgaccaaggaggactccatgaagtggttccaggtcaagtatgaaggtgtcatcctcaacaaggctcaggccagcacgatttaaacctcacctgtggggcaaaacagctctcgcttcatctccatgtgaacgcaagatcaccttccaaggtttttgtttgagttgtatcctctggcctgactttttagtctactagcagagctataatcactatatgaattattttttgtgcccttaccatactctgctgttgcttgagaatatgttattagtctgtcctagctcttctttggttacatgctttgtttaccgcatctgcgtttaagtttttgttgactagttactctttagactacagtgcaaaacagcgtcataatcccgctttgcatagcacacatctttgctcgggctgactccagcatgcggtcgcggacacggaactcacggcggcggaggctattgcccgatgcggaaaaagcagcagctcgcgaaaaacaggagaggatacacaggtgtagtgaagacacccttttttcgcaaccgcgacctgctggatggggctacagtgcttcgtgatctaaaaaacgcattcgcgatcgtatatgtcatctgctggagtcagcctcagtcagcttctattttccagaccgggagatggtaactagtcaacaaaaacttaaacgcagatgcggtaaacaaagccaaggggtattttacactttttaataaatcatattaattacacttttt

SEQ ID NO: 200134 - DNA, 1856 bp, Zea Mays
ccggctgactgaccggcccttgctttaccgccgcggcgaaagggcggcgcatgtcctgccggatatgccgtttccggcatggtataagtaggcgacgcccaccgttcctcctatcaccaccatcccccgatccgacccaaaacggcaggcatgcatacgtgcactaaagcaagtagtaacgatgtatctattccatccttgatcatgcatgtgtttgtggagtgtggaggtccattgcagggcaaccccccgttggcaggtgcgacggcgacgtacccctaccctgccaaaggggatttgcccggcgatgcgcctgcacacacagtggttctttctactctacctctccggctcaaggtaggagaagacgatgctccatccggctggccggttacatccggcctttcttcagcccatcggataggagcccaatatctgatcgactgatccgtcttggattggacaaaagccctaaagcccaccacaggatcctcaacagcctaaataggcccatgaaaagcctctcacagctccgagctagacccccacctccccgcctagacctagggttgcttccttccttttaacctcgcgccgccatccgacgcccatctgctccaccctccacccagccgccgccgccgccgcctaaggagaagagggtccggccgtctccttgccccgatggcgtccgagaagaagcagtccaacccgatgcgggagatcaaggtgcagaagctggtcctcaacatatccgtaggggagagcggcgaccgcctcacccgcgccgccaagcgaggtacacggtgcgctcgttcggcatccggcgtaacgagaagatcgcctgctacgtcacggtcaggggcgacaaggccatgcagctgcttgagagcggcctcaaggtcaaggagtacgagctgctcaggaggaacttcagcgacaccggctgcttcgggttcggcatccaggagcacatcgaccttggtatcaagtatgatccatcaacaggcatctatgggatggacttctacgtcgtgcttgagcgtgctggctatcgcgtcgcgcgccgcaggaggtgcaagtcccgtgttgggattcagcatagggtgaccaaggaggactccatgaagtggttccaggtcaagtatgaaggtgtcatcctcaacaaggctcaggccagcacgatttaaacctcacctgtggggcaaaacagctctcgcttcatctccatgtgaacgcaagatcaccttccaaggtttttgtttgagttgtatcctctggcctgactttttagtctactagcagagctataatcactatatgaattattttttgtgcccttaccatactctgctgttgcttgagaatatgttattagtctgtcctagctcttctttggttacatgctttgtttaccgcatctgcgtttaagtttttgttgactagttactctttagactacagtgcaaaacagcgtcataatcccgctttgcatagcacacatctttgctcgggctgactccagcatgcggtcgcggacacggaactcacggcggcggaggctattgcccgatgcggaaaaagcagcagctcgcgaaaaacaggagaggatacacaggtgtagtgaagacacccttttttcgcaaccgcgacctgctggatggggctacagtgcttcgtgatctaaaaaacgcattcgcgatcgtatatgtcatctgctggagtcagcctcagtcagcttctattttccagaccgggagatggtaactagtcaacaaaaacttaaacgcagatgcggtaaacaaagccaaggggtattttacactttttaataaatcatattaattacacttttt

SEQ ID NO: 200135 - DNA, 1223 bp, Zea Mays
ctgggacatgaaaggattttgttgggcctccaacccagtatattcgaaagcccagcccacttgccacgtcgcaatcacccagtcacccactccatcctgcccgccgccgtagctggtagctaagctacgtgaagaagatggttgggctcctccgtccactctccgccgccgccaccttactcctcgcccccgccacgccactcactggttcctcagtctccgctagttccgtcggcggcaggcggtggagaagcgtgagggcggacgccggcgggggctggctatccgggctgctgggcggcaagggcggcggcgcgtccacggcgatgatggtgacgccgggaaccgtgaaggccggcgaccccgtcctgcacgagcccgcgcaggaggtggcgccgggggacgtgctgtccgagaaggtgcagggcgtcatcgaccggatggtcgacgtcatgcgcagggccccaggcgtcggcctcgccgccccgcagatcggcgtcccgctcaggattattgttctcgaggatacgcaggagtacatcagctatgcacccaagaaggacatcgaagcacaagaccgccgcccctttgatcttctcgtcggtcattatcaatccaaagattaagagcacgagtaaaagaaccgcgctgttctttgagggatgtctcagtgttgatggatacagggcggtcgtggagcggcatctggacgttgaagtttcaggtctggaccggaatgggagcaccatgaaggtacgggcttcaggatggcaagcgcgcatcctccagcatgaatgtgatcatcttgaaggcacgctgtatgttgacaagatggtagcaaggacattcagggtcgtcgagaacttggatttgccccttcccactggatgccctcaactagggttcagtccacaagtacactagtgtgagcaattgtagccatggaggttgagagcctttggagcgatagaccacacgtggcagagaagcttgagcaaagacttgatgccgatagaacaaagcaacagtgaagagcaagtgaagttctgattgatgaaccaataaggacacatgatgacatgaagtggatcatatcattcatgatgttgattgcatgtttctgtaccatcaccattagagaaagagataaaatggaatgcacaaaacatgtataatttgtagaacatttcattttattattcaaaggttgtgtagagaagtaa

SEQ ID NO: 200136 - DNA, 4039 bp, Zea Mays
tttataatgacaaaaagttaaatttctccgtcgccgagggagtccaatcccaacacggcgacgacgacaaacaaacaaggaaatcgcctcctcctcctcctcctcctcttcctctttccctcgctctgccatctgcccccaaattcccctccccactcgctcgcgtcgcgatagcaagcaacgcgcaggtgctgaaactcgtgtactgttgatggatgatgactgttcccatggatagtgctagcgcagccccatcctccacgcgggaccttgccgagcgtctccttactaggaataatgaacttgaagaccagcttcgtaagtccgcacaatccaaagtcccatcagatcccaacatatggcttcagatgcgtgacaactttgagaagataattctcatagatcacgacctctctgaacagagagatgtagagtatctcctatggcagttgcattacaaaagaattgaggacttcaggaggaacattagtgcagctagctcacttgcatctcagagtgggaagagcaacactaacccagatcgagtcaagagaattaaatcagccttcaaaagcttcctttcagaagcaactggcttctatcatgacttgatgttaaagatcaaatcaaattggggccttccactcaattactttccagacagccttgacaatgcaaacaactctgtgcgagatgacatgaaaacagttcaattgaagaaagcggcttctagttactacaaggaggcagcttctatctatccttccagtggcaaccctcatcatcagcttgctatactagcttcttactccggcaacgaggtggtggctgtttataggtacttccgaagcttagctgcagacactccttttgccactgcacgggacaacttgattattctttttgaaaagaatcgccaaagctatggacagctgccagacaacagcaaagttcctagcactaagacattacccccacggccatctgggtggggccgaggacggggagaagtaaggtttcaaccaaaagatgttaatgcagaaacagctgaaagggaacgcgagtgcaataatggtgatacattgaagaccttctatataagattcgtcaggctcaatggaattcttttcacgaggaccagtttggaaacattcggggagctgttttcttcagttagcaatgatttgcagattcttctttcttctggtcttgaagaggaccttaatttcggttctgatgctgcagaaaatgcattggctgctgttagacttactgtcatccttatattcacagtgcacaatgtaaataaagagcctgataggcagtcttatgctgaaattgtgcaacgcagagtactgctccaaagtgcgtttacggctgcttttgactttgttggacgaattctcagaaggtgttcagagctccatgatattgcatcaagcttctatctgccagccattttggtctatattgaatggctggcgtcccatccagagttggctgttgattcagagatggaggaaaagcatgcaaatgccaggtctttcttctggagccaatgcatctcatttatgaataagttgatccttaccaaccttgcatctgtgaatgatgatgatgacgaggcttgcttttctaatatgagcatttatgaggagggtgaaactggcaacaggtttgccctttgggaagatcttgaattgagaggttttctgcccttgcttcctgcacataccattttggatttctcaagcaaacacacatttggaagcaccaaggagaagaaagcacgggttcagcgaatttttgctgcaggaaagtcactgcttaactttgttcagattgatcagttgagaatttattttgattcatcatcgaagaagtttgttatggccaagaaccctcctgtttctaaaactaacacccctcttcacgaatctcctgatgcacttaaaacaagtggcactgaaatggattatgaggctgctagaagatttgattcagtttcttctaatatgggcacactgcagtctaaagtgcagttttgtcctgatggtgacgatgatgaagaaattgttttcaagccaacagcttccgaaaagtttccgaaagctccttcagatctgttggttaatggatacactcatcctgtacctatgtctactgctggctggccaaccaatgctagtttagtgcctgttcagagcactggatcaatgactgcaactggttggccacccaatggtgggtcaaatgcttttccaagtactgcatctctatcagctgctggtaattacaacattaaccagtcgcttcccaggtcttccgttggttgggctgtcaatggtgagcaaagtgttattcctagcattgctccaagatttgaactcgtgcagcctgttgaagagcctgtttccagctggacaagcagtggtgcacagcatgttggtactcagcacaagcacacaggtttaactttcccagatgttgtgtctgaaccacttgtatctgcatcaatggttcaacgtttcagtagcactgattattcgaaatttctcagtgaacaagaaatgctcttagtgaatggactgaatactgtcaacttaactggaaatggctatttaaagcagagactgcagcctggattgagtggtttacagtctatggggtattcatctcagacacctattgaacctggtggtaccactgcaaactcgatgcataatcatctgaaaattactggagagaatgtgccctctacacttgattcagttgtaccttcaatagctccattaggtggcatgccaatgaaattcacagaagcgccactaactgcttcaaagaagaaccctgttagtcgtccatcaaagcctgttgggccacctccaggatttgatcatgtagccccaaagcgccaagatgattctattccagttgaaaaactgcagatcccacaggttgatgattacagctggctagatggttatcagcaatcgattgatcatgttcacaacttaagaactgtttattctggtgtcagtgacagcactgcatttgccactccattccccttccctgggaaacaacagttatctgggatgcatgcacaaggggctacaaatgaaaagacatggcaagatttccgtctttttgagccttcaaaacagaacatgctccaaaattaccaccaaagaaatcagcaaaatggtcaaatagctgaacaagagccagcaaattctgtctggtctagcagttaccatgtgtgattcagtaacttgtaccaggatgattgctggagttgctggggactattggattaagtggcacagcctgatctattgagcttggcccgtacctgcagcactctgttaaatttcttttgagcatggtggtctttgaagcatgacaatggctgctcttaggtttgggattgccaccatcttctgggacaaagagggagtggaggatgattgatctgtcggcagtctgatggggatgaattatacgaggtcttcaacgctgacacaaagggttaatgaaacaaactcgaatccagtgattataggcgctccgcacggaccatatgattcatctctcgttggacatgtagctacaagaatggtgtcagtgggcggttgctgccgcaactaaaagtccattcagtgtggatgtcagttgggctacgctatctaagaataaaaagtttgaggaacaacgagcatgttgccaagtagtttcttaagtataagttactgcgtctagttatattgttcctttcctttcggaaacaatgtgtcatgttgctgtcgcgctagttgcaagttgcaattaaacgtttggaacagtttgtcatgttatttgtgtggcttctatatggctatatgtttgctggaactgtatggaccaaccctcggtgctacctacaaaagtctatgatttgactgaatatcttgtatgtttctattatgctcattgattttggaacaatagtcaatttagcctaccccaacttgcaaattggcatggtagattgaatcac

SEQ ID NO: 200137 - DNA, 881 bp, Zea Mays
tctccgtcgccgagggagtccaatcccaacacggcgacgacgacaaacaaacaaggaaatcgcctcctcctcctcctcctcctcttcctctttccctcgctctgccatctgcccccaaattcccctccccactcgctcgcgtcgcgatagcaagcaacgcgcaggtgctgaaactcgtgtactgttgatggatgatgactgttcccatggatagtgctagcgcagccccatcctccacgcgggaccttgccgagcgtctccttactaggggattgccaccatcttctgggacaaagagggagtggaggatgattgatctgtcggcagtctgatggggatgaattatacgaggtcttcaacgctgacacaaagggttaatgaaacaaactcgaatccagtgattataggcgctccgcacggaccatatgattcatctctcgttggacatgtagctacaagaatggtgtcagtgggcggttgctgccgcaactaaaagtccattcagtgtggatgtcagttgggctacgctatctaagaataaaaagtttgaggaacaacgagcatgttgccaagtagtttcttaagtataagttactgcgtctagttatattgttcctttcctttcggaaacaatgtgtcatgttgctgtcgcgctagttgcaagttgcaattaaacgtttggaacagtttgtcatgttatttgtgtggcttctatatggctatatgtttgctggaactgtatggaccaaccctcggtgctacctacaaaagtctatgatttgactgaatatcttgtatgtttctattatgctcattgattttggaacaatagtcaatttagcctaccccaacttgcaaattggcatggtagattgaatcac

SEQ ID NO: 200138 - DNA, 3974 bp, Zea Mays
gggattagggtttcgtttgctcgggtgctgaaactcgtgtactgttgatggatgatgactgttcccatggatagtgctagcgcagccccatcctccacgcgggaccttgccgagcgtctccttactaggaataatgaacttgaagaccagcttcgtaagtccgcacaatccaaagtcccatcagatcccaacatatggcttcagatgcgtgacaactttgagaagataattctcatagatcacgacctctctgaacagagagatgtagagtatctcctatggcagttgcattacaaaagaattgaggacttcaggaggaacattagtgcagctagctcacttgcatctcagagtgggaagagcaacactaacccagatcgagtcaagagaattaaatcagccttcaaaagcttcctttcagaagcaactggcttctatcatgacttgatgttaaagatcaaatcaaattggggccttccactcaattactttccagacagccttgacaatgcaaacaactctgtgcgagatgacatgaaaacagttcaattgaagaaaggtttgatttcatgccatcggtgtctgatatatttgggagatcttgctcgttacaagagtttgaatggtgatggtgattctgctagtcgtgaatacacagcggcttctagttactacaaggaggcagcttctatctatccttccagtggcaaccctcatcatcagcttgctatactagcttcttactccggcaacgaggtggtggctgtttataggtacttccgaagcttagctgcagacactccttttgccactgcacgggacaacttgattattctttttgaaaagaatcgccaaagctatggacagctgccagacaacagcaaagttcctagcactaagacattacccccacggccatctgggtggggccgaggacggggagaagtaaggtttcaaccaaaagatgttaatgcagaaacagctgaaagggaacgcgagtgcaataatggtgatacattgaagaccttctatataagattcgtcaggctcaatggaattcttttcacgaggaccagtttggaaacattcggggagctgttttcttcagttagcaatgatttgcagattcttctttcttctggtcttgaagaggaccttaatttcggttctgatgctgcagaaaatgcattggctgctgttagacttactgtcatccttatattcacagtgcacaatgtaaataaagagcctgataggcagtcttatgctgaaattgtgcaacgcagagtactgctccaaagtgcgtttacggctgcttttgactttgttggacgaattctcagaaggtgttcagagctccatgatattgcatcaagcttctatctgccagccattttggtctatattgaatggctggcgtcccatccagagttggctgttgattcagagatggaggaaaagcatgcaaatgccaggtctttcttctggagccaatgcatctcatttatgaataagttgatccttaccaaccttgcatctgtgaatgatgatgatgacgaggcttgcttttctaatatgagcatttatgaggagggtgaaactggcaacaggtttgccctttgggaagatcttgaattgagaggttttctgcccttgcttcctgcacataccattttggatttctcaagcaaacacacatttggaagcaccaaggagaagaaagcacgggttcagcgaatttttgctgcaggaaagtcactgcttaactttgttcagattgatcagttgagaatttattttgattcatcatcgaagaagtttgttatggccaagaaccctcctgtttctaaaactaacacccctcttcacgaatctcctgatgcacttaaaacaagtggcactgaaatggattatgaggctgctagaagatttgattcagtttcttctaatatgggcacactgcagtctaaagtgcagttttgtcctgatggtgacgatgatgaagaaattgttttcaagccaacagcttccgaaaagtttccgaaagctccttcagatctgttggttaatggatacactcatcctgtacctatgtctactgctggctggccaaccaatgctagtttagtgcctgttcagagcactggatcaatgactgcaactggttggccacccaatggtgggtcaaatgcttttccaagtactgcatctctatcagctgctggtaattacaacattaaccagtcgcttcccaggtcttccgttggttgggctgtcaatggtgagcaaagtgttattcctagcattgctccaagatttgaactcgtgcagcctgttgaagagcctgtttccagctggacaagcagtggtgcacagcatgttggtactcagcacaagcacacaggtttaactttcccagatgttgtgtctgaaccacttgtatctgcatcaatggttcaacgtttcagtagcactgattattcgaaatttctcagtgaacaagaaatgctcttagtgaatggactgaatactgtcaacttaactggaaatggctatttaaagcagagactgcagcctggattgagtggtttacagtctatggggtattcatctcagacacctattgaacctggtggtaccactgcaaactcgatgcataatcatctgaaaattactggagagaatgtgccctctacacttgattcagttgtaccttcaatagctccattaggtggcatgccaatgaaattcacagaagcgccactaactgcttcaaagaagaaccctgttagtcgtccatcaaagcctgttgggccacctccaggatttgatcatgtagccccaaagcgccaagatgattctattccagttgaaaaactgcagatcccacaggttgatgattacagctggctagatggttatcagcaatcgattgatcatgttcacaacttaagaactgtttattctggtgtcagtgacagcactgcatttgccactccattccccttccctgggaaacaacagttatctgggatgcatgcacaaggggctacaaatgaaaagacatggcaagatttccgtctttttgagccttcaaaacagaacatgctccaaaattaccaccaaagaaatcagcaaaatggtcaaatagctgaacaagagccagcaaattctgtctggtctagcagttaccatgtgtgattcagtaacttgtaccaggatgattgctggagttgctggggactattggattaagtggcacagcctgatctattgagcttggcccgtacctgcagcactctgttaaatttcttttgagcatggtggtctttgaagcatgacaatggctgctcttaggtttgggattgccaccatcttctgggacaaagagggagtggaggatgattgatctgtcggcagtctgatggggatgaattatacgaggtcttcaacgctgacacaaagggttaatgaaacaaactcgaatccagtgattataggcgctccgcacggaccatatgattcatctctcgttggacatgtagctacaagaatggtgtcagtgggcggttgctgccgcaactaaaagtccattcagtgtggatgtcagttgggctacgctatctaagaataaaaagtttgaggaacaacgagcatgttgccaagtagtttcttaagtataagttactgcgtctagttatattgttcctttcctttcggaaacaatgtgtcatgttgctgtcgcgctagttgcaagttgcaattaaacgtttggaacagtttgtcatgttatttgtgtggcttctatatggctatatgtttgctggaactgtatggaccaaccctcggtgctacctacaaaagtctatgatttgactgaatatcttgtatgtttctattatgctcattgattttggaacaatagtcaatttagcctaccccaacttgcaaattggcatggtagattgaatcac

SEQ ID NO: 200139 - DNA, 1625 bp, Zea Mays
aaccacataccaaccattgaacatcttctgtggccagccggcatccgtgcagccgccagcaccagcaggccatgacatggcaccatgtttgagctgacagctgactagctgagcgtgccgccttgccgtgtcggggagctgagctgagcctagagacgccaaacggaatggcgaaagcgaccggccgcgcggcgggcagcaggagctgcatcgagaggctgcctgcgccccgcgcccaatcctcttcctaaatcctaatcccctccgcctcatccccttcaaccccacgtctctctcgccgaaggctccggcctcgtcgggatccggtgctggattgacgcaatggcgccgctccacgccgcgctgccgccgccctcctccgccgccgctcaccaccacgcggcagccccgcctgtcttcctcgcccgctcgccgtaccacccccgcagggcggcggcctcctgcccgctcgccgtcgctgccgctccctcgtcgagaaaagcgttcttgtcgtgcccgctgctgggccactggaccacggccgcgcctcttccgcctcaacgagctccagctgtcggacgccgagaaggcccggatataccacttctacatccccgtcttcctctggtgcgaggacgaggtcatggtgcacagagccaggtacaacgacggcgatgacatcccgccattggtgatcggggtcagcgctccccaaggaagtgggaagacgactcttgtgttcgcacttgattatctttttcgggttgctggtaggaattctgccacattgtctatagacgacttctatctgacagcaaaagaacagaatgaattgagggacagaaatcctgcaaatgctcttttagagttccgcgggaatgctggaagccacgatctccaactctcagtggaaacactcgagtcactgatcaagctaacgaaggaaggtatgaagatgaaggttccacggtatgacaagtctgcgtttgggggaaggggtgaccgggctgatccttctgtatggccagaggttgaagggcccttagaggttgttctgttcgaaggatggatgcttggatttaaacctcttccaaatgaagttgtgaaagaagtggatccacagctggaggtggttaacaagaaccttgaagcatactctgatgcttgggacaggttcatccagtcatggattgttattaaaataagagaacccggtagcgtttaccagtggagactgcagaggtcgctatgagagcagatggaaagcctggaatgtctgatgaggaggttatggattttgtatcacgctacctaccggcataccatgcatatctgccaacactgtacaaagaggggccgaatggttcgaatccagatcatctgctggtcatcgacatagacgaaaataggaaccctatctgtggtggatcatgggacatctcatgtttgtgaaactacttttatgatgggccgtcaaacaccactggcctcttgttgccctacactctggtagtgtaaatctgtgaattccatgtaaatatgaatttcgcttcttaaggcactttttaatctggcatggtctttagcttgaacatcggccataagtttcttatgatatatgtcgg

SEQ ID NO: 200140 - DNA, 1888 bp, Zea Mays
cgttcacagcccccggctcgtgtcgtctgactgactgtgagtctgtgacgtcgctgccagtaaaccacataccaaccattgaacatcttctgtggccagccggcatccgtgcagccgccagcaccagcaggccatgacatggcaccatgtttgagctgacagctgactagctgagcgtgccgccttgccgtgtcggggagctgagctgagcctagagacgccaaacggaatggcgaaagcgaccggccgcgcggcgggcagcaggagctgcatcgagaggctgcctgcgccccgcgcccaatcctcttcctaaatcctaatcccctccgcctcatccccttcaaccccacgtctctctcgccgaaggctccggcctcgtcgggatccggtgctggattgacgcaatggcgccgctccacgccgcgctgccgccgccctcctccgccgccgctcaccaccacgcggcagccccgcctgtcttcctcgcccgctcgccgtaccacccccgcagggcggcggcctcctgcccgctcgccgtcgctgccgctccctcgtcgagaaaagcgttcttgtcgtgcccgctgctgggccactggaccacggccgcgcctcttccgcctcaacgagctccagctgtcggacgccgagaaggcccggatataccacttctacatccccgtcttcctctggtgcgaggacgaggtcatggtgcacagagccaggtacaacgacggcgatgacatcccgccattggtgatcggggtcagcgctccccaaggaagtgggaagacgactcttgtgttcgcacttgattatctttttcgggttgctggtaggaattctgccacattgtctatagacgacttctatctgacagcaaaagaacagaatgaattgagggacagaaatcctgcaaatgctcttttagagttccgcgggaatgctggaagccacgatctccaactctcagtggaaacactcgagtcactgatcaagctaacgaaggaaggtatgaagatgaaggttccacggtatgacaaggtaaaaggttgcagttaacgttcctctagctgatgcttgtagctgatcagctgcatgattgatacatgtcatgtccatgtagtctgcgtttgggggaaggggtgaccgggctgatccttctgtatggccagaggttgaagggcccttagaggttgttctgttcgaaggatggatgcttggatttaaacctcttccaaatgaagttgtgaaagaagtggatccacagctggaggtggttaacaagaaccttgaagcatactctgatgcttgggacaggttcatccagtcatggattgttattaaaataagagaacccggtagcgtttaccagtggagactgcagtgtttggattgtcaggcagaggtcgctatgagagcagatggaaagcctggaatgtctgatgaggaggtgtgttctctgacaaagctactcactattttagaacaatccctctgttatcctagtaaccttggagccttactgatggttctgtcatgtggtttcttcggttatggattttgtatcacgctacctaccggcataccatgcatatctgccaacactgtacaaagaggggccgaatggttcgaatccagatcatctgctggtcatcgacatagacgaaaataggaaccctatctgtggtggatcatgggacatctcatgtttgtgaaactacttttatgatgggccgtcaaacaccactggcctcttgttgccctacactctggtagtgtaaatctgtgaattccatgtaaatatgaatttcgcttcttaaggcactttttaatctggcatggtctttagcttgaacatcggccataagtttcttatgatatatgtcgg

SEQ ID NO: 200141 - DNA, 2156 bp, Zea Mays
ggctacagtgcgcccccttccccttcaccgacgtcctcctcctcctcctcctctcccttccctattctttctctcacacgctaaatggatgggcacgctacgccgtattcctcccccgcagccgcttccttcgcccacacgcccccgcgctcggaatactccgaggagggtgctcgaggcgaaccaagggcgatggttcatctcgctttcgtctcgctgcgtgcgctctctgtcactccccctctctctcctcatcagatccggccacttcctgctcgcctcgccaccggtcccgcgccccggaaccctagagctctccccgcggcagggccgccggagtccccgggcgcgtggagaaaatggaggcggcgctagaggcggcgtgtcaaggacaccaaggagcgtctggccggggtcaagcggctgcacgaggcgcttgacgccgcggcgcggcgcgcggcggccgaggtcaccacgctggtggacacctgcatggatctgacgcgggatgccaacttccgcatcgcccagggcggcctccaggcgctctccgtcgccgccgtcgtcgccgacgaccacttcaagatccacctcaacgccctcgtccccgccgccgtcgagcgcctcgacgacggcaagcaacccgtccgcgacgccgcgcgacagctcctcatcacgctcatggaggtttcttcaccaacaatcatagttgaaagagctggtagttatgcatggactcataagatttggagggtgagggacgagtttgtacgtacggtggcatctgcagttgggctatttgcttctacggagatttccttgcaacgagttttgctttcacctgtcctgcaactaatgaatgattcgaaccaaagtgttcgagatgctgctatctcttgtattgaggttagttgattccatattcgatactgtatagacctgtttcagccgacatttttcttttttcccttacacccatgatgactggtatgatctctatttctattgatcttgttcaatttcccattagttccatcccacatttacaagctggagagactgaatcattttgtatgacaacattcattgtagctccaagcccctttgcttctagttgaattgttttagtcccttgtgctcagattcatcttttctttcatctaaactattcagtgttcacagttattggctgggacacacacctgctatctaggcagcataaagtttttctagtaagccttcatttgtttttcactacaggagatgtacaagcacatgggatcacaatttcatgaagagttgcagcgccataatctgccttcatatatgctaaaagaaataaattcaaggttggataaaatagaaccaaaggttcgatcatctgatacagcaatgcagtataaggctgtagagtctagaggcaatgctgggatgtagcctgttggtagtgggacaccttcaggttctgttattgatctggaaaatgaggaatcaggttcaaaaggtaaaaggccattaggatgggactccatgaaagcatcaaggaagaaggcaatgtccagttcctcccagtctactgactaccttttaagaattcatgacattcaaatagcaagactgaagcaaagtgaagaaaaatcaggtaagaaacaacagaatattgagttcttgaaggaagttgaactgaaaaagttggaggtccaaaccaaggaactagaaatgcagcaaaccaaaatgatgattgaagaaaggatccgaaaggacgcagagctgaaggaactcctagctatggaatgttttaccagaggatgtgagacctgtatacatcgcgaggagaaaaggtttaatcgagtttttcatcaacaatcctgtctgaagagtactattgtatttcataatttgttgcgaacctagtgtcggcgtaacgtggtccggtgtgttcggacatatgtcatttcgagatttttgaacatttgcttaattgtttgagaacagtagcttggtttttgaactcgtgtcgtgtactagaagattgcgaaatttttattattaaaaaacatataattccaactatttatgactaacgtatttatattaattacgaagtttgctaattaattgtatactaagtgacggtcgcgcactgttcatagagc

SEQ ID NO: 200142 - DNA, 1621 bp, Zea Mays
cgacgtcctcctcctcctcctcctctcccttccctattctttctctcacacgctaaatggatgggcacgctacgccgtattcctcccccgcagccgcttccttcgcccacacgcccccgcgctcggaatactccgaggagggtgctcgaggcgaaccaagggcgatggttcatctcgctttcgtctcgctgcgtgcgctctctgtcactccccctctctctcctcatcagatccggccacttcctgctcgcctcgccaccggtcccgcgccccggaaccctagagctctccccgcggcagggccgccggagtccccgggcgcgtggagaaaatggaggcggcgctagaggcggcgtgtcaaggacaccaaggagcgtctggccggggtcaagcggctgcacgaggcgcttgacgccgcggcgcggcgcgcggcggccgaggtcaccacgctggtggacacctgcatggatctgacgcgggatgccaacttccgcatcgcccagggcggcctccaggcgctctccgtcgccgccgtcgtcgccgacgaccacttcaagatccacctcaacgccctcgtccccgccgccgtcgagcgcctcgacgacggcaagcaacccgtccgcgacgccgcgcgacagctcctcatcacgctcatggaggtttcttcaccaacaatcatagttgaaagagctggtagttatgcatggactcataagatttggagggtgagggacgagtttgtacgtacggtggcatctgcagttgggctatttgcttctacggagatttccttgcaacgagttttgctttcacctgtcctgcaactaatgaatgattcgaaccaaagtgttcgagatgctgctatctcttgtattgaggagatgtacaagcacatgggatcacaatttcatgaagagttgcagcgccataatctgccttcatatatgctaaaagaaataaattcaaggttggataaaatagaaccaaaggttcgatcatctgatacagcaatgcagtataaggctgtagagtctagaggcaatgctgggatgtagcctgttggtagtgggacaccttcaggttctgttattgatctggaaaatgaggaatcaggttcaaaaggtaaaaggccattaggatgggactccatgaaagcatcaaggaagaaggcaatgtccagttcctcccagtctactgactaccttttaagaattcatgacattcaaatagcaagactgaagcaaagtgaagaaaaatcaggtaagaaacaacagaatattgagttcttgaaggaagttgaactgaaaaagttggaggtccaaaccaaggaactagaaatgcagcaaaccaaaatgatgattgaagaaaggatccgaaaggacgcagagctgaaggaactcctagctatggaatgttttaccagaggatgtgagacctgtatacatcgcgaggagaaaaggtttaatcgagtttttcatcaacaatcctgtctgaagagtactattgtatttcataatttgttgcgaacctagtgtcggcgtaacgtggtccggtgtgttcggacatatgtcatttcgagatttttgaacatttgcttaattgtttgagaacagtaaaagaa

SEQ ID NO: 200143 - DNA, 1178 bp, Zea Mays
acatattttgtagcctactgttgaggaatggcagctgagtcttcagtgcgagcgaattggaaagtgtcaaattgccacagagcgtatcggccaaaaagcggagagaccctggcgatgtatccaagaagagcacccctgattctaacggcgacaacggcttggttgtgccattgtctctatcgggtgctgaaaataagcccaaggatgatgttgctgggctgcgcgagcaggtcgattacctgcaaaagaaactgctcgagaaggaggaggcgctgaggtccgcggagagcctcgtgactgagatgaacgcggcatatgcaaccatcgatgaactccgacgcctggtgtctgacaaagaagctttgatcagatctaccaattctcagttgcatgatgcaaagattatgcttgcagacaagcaagcatctgtagagaaactggaatgggaggtaaagatgtcaaataaaaaggtcgaagatcttcaaggagatgtgtcaaatatgggattcgagataagctcgttgatggcatttttcgataaaatttcagagaatctttcagagtgaaattgacaagatcgaggtcgacaaaatagagcaggagaggattacctatggtgaagctctcgcggcagcgagagagaaccctgacgaggagcacttgaatatagctgccgaggcaaggtcaaggctgcaggtccttgtactatagtggtggcccccttctaattctagtgtatgtatgataatgttgaactgctgatgtaattttaccttgttggcttgagttgaggcgcttgtgaaatcgttccaggggtaatggaacgagcactgtatcttttttttttcctgaggtctgcattttttatcatgaagcttgagctatagttagattttttgtgacggttatcatctcaagatttaaacctatggttggaactgcttatgtaaattgttcttgagcctaaggtataggcaatagctttttaacagtgtataatggggtctgtttggtatagttttgaagctacgtatgggcatggctaaagtaagctgaaattagaagtcaatctctaggtttcttttgtagtttttttccaaccacgtttctcaccacgactttcatttagaaacgtagaaattggatcagactagcttagttttccatttatactaaag

SEQ ID NO: 200144 - DNA, 1184 bp, Zea Mays
aaatttttgagaagtccatgaattatgaccacttcactaaatgtgtcagagctcttatggccttctatagatgcaggcatgctgcatgcagctattcttgaaaactgtttgctgatgcattggtaaagaaagcatacgataactggatgtatgtcattgaatatgatggcaaaggtcttttgaaccctaaaccaaagaaaaagtctgcatccactggtcaagtggagacacatgctcctgcgggtggcccgacttcatatcaacaatacctctcttcgatgagcatgccagggccatcaccatcaggtggaactgattctgcagggtatggcgtcgaccaaagcgcaacacatccatctcagctgcagagttcatccgccaatgtccaggcaccatatgatgacacattttcgttcttaccacctaacatgctgacagggtctgcaaatgatgccatgggtctggaactgggccagttgcagcaagtaacttctcaaggccagacaattcagccagcaaacgtgggatatggtgattggcccaggaaccgtgacagtcagtatcctgatgacttcactgaggacattcgcgttaagagccaccagttgctcgagggcgaggacatgcagcagctgctgagggtcttcagcatgggtggagcttctggcagtttgccagacgacaccttcaatttccagtcctacatgccctctccgttgcccaacctcgggttcgaaactgagcgtagccattcgtctggcaaagctgttgttggctggctcaagatcaaggcggcgatgaggtggggaatcttcgtcaggaagaaagctgccgagagaagggcgcagctagtcgaactggaggattgacaccgtggctttacaatggtcaaggttgccttgtagattactagtagttatctgcccccataccttcctgttaccgtttaaacaagtttctgaaactcttttctgaaatgtacaacgagtagttctactattttcttgtacagaattcaccttgttttgattgtgttagttgtggaacattgctctgctaagtttgacacatgactggacccgtatgcttgtgtatcttattttccatagctcttcagtgcagaatgtaccgcaacgatgcgaattaatccaaagattatgtgtacatgttgatgccttgccttt

SEQ ID NO: 200145 - DNA, 2371 bp, Zea Mays
cagcagtgtaccgtgtgacgctgtggatatctgacccactctcgtcgcacgcaacgcaagtagcaaagcaggacccatcctctcccatctctcggtctccccatcccaacccgccgccgccgccgccgcttctcccgtctccagcgcccacagcgccattgtatccgcggggcgagctgagtcaccaagctggtctagggcccatccatttggaaccctcgcgagaagcaaagcggacggagcgccagcgttcttagatcgattgctcgccaggctgttggcgaggagtcgtcaaccctcacggcagccatgtctgtggagctcatcctgtggcttttctccttcgtctccgtcatggtcctcatcggcctcaccgcataccagcttatctgtctgtcagatttggagtatgattatatcaacccatatgattcatcgtctcgcatcaacgctgtggtgctgatagaatactcactccaaggggccctgtgtgcttctttcctcttgacattgcattggttcccgtttctagtcatgacaccagtaacatactaccatgtcaaactgtatgtattacttgctttgggttgatgttaattctggcagaatactcatgatattcagcattggatatcatgctgttcatacttttggctgtattcacatctttaaataatatttaaaatgatctacaactctcaatggctcaatgaaacagctaagtaagaatatatatattttagaatttagagattgtgatgttatgcttctagagtgataatttgtagttatctgcttgttctgggccatggtgtattgtctggtcctggagcaattccttctctgaaaatgggagaatattgatcatggtattaacaaatgggagaaggtagtgcacctgttctagtattatacctgtccagattttgtaggcctcactaccaaaatttgttagctatttaacttttattattgctggaatatgacaactctgaatcatgctatgtgcactttatttgctgagatatatatattttttatttttactagtatgtgctagagaagaaccataagtaatatttttgttgtaattatttagtattcagcagttcagcatgaactgttgattccacatatagttggcttaacaatgattaatgaaagtggttcttagtttgttctggtagggtacagctataatttagctggactattctctgggtgacaactgattttagtccatcagatatgagcaagcacccaattttttattgttacatgtggaaagaaaatctcccttgaccctgttcttgaaattttacagtcatgacaatagtttctaagcactctgcttgagttttcagttgatttagagttcttttttccactgttgaggattaagtataatgccccctggcattggaactagttttgatctcatgaactagtgaacttattttggtatttggctcggaaacatcttgtagatgtcactgaaatttttagacaattaagtgacgagaagaagtacaggatgatcaagcttgccttctacttctgcctatttattataactatttacaggcttgtaatgacagctgtgatgttgtttattgatgaggacataaatttggcagaaactaggagtatctagacttcgccaccaacttgtcatggggatggagcagagttgtagcttgaaccagggagaccacaactcaatgccttgacttagttgtgagaaacaagatcagtttgtgccctgtagctggaggagctaacctggtactccttttaccctaaatcgtaagttgttttagttttttctagatgcatagcttttacgatgtatcctccagatgcatagtaaaagttatatatttagaaaaaacagaacaacttataatttggaatggagtattcatttcatccatcagattgtgatgtacaatgaattcccatagtttggtccatcggtaccatgtttgtaaattgggcagtcaatgatgtgcatcactgcaggatgaacgcacgtttggtaattgttgtgcaattctttgtacttgtggacaagtgctgtattctacacattgtttgcatacagacgatgtgtggttggtgtcataatttaccactaaacctttggtaaactgagcctgtcataactgcgagaaaagattggtaaaaaaactaagttgggatagaatgctaataaagtccggcaccctgtggttatggcaacacctgcaaaaaaaggtgctatagaatgactaacatgtggttactgaagattacgaacctagatattgagttgaactaaaacacgccaaataaaaattttgaactaaaagacgacaaataagaaaacacg

SEQ ID NO: 200146 - DNA, 5889 bp, Zea Mays
cctccctccggccaacgttactactgtagcagcagtagataaatactgctgcggctggctgctgtacccctcctagtcggctagtcctctactctccattcatccccaccacctccacttgtcgaaattgaaactcaaatcaaatcgaaccacctccacctcggcaacgagcgaattccggtgcgaattggagccctcctccccccgcatctagggtttcgcccatggaccccgccgccggcgggggccggggccgggaccgggcgggcttcgagcgggcgtgccggctgcccaacaccgtccactccgaggtcctgccgtcgctgccgctccccaccctcccgcgcgagctcggcttcgacgcgctccgcgacgacgagcccctcgccgcgcccgaccgccccgacacgatcatgcaggccgccaacatcgcccgcgtcctcgccgacaccgacgtctcccacctgggcttcaccgctgcggacaacgtcgacgtggaccccatccgctgctcctggctctggagggaggtgctcaagcacaaccccgacgctttcaaggtcaaggcgccaagtccgtcttcgcaaggtccatttggaggcccaggatatcaaaatcaagaacatgagaagcactttgagcattttacacctaatacgagcaaagcacgaaatgaatctgcatttcctcaggatgaaattgactcacatagagagcatttttataatgaactgacctcagattcaattgcttcaaagaagccaaaaataaggaagagagaaaataacaattctgtttcaagttctgctcccagcattcctaatactcaagatgttatcactaccttctgtgaggtggtggaggatttctgtggaaaaaccgaaattcctgatgatggagatggcggtgactggttgtcaatcccacttggtgatgttaaggttctcgtgaatgaaattacatctgttcgatccaaaaggatattgcatgaggttcctatggatacagttacaaggttattggatgtgattgaccgtcagattcgatattctcaaggtttgtcgatagatgtgaaagaaaattctgatgtcgttgatgctgaacctctggttttctctgctttggaggccagtcatgctgcgttggcaattatgacccaccatgatatgccaaagcaactgtaccgagaagaacttattgagcggattattgatttctcaaggcatcagatcacagattgtatggcagcaagtaacccaaccttccgagctctctacaaaccagctgaaaatgttgcaaatgatggagatgatgatgaagatgatttggaaaatggacaagttagcaagaggagacgtactgctactaatttgagcatgagaaaatcttcaaacaaactttctgcttctgtttattctgctgtgcagaaactatgcttgatattgggctttcttaaggaactgctcacaacagtgcgcttgtcagatggttgtattctgcagttagcgaaaacatgctttactacattcttggtggataatatgcagctattacaattaaaagcaatcggggttatttgcacggtgttttcgtcatacacacagcacaggagttacttggttgatgaaatacttcaccttcttcgcaagttgcagttttccaaaaatgccgtcagaacctaccatctagcagatgaagaccaaaagcaaatccagatgataacagcactgttagttcacctggttcagtttagtgcaattgttcccaatagcttaaaaggaacagttgattggaccactattgttgatgcctccggagatgctgattattatccaattaaatgccatgaagcggcaacagaggcttgttgccgtttttggactgatgtccttcaacgttttactgctgctaaatctcaagatatgtcggaaaccaaaggaataatagataatcttgttcaggatttcctaatgatactaaacttgccggagtatccagctgctgcttctatccttgaggttctctgtgtgttgctccttcagaatgctggattgaaatctaaggacactaatgttcggtgctttgctattgatcttcttggtggtattgcatcaagattgaagcatgattcggtcatctgtagtgaagagaagctttggatattgcaagatctcactgatgcaggtagcgatggctcaaaaatcttgaaaaacaagtgctgtgtttgtcttggtggaagagattgtatgggggctgctagccaggataacttagagcgtgatagtgtttgccccttgtgtttttgcaaacaacagctcaatgtgctacagacgtactgtcagtcacaaattaaagaaaatggcaaaaaaactgctgcgtctactagtaagaaatctgctaaaccagctgaggtgccagcagtggatattattcaacaaatactactgagttatctccaagaatctggtccacaagatgatgggaacctgtttactcgatggttctatctgtgcatctggaacaaagaaaaccaacattctcaggaggagatcatctactatctcgctagattaaaatcaaaagagattctgcgagattctggcaatggtctggcaatttccagagattcagcaaagaaaatttgcttggcacttggtcagaagaactcattttgcaggggttttgataaaattcttgctcttcttttggctagcttgagagaaaattctcctgtaataagagcaaaagccttgcgtgcggtcagcagtatagttgaagctgaccctgaggtcttgggtgacaaacgtgtccaatctgctgtcgaagggaggttttgtgattcggctatttctgttcgtgaagctgcccttgaacttgttgggaggcatattgcttcacatcctgatgtgggcctgaagtatatagaaaaagttgctgagcgaataaaggacactggagtcagcgttcgcaagcgtgcaatcaaaattataagggatctatgtgcttctaatccaaacacagacacaacacatgcctttgtggagataatttctcgtgttaatgatgaggaatccagtgtacaggatcttgtatgtaaaacattttatgaactatggtttgaagaaccaactgggagccataagcacttggttgctgatggaagttcagttccaatggagatagctaaaaagactgagcaaattgttgacatgttgaggaagatgaccaatcaccaacctctgattaccatcataaaacgtaacttgactcttgatttcctccctcagtcaaccaaggctgcagggattaactcatacatggtggcatcaattcagaagcgttgcgaattaatatgcaaacgcttattagaaagaatattgcaggttgaggagggagctgctaaggagatggaaatccacatgcttccttatattgttgctttgcaagcattttgtattgttgatcccacgctctgcattccagtaactgatccttctaagtttgttgtgacactacaaccataccttaatattcaggttgacagtaaatcagctgcccagttgcttgaaagtattatttttgtgattgatgctgttcttccactcataaggaagccaacacaaaatgttgttgaagaacttgagaaagatctgaaacatatgatagttcgccattcgtatttgacagttgtacatgcctgtatcaagtgcctttgtgctctgagcgagtcagcaggtagaggtccaggattagtggaaaaccttgtcaatattttctacaagcatctgtctggagctaattcagatagtcagttattgggtcgatcactgttttgtcttggactcctccttcggtatggttatcaattgatgcaaacatctgaaaatcagcttgattttcccaagattatcaacttgctccagagaaaatatcttctcagggatgattttagcttgaaggttcgagctttgcagactttgggatacatacttattgcgaagcctgaatttatgctacaaaaggatatgttgaaactcatagagacagcactatcttctgagattcaaggacttcaaaacctctatgagtatctcagagatgctgaaagccaacttactgccgagagcactgtgaaacctcctgtccggtgtgaaataaatggcagaagtaaagtgcctgttgctgctggtgctggagacaccaacatatgtggtggtattattcaattgtattggagttctattcttgaaaggtgcttggatacaaatgatcaagttcgccagagtgcacttaagattgttgaagttgtactccgccagggtttagttcaccctattacctgtgttcctcaccttatagcacttgaaatggacccactggaggggaactcaaagttggctcatcatctgctgatgaatatgaatgaaaagtaccctttattttttgaaagccgtttgggtgatggactacaaatgtcatttaaattctttgaatccatagtcagcaaccataagatggcagcaaacataaaatcaaatccaattgcatttgtcaaacctggcatatctagaatataccgtcttatccgttcaaatcgaaattccagaaacaaatttgtccactcgatagttcggaaattcgagtctgatagccggagtcgcagcacagttagctttcttgtatactgtgccgaagttcttgcctccctgcctttcacatgctccgatgaaccactttacttgatctatgatataaatcgaattattcaccttaaagctggaggagttgagagcaatttgaaaaggtggacttctatgtctcagtctcaaaatacagtggatatgccaacgttgccaggagagaggcatgttgtcatgcaagagcctggcggatattatgataacgtgggctatgcccatgaaagggtgaatgccaatccttgcagtacttcagacgtggacatggccaaagtgcaggttgacgtggatatggccaaagtgcagggagattgccttgatgcaatagcccttcagctactgctgaaattgaagagacatttgaaagttgtctatagtttagatgatgcccgctgtcagtcattttctctaaaggagcctccgaaatctggagaaacattctccaggcagaatattccttttaatgttagcagcactaacatcagtctgccgagctgcctgcaggacgtagcttctgtttaccaggatttcaagacagtgctccacgaagattccatggactttgctgtgttcatcccttcagtccagattaggaagcgcccaaccccgagaaatacgacaaacccaaccccaagaagtacgacgagggtcaggagaacggctgcctcgagtgttacaaaagcccgtggtggcgcacgtggcgatgactccgacgactccgatgatgacgactggaccgggggcccaagagtgcttgacttcagtgggggtggccgtgtgacaaggcagagggtccaagtatgatgactggtcttggtgcttttgtacattctagggaaacctatagcgggtagcagctgacacgaggagagttagggttgagttttaggtttaaagtcgtttagggtacatagaagcagaaaaggaaaggaagatagcctttttacttagatgccattgatttggagcactccttttcttgctctgcccctgtcctgtttgtaattccggtcgggctttggcaaaactgacaaacagggttgtgctccggcttctgatctgattcaatgggaatgaaattattccttttgctttgcctgtataataacagttaagcctatgtttcgtgtaattgtctgccttgctaatgttatatatctgtacgtgtgctgagccttttttgttgaagttc

SEQ ID NO: 200147 - DNA, 5867 bp, Zea Mays
gtcgctttccttttcttccagttcccactcccaccctccctccggccaacgttactactgtagcagcagtagataaatactgctgcggctggctgctgtacccctcctagtcggctagtcctctactctccattcatccccaccacctccacttgtcgaaattgaaactcaaatcaaatcgaaccacctccacctcggcaacgagcgaattccggtgcgaattggagccctcctccccccgcatctagggtttcgcccatggaccccgccgccggcgggggccggggccgggaccgggcgggcttcgagcgggcgtgccggctgcccaacaccgtccactccgaggtcctgccgtcgctgccgctccccaccctcccgcgcgagctcggcttcgacgcgctccgcgacgacgagcccctcgccgcgcccgaccgccccgacacgatcatgcaggccgccaacatcgcccgcgtcctcgccgacaccgacgtctcccacctgggcttcaccgctgcggacaacgtcgacgtggaccccatccgctgctcctggctctggagggaggtgctcaagcacaaccccgacgctttcaaggtcaaggcgccaagtccgtcttcgcaaggtccatttggaggcccaggatatcaaaatcaagaacatgagaagcactttgagcattttacacctaatacgagcaaagcacgaaatgaatctgcatttcctcaggatgaaattgactcacatagagagcatttttataatgaactgacctcagattcaattgcttcaaagaagccaaaaataaggaagagagaaaataacaattctgtttcaagttctgctcccagcattcctaatactcaagatgttatcactaccttctgtgaggtggtggaggatttctgtggaaaaaccgaaattcctgatgatggagatggcggtgactggttgtcaatcccacttggtgatgttaaggttctcgtgaatgaaattacatctgttcgatccaaaaggatattgcatgaggttcctatggatacagttacaaggttattggatgtgattgaccgtcagattcgatattctcaaggtttgtcgatagatgtgaaagaaaattctgatgtcgttgatgctgaacctctggttttctctgctttggaggccagtcatgctgcgttggcaattatgacccaccatgatatgccaaagcaactgtaccgagaagaacttattgagcggattattgatttctcaaggcatcagatcacagattgtatggcagcaagtaacccaaccttccgagctctctacaaaccagctgaaaatgttgcaaatgatggagatgatgatgaagatgatttggaaaatggacaagttagcaagaggagacgtactgctactaatttgagcatgagaaaatcttcaaacaaactttctgcttctgtttattctgctgtgcagaaactatgcttgatattgggctttcttaaggaactgctcacaacagtgcgcttgtcagatggttgtattctgcagttagcgaaaacatgctttactacattcttggtggataatatgcagctattacaattaaaagcaatcggggttatttgcacggtgttttcgtcatacacacagcacaggagttacttggttgatgaaatacttcaccttcttcgcaagttgcagttttccaaaaatgccgtcagaacctaccatctagcagatgaagaccaaaagcaaatccagatgataacagcactgttagttcacctggttcagtttagtgcaattgttcccaatagcttaaaaggaacagttgattggaccactattgttgatgcctccggagatgctgattattatccaattaaatgccatgaagcggcaacagaggcttgttgccgtttttggactgatgtccttcaacgttttactgctgctaaatctcaagatatgtcggaaaccaaaggaataatagataatcttgttcaggatttcctaatgatactaaacttgccggagtatccagctgctgcttctatccttgaggttctctgtgtgttgctccttcagaatgctggattgaaatctaaggacactaatgttcggtgctttgctattgatcttcttggtggtattgcatcaagattgaagcatgattcggtcatctgtagtgaagagaagctttggatattgcaagatctcactgatgcaggtagcgatggctcaaaaatcttgaaaaacaagtgctgtgtttgtcttggtggaagagctcaatgtgctacagacgtactgtcagtcacaaattaaagaaaatggcaaaaaaactgctgcgtctactagtaagaaatctgctaaaccagctgaggtgccagcagtggatattattcaacaaatactactgagttatctccaagaatctggtccacaagatgatgggaacctgtttactcgatggttctatctgtgcatctggaacaaagaaaaccaacattctcaggaggagatcatctactatctcgctagattaaaatcaaaagagattctgcgagattctggcaatggtctggcaatttccagagattcagcaaagaaaatttgcttggcacttggtcagaagaactcattttgcaggggttttgataaaattcttgctcttcttttggctagcttgagagaaaattctcctgtaataagagcaaaagccttgcgtgcggtcagcagtatagttgaagctgaccctgaggtcttgggtgacaaacgtgtccaatctgctgtcgaagggaggttttgtgattcggctatttctgttcgtgaagctgcccttgaacttgttgggaggcatattgcttcacatcctgatgtgggcctgaagtatatagaaaaagttgctgagcgaataaaggacactggagtcagcgttcgcaagcgtgcaatcaaaattataagggatctatgtgcttctaatccaaacacagacacaacacatgcctttgtggagataatttctcgtgttaatgatgaggaatccagtgtacaggatcttgtatgtaaaacattttatgaactatggtttgaagaaccaactgggagccataagcacttggttgctgatggaagttcagttccaatggagatagctaaaaagactgagcaaattgttgacatgttgaggaagatgaccaatcaccaacctctgattaccatcataaaacgtaacttgactcttgatttcctccctcagtcaaccaaggctgcagggattaactcatacatggtggcatcaattcagaagcgttgcgaattaatatgcaaacgcttattagaaagaatattgcaggttgaggagggagctgctaaggagatggaaatccacatgcttccttatattgttgctttgcaagcattttgtattgttgatcccacgctctgcattccagtaactgatccttctaagtttgttgtgacactacaaccataccttaatattcaggttgacagtaaatcagctgcccagttgcttgaaagtattatttttgtgattgatgctgttcttccactcataaggaagccaacacaaaatgttgttgaagaacttgagaaagatctgaaacatatgatagttcgccattcgtatttgacagttgtacatgcctgtatcaagtgcctttgtgctctgagcgagtcagcaggtagaggtccaggattagtggaaaaccttgtcaatattttctacaagcatctgtctggagctaattcagatagtcagttattgggtcgatcactgttttgtcttggactcctccttcggtatggttatcaattgatgcaaacatctgaaaatcagcttgattttcccaagattatcaacttgctccagagaaaatatcttctcagggatgattttagcttgaaggttcgagctttgcagactttgggatacatacttattgcgaagcctgaatttatgctacaaaaggatatgttgaaactcatagagacagcactatcttctgaggttgattatagattaaagattcaaggacttcaaaacctctatgagtatctcagagatgctgaaagccaacttactgccgagagcactgtgaaacctcctgtccggtgtgaaataaatggcagaagtaaagtgcctgttgctgctggtgctggagacaccaacatatgtggtggtattattcaattgtattggagttctattcttgaaaggtgcttggatacaaatgatcaagttcgccagagtgcacttaagattgttgaagttgtactccgccagggtttagttcaccctattacctgtgttcctcaccttatagcacttgaaatggacccactggaggggaactcaaagttggctcatcatctgctgatgaatatgaatgaaaagtaccctttattttttgaaagccgtttgggtgatggactacaaatgtcatttaaattctttgaatccatagtcagcaaccataagatggcagcaaacataaaatcaaatccaattgcatttgtcaaacctggcatatctagaatataccgtcttatccgttcaaatcgaaattccagaaacaaatttgtccactcgatagttcggaaattcgagtctgatagccggagtcgcagcacagttagctttcttgtatactgtgccgaagttcttgcctccctgcctttcacatgctccgatgaaccactttacttgatctatgatataaatcgaattattcaccttaaagctggaggagttgagagcaatttgaaaaggtggacttctatgtctcagtctcaaaatacagtggatatgccaacgttgccaggagagaggcatgttgtcatgcaagagcctggcggatattatgataacgtgggctatgcccatgaaagggtgaatgccaatccttgcagtacttcagacgtggacatggccaaagtgcaggttgacgtggatatggccaaagtgcagggagattgccttgatgcaatagcccttcagctactgctgaaattgaagagacatttgaaagttgtctatagtttagatgatgcccgctgtcagtcattttctctaaaggagcctccgaaatctggagaaacattctccaggcagaatattccttttaatgttagcagcactaacatcagtctgccgagctgcctgcaggacgtagcttctgtttaccaggatttcaagacagtgctccacgaagattccatggactttgctgtgttcatcccttcagtccagattaggaagcgcccaaccccgagaaatacgacaaacccaaccccaagaagtacgacgagggtcaggagaacggctgcctcgagtgttacaaaagcccgtggtggcgcacgtggcgatgactccgacgactccgatgatgacgactggaccgggggcccaagagtgcttgacttcagtgggggtggccgtgtgacaaggcagagggtccaagtatgatgactggtcttggtgcttttgtacattctagggaaacctatagcgggtagcagctgacacgaggagagttagggttgagttttaggtttaaagtcgtttagggtacatagaagcagaaaaggaaaggaagatagcctttttacttagatgccattgatttggagcactccttttcttgctctgcccctgtcctgtttgtaattccggtcgggctttggcaaaactgacaaacagggttgtgctccggcttctgatctgattcaatgggaatgaaattattccttttgctttgcctgtataataacagttaagcctatgtttcgtgtaattgtctgccttgctaatgttatatatctgtacgtgtgctgagccttttttgttgaagttc

SEQ ID NO: 200148 - DNA, 1068 bp, Zea Mays
tttatttgtcgtgctcaaggtttttatggcgtatcctagtttttaagcatccaagcgcttaaaaaacctgggcatccacgctaccatgaccagaaatcagtaaaatgtgagaggagggaaagcagaagagagaggggatgaactagaggacagataaggccaagcacttgtctcatctcttcttccatccccattggctccagacactatggccatcgcaaagttcttcaacctgagacatctgggaggggtagcagcagtcagcaactcttgatctgtgttctgcagacgattgcaggggggacctgaaaggggtggcaccagcagtgagcaaagggagggggaaaggtacgattagagggaatggttgtgggtggcagcagtgcataagaactggagagggagggatggaggcagagtcgcgcagagaggggcagtggctgtggtgctggaatgcttgttgatggtttggagagggccgcaggtttgtgccttcaaatgttcaacattgatttttcgcttgggaatattattgtcaacttcagctcagggaaaccacagattgacaacaaatggacttcctcagcagttatggtgtatcgtgaggcagtttcagctgggctactaccctcaagtgatgttttatctcaagtgttgggatgtctgaggcttcctcatggcagttctctgaagagtactttcattgaaaacatgggagtaagttgtgacattccacaatacccaaatataaattcacttttcgaaggattcggtgaatatgacattcgagctttttctatattggaggaggctgcttcattaggagcagttgcaagcatttccataaaagaaacccggattgttattgatgctagaaagttaaagatcttcacagccgaggtatctcttcttagaaccttaagatctttgaagcatcgattggctgcaggttcaaggttaccaaacgtgacaatcttgttacctacagaaaagaaacaagttgacattgatgaaaaggagaaaacacttaaacttgctggaagagtaaaattcacaagtagttcccag

SEQ ID NO: 200149 - DNA, 2581 bp, Zea Mays
gtcacataaaagcagcccggtgtgatgcaaagctctggtcggcccaattacccccttcggccacttcgggcaccaacacctctgcggctctgccgtcctatcgaaaaagaaaaaaaaaacaaaatgaataaacctccgcagaccacgcccaccaacgcccatggcccaggctctcgggcacgtcagaggcgatcacgacgcctgcacccagttcagtggtccaccatcatcgctcgtgtcgtgtgctcagccgcagccgtgaggatccccagttccccaacctctcttgctcgctcccctcccaggctcccacagtcacacactcgtctcgagcgccgccccaaacccccaaccaaaccctcgccgccgtcagcggccatggatcttcgccgcccgccgcgctcctcgtcgggcggcgtggagcccaagatccgccaggtcggcttcttcaccccggatgcctccgcgccgtccgagcccatgccccccgccgcggtggtccaggcaccatcggcgcagcagaggccggtcacggcgtcgcctccggcgtcagacgacttctcccaggggcgcctttcccctgtcatgatccctcccccgcgccatgccgaccacctcgccctgggcccacaccccccggcggcggccgacgtcgtcctcgccacttctgcgcccgtgcgttcgtccccgcgcctcgacatcgtgtccgagatcggcgacgacgactcctggtcacgcgctccttctgctgtggagctagtttgtttcagaagaaaacaagtgtggtttggctgaaatacggaatgagggtgctccagcttccattccacaaaagcagaaaacctcgaaggcagagagacgtgcaattcaggaggcccaacgtgctgctaaagctgcagcgaaggaggcagataaatcaggaaaatctgctggtgctgcgatgtccaagcaagccaagccagcaaaaactgctcagaagaaagatgtgccccaagctgcaagtacacttgcttctgagaagaaggctactgaacgtcctccagaaagagaaaaaaaattagatgctccccatccccgcatgcagtttgatgatgtgcataaggtggagaaagcaaaaaaacgtgcggtagtcaaccaatcagaagctcaaaacagagttgaactgttcaggcatcttcctcagtatgtgcatggcactcagcttcctgacctcgagtcaaaattctttcaattagaaccaatgcatccttctgtatacaaggttgggctccaatatttgtctggtgaagtatctggtggtaatgatcgttgtgtagcaatgcttcttgcattcaaagaggcaataaaagattacactacacctacaaataaaacactcagcagagatcttactgcaaaaatcagcagttatgtgtcatttcttatcgagtgtaggcctctttcaatcagcatgggcaatgctattaggtttctgaagagcaggatagcaaagctaccacatgcattgtcagagtctgaagccaaaactagtcttcagtctgatattgatcgttttataaatgagaagatagttcttgcagataaagttattgtcagccatgccatcacaaaggtcagagacaacgatgtcttactgacatatggatcatcaacagttgttgaaatgattttggattatgctcatgaacttgggaggaactttcgagttgtagtggtagattctcgcccaaagcttgagggacagggattgctgcggagattagtggcaaagggcattaattgcacatatacacacataaatgccatctcatacatcatgcatgaagtaactcgagttttgttgggtgcctcatcaatattatcaaatgggacagtttattctcgagttgggacagcatctgtggctatggttgcgcatgcatttggagttccagttctggtttgttgtgaggcatacaagtttcacgagagagtgcaacttgattctatatgtgctaatgagcttggcgatccagatgtcattttgaaaattcctgggaaggcagaggaccatcttaagaactgggcagacagtgcaaatctccaattgctaaatttaacgtacgatgccaccccacctgattatgtgtcgatgatcataactgactacggaatgcttccgccaactagtgtaccggtcattgtgagagagtaccgcaaggagcaactatggatatgactcactgccctactggcgtatggtagcatttttggtgacctttgcctgagtgcaacatgataaatgattgcactgctggcctgagtttttttttttgtctgtccttgttgcctttttaccaaaagacggtccgtcgtgttttgcgatcacctgtataacttgcaactctgaatggtgcactcgtgtgccctcggacatcgttgagtcgatggatcagtgatgagtaccatccttgggctctaaatatttcaatggaatgccacctccaaccacagagaaggttgaatatttgatatggtttttgatactctacgttgaacgctaatttttactgtagtacccacatttggcagtttgtacaag

SEQ ID NO: 200150 - DNA, 2416 bp, Zea Mays
gcccggtgtgatgcaaagctctggtcggcccaattacccccttcggccacttcgggcaccaacacctctgcggctctgccgtcctatcgaaaaagaaaaaaaaaacaaaatgaataaacctccgcagaccacgcccaccaacgcccatggcccaggctctcgggcacgtcagaggcgatcacgacgcctgcacccagttcagtggtccaccatcatcgctcgtgtcgtgtgctcagccgcagccgtgaggatccccagttccccaacctctcttgctcgctcccctcccaggctcccacagtcacacactcgtctcgagcgccgccccaaacccccaaccaaaccctcgccgccgtcagcggccatggatcttcgccgcccgccgcgctcctcgtcgggcggcgtggagcccaagatccgccaggtcggcttcttcaccccggatgcctccgcgccgtccgagcccatgccccccgccgcggtggtccaggcaccatcggcgcagcagaggccggtcacggcgtcgcctccggcgtcagacgacttctcccaggggcgcctttcccctgtcatgatccctcccccgcgccatgccgaccacctcgccctgggcccacaccccccggcggcggccgacgtcgtcctcgccacttctgcgcccgtgcgttcgtccccgcgcctcgacatcgtgtccgagatcggcgacgacgactcctggtcacgcgctccttctgctgtggagctagataaatcaggaaaatctgctggtgctgcgatgtccaagcaagccaagccagcaaaaactgctcagaagaaagatgtgccccaagctgcaagtacacttgcttctgagaagaaggctactgaacgtcctccagaaagagaaaaaaaattagatgctccccatccccgcatgcagtttgatgatgtgcataaggtggagaaagcaaaaaaacgtgcggtagtcaaccaatcagaagctcaaaacagagttgaactgttcaggcatcttcctcagtatgtgcatggcactcagcttcctgacctcgagtcaaaattctttcaattagaaccaatgcatccttctgtatacaaggttgggctccaatatttgtctggtgaagtatctggtggtaatgatcgttgtgtagcaatgcttcttgcattcaaagaggcaataaaagattacactacacctacaaataaaacactcagcagagatcttactgcaaaaatcagcagttatgtgtcatttcttatcgagtgtaggcctctttcaatcagcatgggcaatgctattaggtttctgaagagcaggatagcaaagctaccacatgcattgtcagagtctgaagccaaaactagtcttcagtctgatattgatcgttttataaatgagaagatagttcttgcagataaagttattgtcagccatgccatcacaaaggtcagagacaacgatgtcttactgacatatggatcatcaacagttgttgaaatgattttggattatgctcatgaacttgggaggaactttcgagttgtagtggtagattctcgcccaaagcttgagggacagggattgctgcggagattagtggcaaagggcattaattgcacatatacacacataaatgccatctcatacatcatgcatgaagtaactcgagttttgttgggtgcctcatcaatattatcaaatgggacagtttattctcgagttgggacagcatctgtggctatggttgcgcatgcatttggagttccagttctggtttgttgtgaggcatacaagtttcacgagagagtgcaacttgattctatatgtgctaatgagcttggcgatccagatgtcattttgaaaattcctgggaaggcagaggaccatcttaagaactgggcagacagtgcaaatctccaattgctaaatttaacgtacgatgccaccccacctgattatgtgtcgatgatcataactgactacggaatgcttccgccaactagtgtaccggtcattgtgagagagtaccgcaaggagcaactatggatatgactcactgccctactggcgtatggtagcatttttggtgacctttgcctgagtgcaacatgataaatgattgcactgctggcctgagtttttttttttgtctgtccttgttgcctttttaccaaaagacggtccgtcgtgttttgcgatcacctgtataacttgcaactctgaatggtgcactcgtgtgccctcggacatcgttgagtcgatggatcagtgatgagtaccatccttgggctctaaatatttcaatggaatgccacctccaaccacagagaaggttgaatatttgatatggtttttgatactctacgttgaacgctaatttttactgtagtacccacatttggcagtttgtacaag

SEQ ID NO: 200151 - DNA, 1804 bp, Zea Mays
caacgaccgacccgtctattttcgcagaaaacccctcaaattctccgttcccttcgatccaccccgcatcccagggagtcctccactacagttcttgcccacctacggcgatggccggccgcctcccgggcgccgccgcgtcctcaccgttaccccgcgccctcctcctcatcgccgcgcttgttctcttctccatctctttcctctcactccgctccctgcgccccgcggcggaccccgcgcttgcgtccgccgccgacaagtaccgtcctcttctccggctccagtcctcctcgtcggtgtaccattctccggaggcgttcacagcggggtacgcggatatggagcggagcttcaaggtgtacatttacccggacggcgaccccaagacattctatcagacgcctcgcaagctcacggggaagtacgccagcgagggctacttcttccagaacatccgagagagccggttccgcaccgacgacccggaccaggcgcatctcttcttcgtgcccatctcgccccacaagatgcgcggcaagggtacttcatacgagaatatgacggtgatagttaaggattacgtagaaggtttgataaacaagtatccttactggaacaggacactaggagcagaccacttctttgtcacctgccatgatgtgggtgtgagagcatttgaaggacttccattcatggtgaagaactctattagagttgtatgttcgccaagctataatgttgactttataccacataaggatattgcgcttcctcaagtactacagccatttgccctacctgaaggaggaaatgatattgagaacaggacaactcttggcttttgggctggccatcgcaattccaaaataagggttatcctagcacgagtttgggagaatgacacagagcttgctatcagcaacaaccggatcagtagagctattggagagctagtttatcagaagcagttttaccgtaccaagttctgtatctgtcctggcggctctcaagttaacagtgcccgtatatctgattcaatacactatggttgtgttcctgttattctgtcagattactatgacctgcctttcaatgacgcccttgactggagaaagtttgcggttatacttagggagagagatgtatatcaactgaagaatatcttgaaatctatatcacaggaggagtttgtttcattgcataaatctctagttcagaaacactttgtgtggcattcacctcctgtatcctacgatgcattccacatgattatgtatgaactgtggctgcggcataatgtaataaagtactaagcttctcagcctctgagttttgatttctaacctaaatgactgatccatcggaaagatactacaaagtctgatagcctgctgttactgccttgaaaatgggcttctggttctttgttctttgaatcaccagatggatgattattgaatataatgttagctatgcatggtgcaatggagagcatttccatcgaagagttgaccgttgttcagcatatatggcaaaactgtagtcctggttaattgatggattacttgattcttttaacaatagttagctttcccatattgcaatctttccctctagatattacttatattccgtggatctgcttggttgattgcatgtattttctcgcgtaatttttttctgttcaatggtttcaggcatgtaagtaatgtacaatattattgatgtgaaacatagtccattttcttctgacagaacatgtaactgtgagttgtgacaaaaaacaatcatttgattttcg

SEQ ID NO: 200152 - DNA, 2193 bp, Zea Mays
atgccttcagctgtgctgaagttgtttcacgtaggagccccacaggatggtacaggcaggaggatcaggccaccgtcgaggaacgcgctcttcgctgtgttccagcgagaagatgagggatcgagggcggcgcaggtggcgagctcgtgggcggaacagactggtgagagcaagaggatggatcaggagcttgagccccaggaggggagctgtttgagcggatgcccaccaggaacaatgtttcctagatcacgatgtttgggccacttttggaagaggtcagggatgacatgttttcaagcttggaggacatcaccaacgcaccatatgcagatctgctctctattaattcaatgaggaaaggaaaggggtcatagaaattagtcttggcagatggaggggaacgtctcaatgactgaggcacatttttactaaattatccctaaattatttgtatttttaaaataacatgtaatcttgttgatctggtttactcaagatgcatcaagtttgtacttggagaagaatcctggagttattttacttgtttccttgatttgtagagacatgccagtgaggagcagtttagtcggttcttgctttatgaagtggatgcaattagaaagacgtacgagcgggccaacatctcgcggtggctcgccttgggcaaccggacctgcccgaccacgatgcaggagctctaggacgacgccctcacccccaacgccactctccgacaactcatcgccgcctggttctcccgcctggtttctgcattttgttttcttatctgtcaatcatgtttttccatattactgcaggtgggtctgattaattatttaaatgtagtttatcttagatattgtttgaacgtatgggatgttggaggacagaagacaatcatgtcttactggagaaattactttgagcagactaatgggttagtttggtttgctgatagttcagacataaggaggcttgatgattgccgtgctgaactccacaatctcttgaaagaagaggataaaggtttacctatctaggcagtgttctattgttgatttttgcaaataagcaagacatgcaaggagctctaaaaccaactggaatcgcgaagagtcactctccgacagctcatcgccgcttggttctcctgtcggtacacaaggtttaagaagcgctacgcggacttccacggccgcgctgccgatctcgtccacggcctccggggcacggcgatgcccaggagacaggccctcgaggaagagcaatgtacagaagagaaaggtatctcgactattccaaagcacaagtatgcatccaaagcctgttccccaaaaggaacctttatctgcagctctctctgcgcttactcttgttgtgcaatttaatgggtggctatcatttttcctcttgctttattataaacttcctctgcggccagaaactcacaagacatactatgaatacactggcttgtggcacatctatgggctccttgccatgaattcatggttctggagtgccatatatcacagttgtgacacaatttggacagaaaaagctatatttttcatcagatgctgcctttctagggtattccctcattttgacgatagttgattaatcattctggaacttgtactaacaattgaagcaagtggaggcatagcaccaattgtgtctgtgctgcagctctggatgtcagtagacaagaggtgtatcagagagaagcacttcaaggttaatttgttgagcaaattggagatgctggattttgtattttggttgctcatgggtggtgaatgatctgacgacttcagaagaggatagatctgagattacctttcatgcatgtcaaggaagttaagtagctgatgccatcaaagcaatggagaaacgtcaggtgaaccgcgagcagaattctgtggcgcatttgttagcgcagttagttaggactctgttcatacaactgttcgattaagccaaatacctaatttagttttatattggttgttgtcaaagaatttgtgaaatattgaggttgataatatatgtggcgttcgtttttatgtaatcattgttcactaatattttgtcgaatattttatattatatagacattactaagaacgtaaggggtcgctcgtgctctgtaaaggtacaaacaatcatgattgtggaggagcgtga

SEQ ID NO: 200153 - DNA, 2005 bp, Zea Mays
atgccttcagctgtgctgaagttgtttcacgtaggagccccacaggatggtacaggcaggaggatcaggccaccgtcgaggaacgcgctcttcgctgtgttccagcgagaagatgagggatcgagggcggcgcaggtggcgagctcgtgggcggaacagactggtgagagcaagaggatggatcaggagcttgagccccaggaggggagctgtttgagcggatgcccaccaggaacaatgtttcctagatcacgatgtttgggccacttttggaagaggtcagggatgacatgttttcaagcttggaggacatcaccaacgcaccatatgcagatctgctctctattaattcaatgaggaaaggaaaggggtcatagaaattagtcttggcagatggaggggaacgtctcaatgactgagagacatgccagtgaggagcagtttagtcggttcttgctttatgaagtggatgcaattagaaagacgtacgagcgggccaacatctcgcggtggctcgccttgggcaaccggacctgcccgaccacgatgcaggagctctaggacgacgccctcacccccaacgccactctccgacaactcatcgccgcctgtttatcttagatattgtttgaacgtatgggatgttggaggacagaagacaatcatgtcttactggagaaattactttgagcagactaatgggttagtttggtttgctgatagttcagacataaggaggcttgatgattgccgtgctgaactccacaatctcttgaaagaagaggataaaggtttacctatctaggcagtgttctattgttgatttttgcaaataagcaagacatgcaaggagctctaaaaccaactggaatcgcgaagattttacttagttcgatgtgggagcaaaaggatatgccaaattgaatgtagtttcatcagttatgctctattatggatgttcagaggcatccaatttcagtgtgtactgcaatacttgggtccacctgtttaagaagcgctacgcggacttccacggccgcgctgccgatctcgtccacggcctccggggcacggcgatgcccaggagacaggccctcgaggaagagcaatgtacagaagagaaaggtatctcgactattccaaagcacaagtatgcatccaaagcctgttccccaaaaggaacctttatctgcagctctctctgcgcttactcttgttgtgcaatttaatgggtggctatcatttttcctcttgctttattataaacttcctctgcggccagaaactcacaagacatactatgaatacactggcttgtggcacatctatgggctccttgccatgaattcatggttctggagtgccatatatcacagttgtgacacaatttggacagaaaaagctatatttttcatcagatgctgcctttctaggattaatcattctggaacttgtactaacaattgaagcaagtggaggcatagcaccaattgtgtctgtgctgcagctctggatgtcagtagacaagaggtgtatcagagagaagcacttcaaggttaatttgttgagcaaattggagatgctggattttgtattttggttgctcatgggtggtgaatgatctgacgacttcagaagaggatagatctgagattacctttcatgcatgtcaaggaagttaagtagctgatgccatcaaagcaatggagaaacgtcaggtgaaccgcgagcagaattctgtggcgcatttgttagcgcagttagttaggactctgttcatacaactgttcgattaagccaaatacctaatttagttttatattggttgttgtcaaagaatttgtgaaatattgaggttgataatatatgtggcgttcgtttttatgtaatcattgttcactaatattttgtcgaatattttatattatatagacattactaagaacgtaaggggtcgctcgtgctctgtaaaggtacaaacaatcatgattgtggaggagcgtga

SEQ ID NO: 200154 - DNA, 2396 bp, Zea Mays
atgccttcagctgtgctgaagttgtttcacgtaggagccccacaggatggtacaggcaggaggatcaggccaccgtcgaggaacgcgctcttcgctgtgttccagcgagaagatgagggatcgagggcggcgcaggtggcgagctcgtgggcggaacagactggtgagagcaagaggatggatcaggagcttgagccccaggaggggagctgtttgagcggatgcccaccaggaacaatgtttcctagatcacgatgtttgggccacttttggaagaggtcagggatgacatgttttcaagcttggaggacatcaccaacgcaccatatgcagatctgctctctattaattcaatgaggaaaggaaaggggtcatagaaattagtcttggcagatggaggggaacgtctcaatgactgaggcacatttttactaaattatccctaaattatttgtatttttaaaataacatgtaatcttgttgatctggtttactcaagatgcatcaagtttgtacttggagaagaatcctggagttattttacttgtttccttgatttgtagagacatgccagtgaggagcagtttagtcggttcttgctttatgaagtggatgcaattagaaagacgtacgagcgggccaacatctcgcggtggctcgccttgggcaaccggacctgcccgaccacgatgcaggagctctaggacgacgccctcacccccaacgccactctccgacaactcatcgccgcctggttctcccgcctgtttatcttagatattgtttgaacgtatgggatgttggaggacagaagacaatcatgtcttactggagaaattactttgagcagactaatgggttagtttggtttgctgatagttcagacataaggaggcttgatgattgccgtgctgaactccacaatctcttgaaagaagaggataaaggtttacctatctaggcagtgttctattgttgatttttgcaaataagcaagacatgcaaggagctctaaaaccaactggaatcgcgaaggtaagcgaacttcagtcatttattatatgcattagagacatgttttcctgtctatgacatcatttttaacttgtactgtgtttttccggtcctcatggttgccaagattttacttagttcgatgtgggagcaaaaggatatgccaaattgaatgtagtttcatcagttatgctctattatggatgttcagaggcatccaatttcagtgtgtactgcaatacttgggtccacctgtacgtggtagatgttctgcattttgttttcttataaattagatttggcttccattatgttgttctcttttggaacagagtcactctccgacagctcatcgccgcttggttctcctgtcggtacacaaggtttaagaagcgctacgcggacttccacggccgcgctgccgatctcgtccacggcctccggggcacggcgatgcccaggagacaggccctcgaggaagagcaatgtacagaagagaaaggtatctcgactattccaaagcacaagtatgcatccaaagcctgttccccaaaaggaacctttatctgcagctctctctgcgcttactcttgttgtgcaatttaatgggtggctatcatttttcctcttgctttattataaacttcctctgcggccagaaactcacaagacatactatgaatacactggcttgtggcacatctatgggctccttgccatgaattcatggttctggagtgccatatatcacagttgtgacacaatttggacagaaaaagctatatttttcatcagatgctgcctttctaggattaatcattctggaacttgtactaacaattgaagcaagtggaggcatagcaccaattgtgtctgtgctgcagctctggatgtcagtagacaagaggtgtatcagagagaagcacttcaaggttaatttgttgagcaaattggagatgctggattttgtattttggttgctcatgggtggtgaatgatctgacgacttcagaagaggatagatctgagattacctttcatgcatgtcaaggaagttaagtagctgatgccatcaaagcaatggagaaacgtcaggtgaaccgcgagcagaattctgtggcgcatttgttagcgcagttagttaggactctgttcatacaactgttcgattaagccaaatacctaatttagttttatattggttgttgtcaaagaatttgtgaaatattgaggttgataatatatgtggcgttcgtttttatgtaatcattgttcactaatattttgtcgaatattttatattatatagacattactaagaacgtaaggggtcgctcgtgctctgtaaaggtacaaacaatcatgattgtggaggagcgtga

SEQ ID NO: 200155 - DNA, 2031 bp, Zea Mays
atgccttcagctgtgctgaagttgtttcacgtaggagccccacaggatggtacaggcaggaggatcaggccaccgtcgaggaacgcgctcttcgctgtgttccagcgagaagatgagggatcgagggcggcgcaggtggcgagctcgtgggcggaacagactggtgagagcaagaggatggatcaggagcttgagccccaggaggggagctgtttgagcggatgcccaccaggaacaatgtttcctagatcacgatgtttgggccacttttggaagaggtcagggatgacatgttttcaagcttggaggacatcaccaacgcaccatatgcagatctgctctctattaattcaatgaggaaaggaaaggggtcatagaaattagtcttggcagatggaggggaacgtctcaatgactgagagacatgccagtgaggagcagtttagtcggttcttgctttatgaagtggatgcaattagaaagacgtacgagcgggccaacatctcgcggtggctcgccttgggcaaccggacctgcccgaccacgatgcaggagctctaggacgacgccctcacccccaacgccactctccgacaactcatcgccgcctgtttatcttagatattgtttgaacgtatgggatgttggaggacagaagacaatcatgtcttactggagaaattactttgagcagactaatgggttagtttggtttgctgatagttcagacataaggaggcttgatgattgccgtgctgaactccacaatctcttgaaagaagaggataaaggtttacctatctaggcagtgttctattgttgatttttgcaaataagcaagacatgcaaggagctctaaaaccaactggaatcgcgaagattttacttagttcgatgtgggagcaaaaggatatgccaaattgaatgtagtttcatcagttatgctctattatggatgttcagaggcatccaatttcagtgtgtactgcaatacttgggtccacctgtttaagaagcgctacgcggacttccacggccgcgctgccgatctcgtccacggcctccggggcacggcgatgcccaggagacaggccctcgaggaagagcaatgtacagaagagaaaggtatctcgactattccaaagcacaagtatgcatccaaagcctgttccccaaaaggaacctttatctgcagctctctctgcgcttactcttgttgtgcaatttaatgggtggctatcatttttcctcttgctttattataaacttcctctgcggccagaaactcacaagacatactatgaatacactggcttgtggcacatctatgggctccttgccatgaattcatggttctggagtgccatatatcacagttgtgacacaatttggacagaaaaagctatatttttcatcagatgctgcctttctagggtattccctcattttgacgatagttgattaatcattctggaacttgtactaacaattgaagcaagtggaggcatagcaccaattgtgtctgtgctgcagctctggatgtcagtagacaagaggtgtatcagagagaagcacttcaaggttaatttgttgagcaaattggagatgctggattttgtattttggttgctcatgggtggtgaatgatctgacgacttcagaagaggatagatctgagattacctttcatgcatgtcaaggaagttaagtagctgatgccatcaaagcaatggagaaacgtcaggtgaaccgcgagcagaattctgtggcgcatttgttagcgcagttagttaggactctgttcatacaactgttcgattaagccaaatacctaatttagttttatattggttgttgtcaaagaatttgtgaaatattgaggttgataatatatgtggcgttcgtttttatgtaatcattgttcactaatattttgtcgaatattttatattatatagacattactaagaacgtaaggggtcgctcgtgctctgtaaaggtacaaacaatcatgattgtggaggagcgtga

SEQ ID NO: 200156 - DNA, 2353 bp, Zea Mays
atgccttcagctgtgctgaagttgtttcacgtaggagccccacaggatggtacaggcaggaggatcaggccaccgtcgaggaacgcgctcttcgctgtgttccagcgagaagatgagggatcgagggcggcgcaggtggcgagctcgtgggcggaacagactggtgagagcaagaggatggatcaggagcttgagccccaggaggggagctgtttgagcggatgcccaccaggaacaatgtttcctagatcacgatgtttgggccacttttggaagaggtcagggatgacatgttttcaagcttggaggacatcaccaacgcaccatatgcagatctgctctctattaattcaatgaggaaaggaaaggggtcatagaaattagtcttggcagatggaggggaacgtctcaatgactgaggcacatttttactaaattatccctaaattatttgtatttttaaaataacatgtaatcttgttgatctggtttactcaagatgcatcaagtttgtacttggagaagaatcctggagttattttacttgtttccttgatttgtagagacatgccagtgaggagcagtttagtcggttcttgctttatgaagtggatgcaattagaaagacgtacgagcgggccaacatctcgcggtggctcgccttgggcaaccggacctgcccgaccacgatgcaggagctctaggacgacgccctcacccccaacgccactctccgacaactcatcgccgcctggttctcccgcctggtttctgcattttgttttcttatctgtcaatcatgtttttccatattactgcaggtgggtctgattaattatttaaatgtagtttatcttagatattgtttgaacgtatgggatgttggaggacagaagacaatcatgtcttactggagaaattactttgagcagactaatgggttagtttggtttgctgatagttcagacataaggaggcttgatgattgccgtgctgaactccacaatctcttgaaagaagaggataaaggtttacctatctaggcagtgttctattgttgatttttgcaaataagcaagacatgcaaggagctctaaaaccaactggaatcgcgaagattttacttagttcgatgtgggagcaaaaggatatgccaaattgaatgtagtttcatcagttatgctctattatggatgttcagaggcatccaatttcagtgtgtactgcaatacttgggtccacctagtcactctccgacagctcatcgccgcttggttctcctgtcggtacacaaggtttaagaagcgctacgcggacttccacggccgcgctgccgatctcgtccacggcctccggggcacggcgatgcccaggagacaggccctcgaggaagagcaatgtacagaagagaaaggtatctcgactattccaaagcacaagtatgcatccaaagcctgttccccaaaaggaacctttatctgcagctctctctgcgcttactcttgttgtgcaatttaatgggtggctatcatttttcctcttgctttattataaacttcctctgcggccagaaactcacaagacatactatgaatacactggcttgtggcacatctatgggctccttgccatgaattcatggttctggagtgccatatatcacagttgtgacacaatttggacagaaaaagctatatttttcatcagatgctgcctttctagggtattccctcattttgacgatagttggtgagcatgtagtagcaagtttcatgggctctgattaatcattctggaacttgtactaacaattgaagcaagtggaggcatagcaccaattgtgtctgtgctgcagctctggatgtcagtagacaagaggtgtatcagagagaagcacttcaaggttaatttgttgagcaaattggagatgctggattttgtattttggttgctcatgggtggtgaatgatctgacgacttcagaagaggatagatctgagattacctttcatgcatgtcaaggaagttaagtagctgatgccatcaaagcaatggagaaacgtcaggtgaaccgcgagcagaattctgtggcgcatttgttagcgcagttagttaggactctgttcatacaactgttcgattaagccaaatacctaatttagttttatattggttgttgtcaaagaatttgtgaaatattgaggttgataatatatgtggcgttcgtttttatgtaatcattgttcactaatattttgtcgaatattttatattatatagacattactaagaacgtaaggggtcgctcgtgctctgtaaaggtacaaacaatcatgattgtggaggagcgtga

SEQ ID NO: 200157 - DNA, 1993 bp, Zea Mays
atgccttcagctgtgctgaagttgtttcacgtaggagccccacaggatggtacaggcaggaggatcaggccaccgtcgaggaacgcgctcttcgctgtgttccagcgagaagatgagggatcgagggcggcgcaggtggcgagctcgtgggcggaacagactggtgagagcaagaggatggatcaggagcttgagccccagagacatgccagtgaggagcagtttagtcggttcttgctttatgaagtggatgcaattagaaagacgtacgagcgggccaacatctcgcggtggctcgccttgggcaaccggacctgcccgaccacgatgcaggagctctaggacgacgccctcacccccaacgccactctccgacaactcatcgccgcctggttctcccgcctggtttctgcattttgttttcttatctgtcaatcatgtttttccatattactgcaggtgggtctgattaattatttaaatgtagtttatcttagatattgtttgaacgtatgggatgttggaggacagaagacaatcatgtcttactggagaaattactttgagcagactaatgggttagtttggtttgctgatagttcagacataaggaggcttgatgattgccgtgctgaactccacaatctcttgaaagaagaggataaaggtttacctatctaggcagtgttctattgttgatttttgcaaataagcaagacatgcaaggagctctaaaaccaactggaatcgcgaagagtcactctccgacagctcatcgccgcttggttctcctgtcggtacacaaggtttaagaagcgctacgcggacttccacggccgcgctgccgatctcgtccacggcctccggggcacggcgatgcccaggagacaggccctcgaggaagagcaatgtacagaagagaaaggtatctcgactattccaaagcacaagtatgcatccaaagcctgttccccaaaaggaacctttatctgcagctctctctgcgcttactcttgttgtgcaatttaatgggtggctatcatttttcctcttgctttattataaacttcctctgcggccagaaactcacaagacatactatgaatacactggcttgtggcacatctatgggctccttgccatgaattcatggttctggagtgccatatatcacagttgtgacacaatttggacagaaaaagctatatttttcatcagatgctgcctttctagggtattccctcattttgacgatagttggtgagcatgtagtagcaagtttcatgggctctggtagattaactgacctttgtgtgttccattagcctgtgaagttcgaaactggtcatattgctaagaattctaggaggttactattagggcctagagtaaatgactacgtgctgatgaaaatctgttcagattaatcattctggaacttgtactaacaattgaagcaagtggaggcatagcaccaattgtgtctgtgctgcagctctggatgtcagtagacaagaggtgtatcagagagaagcacttcaaggttaatttgttgagcaaattggagatgctggattttgtattttggttgctcatgggtggtgaatgatctgacgacttcagaagaggatagatctgagattacctttcatgcatgtcaaggaagttaagtagctgatgccatcaaagcaatggagaaacgtcaggtgaaccgcgagcagaattctgtggcgcatttgttagcgcagttagttaggactctgttcatacaactgttcgattaagccaaatacctaatttagttttatattggttgttgtcaaagaatttgtgaaatattgaggttgataatatatgtggcgttcgtttttatgtaatcattgttcactaatattttgtcgaatattttatattatatagacattactaagaacgtaaggggtcgctcgtgctctgtaaaggtacaaacaatcatgattgtggaggagcgtga

SEQ ID NO: 200158 - DNA, 1876 bp, Zea Mays
atgccttcagctgtgctgaagttgtttcacgtaggagccccacaggatggtacaggcaggaggatcaggccaccgtcgaggaacgcgctcttcgctgtgttccagcgagaagatgagggatcgagggcggcgcaggtggcgagctcgtgggcggaacagactggtgagagcaagaggatggatcaggagcttgagccccagagacatgccagtgaggagcagtttagtcggttcttgctttatgaagtggatgcaattagaaagacgtacgagcgggccaacatctcgcggtggctcgccttgggcaaccggacctgcccgaccacgatgcaggagctctaggacgacgccctcacccccaacgccactctccgacaactcatcgccgcctggttctcccgcctgtttatcttagatattgtttgaacgtatgggatgttggaggacagaagacaatcatgtcttactggagaaattactttgagcagactaatgggttagtttggtttgctgatagttcagacataaggaggcttgatgattgccgtgctgaactccacaatctcttgaaagaagaggataaaggtttacctatctaggcagtgttctattgttgatttttgcaaataagcaagacatgcaaggagctctaaaaccaactggaatcgcgaagattttacttagttcgatgtgggagcaaaaggatatgccaaattgaatgtagtttcatcagttatgctctattatggatgttcagaggcatccaatttcagtgtgtactgcaatacttgggtccacctagtcactctccgacagctcatcgccgcttggttctcctgtcggtacacaaggtttaagaagcgctacgcggacttccacggccgcgctgccgatctcgtccacggcctccggggcacggcgatgcccaggagacaggccctcgaggaagagcaatgtacagaagagaaaggtatctcgactattccaaagcacaagtatgcatccaaagcctgttccccaaaaggaacctttatctgcagctctctctgcgcttactcttgttgtgcaatttaatgggtggctatcatttttcctcttgctttattataaacttcctctgcggccagaaactcacaagacatactatgaatacactggcttgtggcacatctatgggctccttgccatgaattcatggttctggagtgccatatatcacagttgtgacacaatttggacagaaaaagctatatttttcatcagatgctgcctttctagggtattccctcattttgacgatagttgattaatcattctggaacttgtactaacaattgaagcaagtggaggcatagcaccaattgtgtctgtgctgcagctctggatgtcagtagacaagaggtgtatcagagagaagcacttcaaggttaatttgttgagcaaattggagatgctggattttgtattttggttgctcatgggtggtgaatgatctgacgacttcagaagaggatagatctgagattacctttcatgcatgtcaaggaagttaagtagctgatgccatcaaagcaatggagaaacgtcaggtgaaccgcgagcagaattctgtggcgcatttgttagcgcagttagttaggactctgttcatacaactgttcgattaagccaaatacctaatttagttttatattggttgttgtcaaagaatttgtgaaatattgaggttgataatatatgtggcgttcgtttttatgtaatcattgttcactaatattttgtcgaatattttatattatatagacattactaagaacgtaaggggtcgctcgtgctctgtaaaggtacaaacaatcatgattgtggaggagcgtga

SEQ ID NO: 200159 - DNA, 1850 bp, Zea Mays
atgccttcagctgtgctgaagttgtttcacgtaggagccccacaggatggtacaggcaggaggatcaggccaccgtcgaggaacgcgctcttcgctgtgttccagcgagaagatgagggatcgagggcggcgcaggtggcgagctcgtgggcggaacagactggtgagagcaagaggatggatcaggagcttgagccccagagacatgccagtgaggagcagtttagtcggttcttgctttatgaagtggatgcaattagaaagacgtacgagcgggccaacatctcgcggtggctcgccttgggcaaccggacctgcccgaccacgatgcaggagctctaggacgacgccctcacccccaacgccactctccgacaactcatcgccgcctggttctcccgcctgtttatcttagatattgtttgaacgtatgggatgttggaggacagaagacaatcatgtcttactggagaaattactttgagcagactaatgggttagtttggtttgctgatagttcagacataaggaggcttgatgattgccgtgctgaactccacaatctcttgaaagaagaggataaaggtttacctatctaggcagtgttctattgttgatttttgcaaataagcaagacatgcaaggagctctaaaaccaactggaatcgcgaagattttacttagttcgatgtgggagcaaaaggatatgccaaattgaatgtagtttcatcagttatgctctattatggatgttcagaggcatccaatttcagtgtgtactgcaatacttgggtccacctagtcactctccgacagctcatcgccgcttggttctcctgtcggtacacaaggtttaagaagcgctacgcggacttccacggccgcgctgccgatctcgtccacggcctccggggcacggcgatgcccaggagacaggccctcgaggaagagcaatgtacagaagagaaaggtatctcgactattccaaagcacaagtatgcatccaaagcctgttccccaaaaggaacctttatctgcagctctctctgcgcttactcttgttgtgcaatttaatgggtggctatcatttttcctcttgctttattataaacttcctctgcggccagaaactcacaagacatactatgaatacactggcttgtggcacatctatgggctccttgccatgaattcatggttctggagtgccatatatcacagttgtgacacaatttggacagaaaaagctatatttttcatcagatgctgcctttctaggattaatcattctggaacttgtactaacaattgaagcaagtggaggcatagcaccaattgtgtctgtgctgcagctctggatgtcagtagacaagaggtgtatcagagagaagcacttcaaggttaatttgttgagcaaattggagatgctggattttgtattttggttgctcatgggtggtgaatgatctgacgacttcagaagaggatagatctgagattacctttcatgcatgtcaaggaagttaagtagctgatgccatcaaagcaatggagaaacgtcaggtgaaccgcgagcagaattctgtggcgcatttgttagcgcagttagttaggactctgttcatacaactgttcgattaagccaaatacctaatttagttttatattggttgttgtcaaagaatttgtgaaatattgaggttgataatatatgtggcgttcgtttttatgtaatcattgttcactaatattttgtcgaatattttatattatatagacattactaagaacgtaaggggtcgctcgtgctctgtaaaggtacaaacaatcatgattgtggaggagcgtga

SEQ ID NO: 200160 - DNA, 2433 bp, Zea Mays
gcctattgccttgcctgccccttccatcctccttccccacccctccttccatcctcgcccgcgcgctccacacgtccccgccgtcgcgctcgccttccatcctcctccccaccccctccttccatcctcgctcgcgcgctccgcatgtccccgccgtcgcgctcgcctccctcctctttgttgcctccgcgtcggcctccaccccgctctccgacacgcttgccgtcgtcttggatttctggtgcactctcttctctacgacgcgagcaagggcggcgcttgccatggcatcgacgggaaccaggcatcactctccctatctcttgggatggtacaggcaggaggatcaggccaccgtcgaggaacgcgctcttcgctgtgttccagcgagaagatgagggatcgagggcggcgcaggtggcgagctcgtgggcggaacagactggtgagagcaagaggatggatcaggagcttgagccccaggaggggagctgtttgagcggatgcccaccaggaacaatgtttcctagatcacgatgtttgggccacttttggaagaggtcagggatgacatgttttcaagcttggaggacatcaccaacgcaccatatgcagatctgctctctattaattcaatgaggaaaggaaaggggtcatagaaattagtcttggcagatggaggggaacgtctcaatgactgagagacatgccagtgaggagcagtttagtcggttcttgctttatgaagtggatgcaattagaaagacgtacgagcgggccaacatctcgcggtggctcgccttgggcaaccggacctgcccgaccacgatgcaggagctctaggacgacgccctcacccccaacgccactctccgacaactcatcgccgcctggttctcccgcctggtttctgcattttgttttcttatctgtcaatcatgtttttccatattactgcaggtgggtctgattaattatttaaatgtagtttatcttagatattgtttgaacgtatgggatgttggaggacagaagacaatcatgtcttactggagaaattactttgagcagactaatgggttagtttggtttgctgatagttcagacataaggaggcttgatgattgccgtgctgaactccacaatctcttgaaagaagaggataaaggtttacctatctaggcagtgttctattgttgatttttgcaaataagcaagacatgcaaggagctctaaaaccaactggaatcgcgaagattttacttagttcgatgtgggagcaaaaggatatgccaaattgaatgtagtttcatcagttatgctctattatggatgttcagaggcatccaatttcagtgtgtactgcaatacttgggtccacctagtcactctccgacagctcatcgccgcttggttctcctgtcggtacacaaggtttaagaagcgctacgcggacttccacggccgcgctgccgatctcgtccacggcctccggggcacggcgatgcccaggagacaggccctcgaggaagagcaatgtacagaagagaaaggtatctcgactattccaaagcacaagtatgcatccaaagcctgttccccaaaaggaacctttatctgcagctctctctgcgcttactcttgttgtgcaatttaatgggtggctatcatttttcctcttgctttattataaacttcctctgcggccagaaactcacaagacatactatgaatacactggcttgtggcacatctatgggctccttgccatgaattcatggttctggagtgccatatatcacagttgtgacacaatttggacagaaaaagctatatttttcatcagatgctgcctttctaggattaatcattctggaacttgtactaacaattgaagcaagtggaggcatagcaccaattgtgtctgtgctgcagctctggatgtcagtagacaagaggtgtatcagagagaagcacttcaaggttaatttgttgagcaaattggagatgctggattttgtattttggttgctcatgggtggtgaatgatctgacgacttcagaagaggatagatctgagattacctttcatgcatgtcaaggaagttaagtagctgatgccatcaaagcaatggagaaacgtcaggtgaaccgcgagcagaattctgtggcgcatttgttagcgcagttagttaggactctgttcatacaactgttcgattaagccaaatacctaatttagttttatattggttgttgtcaaagaatttgtgaaatattgaggttgataatatatgtggcgttcgtttttatgtaatcattgttcactaatattttgtcgaatattttatattatatagacattactaagaacgtaaggggtcgctcgtgctctgtaaaggtacaaacaatcatgattgtggaggagcgtga

SEQ ID NO: 200161 - DNA, 3160 bp, Zea Mays
gcctattgccttgcctgccccttccatcctccttccccacccctccttccatcctcgcccgcgcgctccacacgtccccgccgtcgcgctcgccttccatcctcctccccaccccctccttccatcctcgctcgcgcgctccgcatgtccccgccgtcgcgctcgcctccctcctctttgttgcctccgcgtcggcctccaccccgctctccgacacgcttgccgtcgtcttggatttctggtgcactctcttctctacgacgcgagcaagggcggcgcttgccatggcatcgacgggaaccaggcatcactctccctatctcttgggtacgcgtttatttcatctctagggtctagagtttagtagcaccgccgccaacatccccgccgttgcgacaagcaccgaccgctcgcttccccctccctcctctcgtcggcgccaacgagccgcatgccgtgtgtcgtgtgggtcggctacccgggtatcggcgccagcgagccctcgccccccatccccctgccaatctcggcgtcggcgcgccgctcgccatccccgcaggccacgcccatgcccccgcctccatagtccctgtcatcggcgacctcagatccaacaggatggtacaggcaggaggatcaggccaccgtcgaggaacgcgctcttcgctgtgttccagcgagaagatgagggatcgagggcggcgcaggtggcgagctcgtgggcggaacagactggtgagagcaagaggatggatcaggagcttgagccccaggaggggagctgtttgagcggatgcccaccaggaacaatgtttcctagatcacgatgtttgggccacttttggaagaggtcagggatgacatgttttcaagcttggaggacatcaccaacgcaccatatgcagatctgctctctattaattcaatgaggaaaggaaaggggtcatagaaattagtcttggcagatggaggggaacgtctcaatgactgaggcacatttttactaaattatccctaaattatttgtatttttaaaataacatgtaatcttgttgatctggtttactcaagatgcatcaagtttgtacttggagaagaatcctggagttattttacttgtttccttgatttgtagagacatgccagtgaggagcagtttagtcggttcttgctttatgaagtggatgcaattagaaagacgtacgagcgggccaacatctcgcggtggctcgccttgggcaaccggacctgcccgaccacgatgcaggagctctaggacgacgccctcacccccaacgccactctccgacaactcatcgccgcctggttctcccgcctgtttatcttagatattgtttgaacgtatgggatgttggaggacagaagacaatcatgtcttactggagaaattactttgagcagactaatgggttagtttggtttgctgatagttcagacataaggaggcttgatgattgccgtgctgaactccacaatctcttgaaagaagaggataaaggtttacctatctaggcagtgttctattgttgatttttgcaaataagcaagacatgcaaggagctctaaaaccaactggaatcgcgaagattttacttagttcgatgtgggagcaaaaggatatgccaaattgaatgtagtttcatcagttatgctctattatggatgttcagaggcatccaatttcagtgtgtactgcaatacttgggtccacctagtcactctccgacagctcatcgccgcttggttctcctgtcggtacacaaggtttaagaagcgctacgcggacttccacggccgcgctgccgatctcgtccacggcctccggggcacggcgatgcccaggagacaggccctcgaggaagagcaatgtacagaagagaaaggtatctcgactattccaaagcacaagtatgcatccaaagcctgttccccaaaaggtgcgtgaactttgttcttgattttgtcagactaaatgtgggtgaactttgtactgcagtttttgtttaaataaactttggactgtttaaattactgatgcatccaaccactgtttttctttattgtttgttgatacacgaccagatgcccagttgagttcacccaaaaggtttattacaacacgaaaaaatctgagataaaatgttttttatttaaatgaactttgtattgcagtatttatagacatattttggcacccggtcgtttactatttttgttttattaatacctcttgtgtttccctttcacttcctttgtataaactgtatgcctctgttttcattctcaggaacctttatctgcagctctctctgcgcttactcttgttgtgcaatttaatgggtggctatcatttttcctcttgctttattataaacttcctctgcggccagaaactcacaagacatactatgaatacactggcttgtggcacatctatgggctccttgccatgaattcatggttctggagtgccatatatcacagttgtgacacaatttggacagaaaaagctatatttttcatcagatgctgcctttctagggtattccctcattttgacgatagttgattaatcattctggaacttgtactaacaattgaagcaagtggaggcatagcaccaattgtgtctgtgctgcagctctggatgtcagtagacaagaggtgtatcagagagaagcacttcaaggttaatttgttgagcaaattggagatgctggattttgtattttggttgctcatgggtggtgaatgatctgacgacttcagaagaggatagatctgagattacctttcatgcatgtcaaggaagttaagtagctgatgccatcaaagcaatggagaaacgtcaggtgaaccgcgagcagaattctgtggcgcatttgttagcgcagttagttaggactctgttcatacaactgttcgattaagccaaatacctaatttagttttatattggttgttgtcaaagaatttgtgaaatattgaggttgataatatatgtggcgttcgtttttatgtaatcattgttcactaatattttgtcgaatattttatattatatagacattactaagaacgtaaggggtcgctcgtgctctgtaaaggtacaaacaatcatgattgtggaggagcgtga

SEQ ID NO: 200162 - DNA, 2328 bp, Zea Mays
gcctattgccttgcctgccccttccatcctccttccccacccctccttccatcctcgcccgcgcgctccacacgtccccgccgtcgcgctcgccttccatcctcctccccaccccctccttccatcctcgctcgcgcgctccgcatgtccccgccgtcgcgctcgcctccctcctctttgttgcctccgcgtcggcctccaccccgctctccgacacgcttgccgtcgtcttggatttctggtgcactctcttctctacgacgcgagcaagggcggcgcttgccatggcatcgacgggaaccaggatggtacaggcaggaggatcaggccaccgtcgaggaacgcgctcttcgctgtgttccagcgagaagatgagggatcgagggcggcgcaggtggcgagctcgtgggcggaacagactggtgagagcaagaggatggatcaggagcttgagccccaggaggggagctgtttgagcggatgcccaccaggaacaatgtttcctagatcacgatgtttgggccacttttggaagaggtcagggatgacatgttttcaagcttggaggacatcaccaacgcaccatatgcagatctgctctctattaattcaatgaggaaaggaaaggggtcatagaaattagtcttggcagatggaggggaacgtctcaatgactgagagacatgccagtgaggagcagtttagtcggttcttgctttatgaagtggatgcaattagaaagacgtacgagcgggccaacatctcgcggtggctcgccttgggcaaccggacctgcccgaccacgatgcaggagctctaggacgacgccctcacccccaacgccactctccgacaactcatcgccgcctggttctcccgcctgtttatcttagatattgtttgaacgtatgggatgttggaggacagaagacaatcatgtcttactggagaaattactttgagcagactaatgggttagtttggtttgctgatagttcagacataaggaggcttgatgattgccgtgctgaactccacaatctcttgaaagaagaggataaaggtttacctatctaggcagtgttctattgttgatttttgcaaataagcaagacatgcaaggagctctaaaaccaactggaatcgcgaagattttacttagttcgatgtgggagcaaaaggatatgccaaattgaatgtagtttcatcagttatgctctattatggatgttcagaggcatccaatttcagtgtgtactgcaatacttgggtccacctagtcactctccgacagctcatcgccgcttggttctcctgtcggtacacaaggtttaagaagcgctacgcggacttccacggccgcgctgccgatctcgtccacggcctccggggcacggcgatgcccaggagacaggccctcgaggaagagcaatgtacagaagagaaaggtatctcgactattccaaagcacaagtatgcatccaaagcctgttccccaaaaggaacctttatctgcagctctctctgcgcttactcttgttgtgcaatttaatgggtggctatcatttttcctcttgctttattataaacttcctctgcggccagaaactcacaagacatactatgaatacactggcttgtggcacatctatgggctccttgccatgaattcatggttctggagtgccatatatcacagttgtgacacaatttggacagaaaaagctatatttttcatcagatgctgcctttctaggattaatcattctggaacttgtactaacaattgaagcaagtggaggcatagcaccaattgtgtctgtgctgcagctctggatgtcagtagacaagaggtgtatcagagagaagcacttcaaggttaatttgttgagcaaattggagatgctggattttgtattttggttgctcatgggtggtgaatgatctgacgacttcagaagaggatagatctgagattacctttcatgcatgtcaaggaagttaagtagctgatgccatcaaagcaatggagaaacgtcaggtgaaccgcgagcagaattctgtggcgcatttgttagcgcagttagttaggactctgttcatacaactgttcgattaagccaaatacctaatttagttttatattggttgttgtcaaagaatttgtgaaatattgaggttgataatatatgtggcgttcgtttttatgtaatcattgttcactaatattttgtcgaatattttatattatatagacattactaagaacgtaaggggtcgctcgtgctctgtaaaggtacaaacaatcatgattgtggaggagcgtga

SEQ ID NO: 200163 - DNA, 2847 bp, Zea Mays
gcctattgccttgcctgccccttccatcctccttccccacccctccttccatcctcgcccgcgcgctccacacgtccccgccgtcgcgctcgccttccatcctcctccccaccccctccttccatcctcgctcgcgcgctccgcatgtccccgccgtcgcgctcgcctccctcctctttgttgcctccgcgtcggcctccaccccgctctccgacacgcttgccgtcgtcttggatttctggtgcactctcttctctacgacgcgagcaagggcggcgcttgccatggcatcgacgggaaccaggatggtacaggcaggaggatcaggccaccgtcgaggaacgcgctcttcgctgtgttccagcgagaagatgagggatcgagggcggcgcaggtggcgagctcgtgggcggaacagactggtgagagcaagaggatggatcaggagcttgagccccaggaggggagctgtttgagcggatgcccaccaggaacaatgtttcctagatcacgatgtttgggccacttttggaagaggtcagggatgacatgttttcaagcttggaggacatcaccaacgcaccatatgcagatctgctctctattaattcaatgaggaaaggaaaggggtcatagaaattagtcttggcagatggaggggaacgtctcaatgactgaggcacatttttactaaattatccctaaattatttgtatttttaaaataacatgtaatcttgttgatctggtttactcaagatgcatcaagtttgtacttggagaagaatcctggagttattttacttgtttccttgatttgtagagacatgccagtgaggagcagtttagtcggttcttgctttatgaagtggatgcaattagaaagacgtacgagcgggccaacatctcgcggtggctcgccttgggcaaccggacctgcccgaccacgatgcaggagctctaggacgacgccctcacccccaacgccactctccgacaactcatcgccgcctggttctcccgcctgtttatcttagatattgtttgaacgtatgggatgttggaggacagaagacaatcatgtcttactggagaaattactttgagcagactaatgggttagtttggtttgctgatagttcagacataaggaggcttgatgattgccgtgctgaactccacaatctcttgaaagaagaggataaaggtttacctatctaggcagtgttctattgttgatttttgcaaataagcaagacatgcaaggagctctaaaaccaactggaatcgcgaagattttacttagttcgatgtgggagcaaaaggatatgccaaattgaatgtagtttcatcagttatgctctattatggatgttcagaggcatccaatttcagtgtgtactgcaatacttgggtccacctagtcactctccgacagctcatcgccgcttggttctcctgtcggtacacaaggtttaagaagcgctacgcggacttccacggccgcgctgccgatctcgtccacggcctccggggcacggcgatgcccaggagacaggccctcgaggaagagcaatgtacagaagagaaaggtatctcgactattccaaagcacaagtatgcatccaaagcctgttccccaaaaggtgcgtgaactttgttcttgattttgtcagactaaatgtgggtgaactttgtactgcagtttttgtttaaataaactttggactgtttaaattactgatgcatccaaccactgtttttctttattgtttgttgatacacgaccagatgcccagttgagttcacccaaaaggtttattacaacacgaaaaaatctgagataaaatgttttttatttaaatgaactttgtattgcagtatttatagacatattttggcacccggtcgtttactatttttgttttattaatacctcttgtgtttccctttcacttcctttgtataaactgtatgcctctgttttcattctcaggaacctttatctgcagctctctctgcgcttactcttgttgtgcaatttaatgggtggctatcatttttcctcttgctttattataaacttcctctgcggccagaaactcacaagacatactatgaatacactggcttgtggcacatctatgggctccttgccatgaattcatggttctggagtgccatatatcacagttgtgacacaatttggacagaaaaagctatatttttcatcagatgctgcctttctagggtattccctcattttgacgatagttgattaatcattctggaacttgtactaacaattgaagcaagtggaggcatagcaccaattgtgtctgtgctgcagctctggatgtcagtagacaagaggtgtatcagagagaagcacttcaaggttaatttgttgagcaaattggagatgctggattttgtattttggttgctcatgggtggtgaatgatctgacgacttcagaagaggatagatctgagattacctttcatgcatgtcaaggaagttaagtagctgatgccatcaaagcaatggagaaacgtcaggtgaaccgcgagcagaattctgtggcgcatttgttagcgcagttagttaggactctgttcatacaactgttcgattaagccaaatacctaatttagttttatattggttgttgtcaaagaatttgtgaaatattgaggttgataatatatgtggcgttcgtttttatgtaatcattgttcactaatattttgtcgaatattttatattatatagacattactaagaacgtaaggggtcgctcgtgctctgtaaaggtacaaacaatcatgattgtggaggagcgtga

SEQ ID NO: 200164 - DNA, 2340 bp, Zea Mays
gcctattgccttgcctgccccttccatcctccttccccacccctccttccatcctcgcccgcgcgctccacacgtccccgccgtcgcgctcgccttccatcctcctccccaccccctccttccatcctcgctcgcgcgctccgcatgtccccgccgtcgcgctcgcctccctcctctttgttgcctccgcgtcggcctccaccccgctctccgacacgcttgccgtcgtcttggatttctggtgcactctcttctctacgacgcgagcaagggcggcgcttgccatggcatcgacgggaaccaggatggtacaggcaggaggatcaggccaccgtcgaggaacgcgctcttcgctgtgttccagcgagaagatgagggatcgagggcggcgcaggtggcgagctcgtgggcggaacagactggtgagagcaagaggatggatcaggagcttgagccccaggaggggagctgtttgagcggatgcccaccaggaacaatgtttcctagatcacgatgtttgggccacttttggaagaggtcagggatgacatgttttcaagcttggaggacatcaccaacgcaccatatgcagatctgctctctattaattcaatgaggaaaggaaaggggtcatagaaattagtcttggcagatggaggggaacgtctcaatgactgagagacatgccagtgaggagcagtttagtcggttcttgctttatgaagtggatgcaattagaaagacgtacgagcgggccaacatctcgcggtggctcgccttgggcaaccggacctgcccgaccacgatgcaggagctctaggacgacgccctcacccccaacgccactctccgacaactcatcgccgcctggttctcccgcctggtttctgcattttgttttcttatctgtcaatcatgtttttccatattactgcaggtgggtctgattaattatttaaatgtagtttatcttagatattgtttgaacgtatgggatgttggaggacagaagacaatcatgtcttactggagaaattactttgagcagactaatgggttagtttggtttgctgatagttcagacataaggaggcttgatgattgccgtgctgaactccacaatctcttgaaagaagaggataaaggtttacctatctaggcagtgttctattgttgatttttgcaaataagcaagacatgcaaggagctctaaaaccaactggaatcgcgaagattttacttagttcgatgtgggagcaaaaggatatgccaaattgaatgtagtttcatcagttatgctctattatggatgttcagaggcatccaatttcagtgtgtactgcaatacttgggtccacctagtcactctccgacagctcatcgccgcttggttctcctgtcggtacacaaggtttaagaagcgctacgcggacttccacggccgcgctgccgatctcgtccacggcctccggggcacggcgatgcccaggagacaggccctcgaggaagagcaatgtacagaagagaaaggtatctcgactattccaaagcacaagtatgcatccaaagcctgttccccaaaaggaacctttatctgcagctctctctgcgcttactcttgttgtgcaatttaatgggtggctatcatttttcctcttgctttattataaacttcctctgcggccagaaactcacaagacatactatgaatacactggcttgtggcacatctatgggctccttgccatgaattcatggttctggagtgccatatatcacagttgtgacacaatttggacagaaaaagctatatttttcatcagatgctgcctttctagggtattccctcattttgacgatagttggtgtatcagagagaagcacttcaaggttaatttgttgagcaaattggagatgctggattttgtattttggttgctcatgggtggtgaatgatctgacgacttcagaagaggatagatctgagattacctttcatgcatgtcaaggaagttaagtagctgatgccatcaaagcaatggagaaacgtcaggtgaaccgcgagcagaattctgtggcgcatttgttagcgcagttagttaggactctgttcatacaactgttcgattaagccaaatacctaatttagttttatattggttgttgtcaaagaatttgtgaaatattgaggttgataatatatgtggcgttcgtttttatgtaatcattgttcactaatattttgtcgaatattttatattatatagacattactaagaacgtaaggggtcgctcgtgctctgtaaaggtacaaacaatcatgattgtggaggagcgtga

SEQ ID NO: 200165 - DNA, 2628 bp, Zea Mays
gcctattgccttgcctgccccttccatcctccttccccacccctccttccatcctcgcccgcgcgctccacacgtccccgccgtcgcgctcgccttccatcctcctccccaccccctccttccatcctcgctcgcgcgctccgcatgtccccgccgtcgcgctcgcctccctcctctttgttgcctccgcgtcggcctccaccccgctctccgacacgcttgccgtcgtcttggatttctggtgcactctcttctctacgacgcgagcaagggcggcgcttgccatggcatcgacgggaaccaggcatcactctccctatctcttgggtacgcgtttatttcatctctagggtctagagtttagtagcaccgccgccaacatccccgccgttgcgacaagcaccgaccgctcgcttccccctccctcctctcgtcggcgccaacgagccgcatgccgtgtgtcgtgtgggtcggctacccgggtatcggcgccagcgagccctcgccccccatccccctgccaatctcggcgtcggcgcgccgctcgccatccccgcaggccacgcccatgcccccgcctccatagtccctgtcatcggcgacctcagatccaacaggatggtacaggcaggaggatcaggccaccgtcgaggaacgcgctcttcgctgtgttccagcgagaagatgagggatcgagggcggcgcaggtggcgagctcgtgggcggaacagactggtgagagcaagaggatggatcaggagcttgagccccaggaggggagctgtttgagcggatgcccaccaggaacaatgtttcctagatcacgatgtttgggccacttttggaagaggtcagggatgacatgttttcaagcttggaggacatcaccaacgcaccatatgcagatctgctctctattaattcaatgaggaaaggaaaggggtcatagaaattagtcttggcagatggaggggaacgtctcaatgactgagagacatgccagtgaggagcagtttagtcggttcttgctttatgaagtggatgcaattagaaagacgtacgagcgggccaacatctcgcggtggctcgccttgggcaaccggacctgcccgaccacgatgcaggagctctaggacgacgccctcacccccaacgccactctccgacaactcatcgccgcctgtttatcttagatattgtttgaacgtatgggatgttggaggacagaagacaatcatgtcttactggagaaattactttgagcagactaatgggttagtttggtttgctgatagttcagacataaggaggcttgatgattgccgtgctgaactccacaatctcttgaaagaagaggataaaggtttacctatctaggcagtgttctattgttgatttttgcaaataagcaagacatgcaaggagctctaaaaccaactggaatcgcgaagattttacttagttcgatgtgggagcaaaaggatatgccaaattgaatgtagtttcatcagttatgctctattatggatgttcagaggcatccaatttcagtgtgtactgcaatacttgggtccacctagtcactctccgacagctcatcgccgcttggttctcctgtcggtacacaaggtttaagaagcgctacgcggacttccacggccgcgctgccgatctcgtccacggcctccggggcacggcgatgcccaggagacaggccctcgaggaagagcaatgtacagaagagaaaggtatctcgactattccaaagcacaagtatgcatccaaagcctgttccccaaaaggaacctttatctgcagctctctctgcgcttactcttgttgtgcaatttaatgggtggctatcatttttcctcttgctttattataaacttcctctgcggccagaaactcacaagacatactatgaatacactggcttgtggcacatctatgggctccttgccatgaattcatggttctggagtgccatatatcacagttgtgacacaatttggacagaaaaagctatatttttcatcagatgctgcctttctaggattaatcattctggaacttgtactaacaattgaagcaagtggaggcatagcaccaattgtgtctgtgctgcagctctggatgtcagtagacaagaggtgtatcagagagaagcacttcaaggttaatttgttgagcaaattggagatgctggattttgtattttggttgctcatgggtggtgaatgatctgacgacttcagaagaggatagatctgagattacctttcatgcatgtcaaggaagttaagtagctgatgccatcaaagcaatggagaaacgtcaggtgaaccgcgagcagaattctgtggcgcatttgttagcgcagttagttaggactctgttcatacaactgttcgattaagccaaatacctaatttagttttatattggttgttgtcaaagaatttgtgaaatattgaggttgataatatatgtggcgttcgtttttatgtaatcattgttcactaatattttgtcgaatattttatattatatagacattactaagaacgtaaggggtcgctcgtgctctgtaaaggtacaaacaatcatgattgtggaggagcgtga

SEQ ID NO: 200166 - DNA, 2459 bp, Zea Mays
gcctattgccttgcctgccccttccatcctccttccccacccctccttccatcctcgcccgcgcgctccacacgtccccgccgtcgcgctcgccttccatcctcctccccaccccctccttccatcctcgctcgcgcgctccgcatgtccccgccgtcgcgctcgcctccctcctctttgttgcctccgcgtcggcctccaccccgctctccgacacgcttgccgtcgtcttggatttctggtgcactctcttctctacgacgcgagcaagggcggcgcttgccatggcatcgacgggaaccaggcatcactctccctatctcttgggatggtacaggcaggaggatcaggccaccgtcgaggaacgcgctcttcgctgtgttccagcgagaagatgagggatcgagggcggcgcaggtggcgagctcgtgggcggaacagactggtgagagcaagaggatggatcaggagcttgagccccaggaggggagctgtttgagcggatgcccaccaggaacaatgtttcctagatcacgatgtttgggccacttttggaagaggtcagggatgacatgttttcaagcttggaggacatcaccaacgcaccatatgcagatctgctctctattaattcaatgaggaaaggaaaggggtcatagaaattagtcttggcagatggaggggaacgtctcaatgactgagagacatgccagtgaggagcagtttagtcggttcttgctttatgaagtggatgcaattagaaagacgtacgagcgggccaacatctcgcggtggctcgccttgggcaaccggacctgcccgaccacgatgcaggagctctaggacgacgccctcacccccaacgccactctccgacaactcatcgccgcctggttctcccgcctggtttctgcattttgttttcttatctgtcaatcatgtttttccatattactgcaggtgggtctgattaattatttaaatgtagtttatcttagatattgtttgaacgtatgggatgttggaggacagaagacaatcatgtcttactggagaaattactttgagcagactaatgggttagtttggtttgctgatagttcagacataaggaggcttgatgattgccgtgctgaactccacaatctcttgaaagaagaggataaaggtttacctatctaggcagtgttctattgttgatttttgcaaataagcaagacatgcaaggagctctaaaaccaactggaatcgcgaagattttacttagttcgatgtgggagcaaaaggatatgccaaattgaatgtagtttcatcagttatgctctattatggatgttcagaggcatccaatttcagtgtgtactgcaatacttgggtccacctagtcactctccgacagctcatcgccgcttggttctcctgtcggtacacaaggtttaagaagcgctacgcggacttccacggccgcgctgccgatctcgtccacggcctccggggcacggcgatgcccaggagacaggccctcgaggaagagcaatgtacagaagagaaaggtatctcgactattccaaagcacaagtatgcatccaaagcctgttccccaaaaggaacctttatctgcagctctctctgcgcttactcttgttgtgcaatttaatgggtggctatcatttttcctcttgctttattataaacttcctctgcggccagaaactcacaagacatactatgaatacactggcttgtggcacatctatgggctccttgccatgaattcatggttctggagtgccatatatcacagttgtgacacaatttggacagaaaaagctatatttttcatcagatgctgcctttctagggtattccctcattttgacgatagttgattaatcattctggaacttgtactaacaattgaagcaagtggaggcatagcaccaattgtgtctgtgctgcagctctggatgtcagtagacaagaggtgtatcagagagaagcacttcaaggttaatttgttgagcaaattggagatgctggattttgtattttggttgctcatgggtggtgaatgatctgacgacttcagaagaggatagatctgagattacctttcatgcatgtcaaggaagttaagtagctgatgccatcaaagcaatggagaaacgtcaggtgaaccgcgagcagaattctgtggcgcatttgttagcgcagttagttaggactctgttcatacaactgttcgattaagccaaatacctaatttagttttatattggttgttgtcaaagaatttgtgaaatattgaggttgataatatatgtggcgttcgtttttatgtaatcattgttcactaatattttgtcgaatattttatattatatagacattactaagaacgtaaggggtcgctcgtgctctgtaaaggtacaaacaatcatgattgtggaggagcgtga

SEQ ID NO: 200167 - DNA, 2588 bp, Zea Mays
gcctattgccttgcctgccccttccatcctccttccccacccctccttccatcctcgcccgcgcgctccacacgtccccgccgtcgcgctcgccttccatcctcctccccaccccctccttccatcctcgctcgcgcgctccgcatgtccccgccgtcgcgctcgcctccctcctctttgttgcctccgcgtcggcctccaccccgctctccgacacgcttgccgtcgtcttggatttctggtgcactctcttctctacgacgcgagcaagggcggcgcttgccatggcatcgacgggaaccaggatggtacaggcaggaggatcaggccaccgtcgaggaacgcgctcttcgctgtgttccagcgagaagatgagggatcgagggcggcgcaggtggcgagctcgtgggcggaacagactggtgagagcaagaggatggatcaggagcttgagccccaggaggggagctgtttgagcggatgcccaccaggaacaatgtttcctagatcacgatgtttgggccacttttggaagaggtcagggatgacatgttttcaagcttggaggacatcaccaacgcaccatatgcagatctgctctctattaattcaatgaggaaaggaaaggggtcatagaaattagtcttggcagatggaggggaacgtctcaatgactgaggcacatttttactaaattatccctaaattatttgtatttttaaaataacatgtaatcttgttgatctggtttactcaagatgcatcaagtttgtacttggagaagaatcctggagttattttacttgtttccttgatttgtagagacatgccagtgaggagcagtttagtcggttcttgctttatgaagtggatgcaattagaaagacgtacgagcgggccaacatctcgcggtggctcgccttgggcaaccggacctgcccgaccacgatgcaggagctctaggacgacgccctcacccccaacgccactctccgacaactcatcgccgcctgtttatcttagatattgtttgaacgtatgggatgttggaggacagaagacaatcatgtcttactggagaaattactttgagcagactaatgggttagtttggtttgctgatagttcagacataaggaggcttgatgattgccgtgctgaactccacaatctcttgaaagaagaggtttacctatctaggcagtgttctattgttgatttttgcaaataagcaagacatgcaaggagctctaaaaccaactggaatcgcgaagattttacttagttcgatgtgggagcaaaaggatatgccaaattgaatgtagtttcatcagttatgctctattatggatgttcagaggcatccaatttcagtgtgtactgcaatacttgggtccacctgtttaagaagcgctacgcggacttccacggccgcgctgccgatctcgtccacggcctccggggcacggcgatgcccaggagacaggccctcgaggaagagcaatgtacagaagagaaaggtatctcgactattccaaagcacaagtatgcatccaaagcctgttccccaaaaggaacctttatctgcagctctctctgcgcttactcttgttgtgcaatttaatgggtggctatcatttttcctcttgctttattataaacttcctctgcggccagaaactcacaagacatactatgaatacactggcttgtggcacatctatgggctccttgccatgaattcatggttctggagtgccatatatcacagttgtgacacaatttggacagaaaaagctatatttttcatcagatgctgcctttctagggtattccctcattttgacgatagttggtgagcatgtagtagcaagtttcatgggctctggtagattaactgacctttgtgtgttccattagcctgtgaagttcgaaactggtcatattgctaagaattctaggaggttactattagggcctagagtaaatgactacgtgctgatgaaaatctgttcagattaatcattctggaacttgtactaacaattgaagcaagtggaggcatagcaccaattgtgtctgtgctgcagctctggatgtcagtagacaagaggtgtatcagagagaagcacttcaaggttaatttgttgagcaaattggagatgctggattttgtattttggttgctcatgggtggtgaatgatctgacgacttcagaagaggatagatctgagattacctttcatgcatgtcaaggaagttaagtagctgatgccatcaaagcaatggagaaacgtcaggtgaaccgcgagcagaattctgtggcgcatttgttagcgcagttagttaggactctgttcatacaactgttcgattaagccaaatacctaatttagttttatattggttgttgtcaaagaatttgtgaaatattgaggttgataatatatgtggcgttcgtttttatgtaatcattgttcactaatattttgtcgaatattttatattatatagacattactaagaacgtaaggggtcgctcgtgctctgtaaaggtacaaacaatcatgattgtggaggagcgtga

SEQ ID NO: 200168 - DNA, 2264 bp, Zea Mays
gcctattgccttgcctgccccttccatcctccttccccacccctccttccatcctcgcccgcgcgctccacacgtccccgccgtcgcgctcgccttccatcctcctccccaccccctccttccatcctcgctcgcgcgctccgcatgtccccgccgtcgcgctcgcctccctcctctttgttgcctccgcgtcggcctccaccccgctctccgacacgcttgccgtcgtcttggatttctggtgcactctcttctctacgacgcgagcaagggcggcgcttgccatggcatcgacgggaaccaggatggtacaggcaggaggatcaggccaccgtcgaggaacgcgctcttcgctgtgttccagcgagaagatgagggatcgagggcggcgcaggtggcgagctcgtgggcggaacagactggtgagagcaagaggatggatcaggagcttgagccccaggaggggagctgtttgagcggatgcccaccaggaacaatgtttcctagatcacgatgtttgggccacttttggaagaggtcagggatgacatgttttcaagcttggaggacatcaccaacgcaccatatgcagatctgctctctattaattcaatgaggaaaggaaaggggtcatagaaattagtcttggcagatggaggggaacgtctcaatgactgagagacatgccagtgaggagcagtttagtcggttcttgctttatgaagtggatgcaattagaaagacgtacgagcgggccaacatctcgcggtggctcgccttgggcaaccggacctgcccgaccacgatgcaggagctctaggacgacgccctcacccccaacgccactctccgacaactcatcgccgcctgtttatcttagatattgtttgaacgtatgggatgttggaggacagaagacaatcatgtcttactggagaaattactttgagcagactaatgggttagtttggtttgctgatagttcagacataaggaggcttgatgattgccgtgctgaactccacaatctcttgaaagaagaggataaaggtttacctatctaggcagtgttctattgttgatttttgcaaataagcaagacatgcaaggagctctaaaaccaactggaatcgcgaagattttacttagttcgatgtgggagcaaaaggatatgccaaattgaatgtagtttcatcagttatgctctattatggatgttcagaggcatccaatttcagtgtgtactgcaatacttgggtccacctgtttaagaagcgctacgcggacttccacggccgcgctgccgatctcgtccacggcctccggggcacggcgatgcccaggagacaggccctcgaggaagagcaatgtacagaagagaaaggtatctcgactattccaaagcacaagtatgcatccaaagcctgttccccaaaaggaacctttatctgcagctctctctgcgcttactcttgttgtgcaatttaatgggtggctatcatttttcctcttgctttattataaacttcctctgcggccagaaactcacaagacatactatgaatacactggcttgtggcacatctatgggctccttgccatgaattcatggttctggagtgccatatatcacagttgtgacacaatttggacagaaaaagctatatttttcatcagatgctgcctttctaggattaatcattctggaacttgtactaacaattgaagcaagtggaggcatagcaccaattgtgtctgtgctgcagctctggatgtcagtagacaagaggtgtatcagagagaagcacttcaaggttaatttgttgagcaaattggagatgctggattttgtattttggttgctcatgggtggtgaatgatctgacgacttcagaagaggatagatctgagattacctttcatgcatgtcaaggaagttaagtagctgatgccatcaaagcaatggagaaacgtcaggtgaaccgcgagcagaattctgtggcgcatttgttagcgcagttagttaggactctgttcatacaactgttcgattaagccaaatacctaatttagttttatattggttgttgtcaaagaatttgtgaaatattgaggttgataatatatgtggcgttcgtttttatgtaatcattgttcactaatattttgtcgaatattttatattatatagacattactaagaacgtaaggggtcgctcgtgctctgtaaaggtacaaacaatcatgattgtggaggagcgtga

SEQ ID NO: 200169 - DNA, 3211 bp, Zea Mays
accacgctccggtcagcctcgcctcctttctccgtctcattcccccaatcccacgccagtcccgcaggaatccccacccaaattcccgtctccccgatcgccgcccttctcggtgcccgtaaaccctacccccggagtcgcccgtgcgctgtcgtgcccgcgttgccaccgtcggtggtccgcggcgcccgtaaccaaaacctaaccgcagcctgcagatcccgattccgcagggaggcgggagaggtgaaggccgcctcgccgcagatggagcccgcgggcgcgcgcaaggagtggcgcgccgtccccggctcctcgctccgctccaatggcgccgaggatgccgcggagcacgggaagctggggcagtcggaggaccgagctatctacgaggaaggggcgggtggactggaggacttctgcgccatcaccattgatgggagcggagggctcagcgaggacatcctgcagcagcgcctgcagagcgttgtgcggcaaagggagcagctgcagcaggtcgagatggagctgcgtgcgcaggccattgcacacccgcagatcattcaggcgcaacaaagcttccaggctacttccaaggaacatgccgcagctgtggccaagatcaagcaggagcaactgcatgagcgggagcaatacattcttgaactagaaatgaaactcaatgacaaggatagagaactaaatgctctgaagattgatcatcaaacggtgtgggcaaatcaagatcttattagagaacagaccaaagagctggcaactgtcagaagggaacgcgacaactctgaagctgaaagagcccaacatcttacacaaattcatgagctccaagaacatctgcgagaaaaagaaagccagttcattgcattagaggaacagcatagggctgctcaagacaacattctttacaaagatgagcagttgagggaagcccatgcttgggtatctcaagttcgagaaatggatgctttgcagtctcaatccctacaagttgagttacgtgagcgcatggagcaatttaatcaatattggattagctcccagcagcagtatgctgaaatgcagcggagtcttctccatacaatacaacaactccagcaagaattaactgaggcaagggaacagtctggtgcacaaaaagatggtccacaagtttctcgggaagggtcagctgaatcatcactagttcaaagcatgggaaacagcgtggcttcaaatggtagtgcaactgcagatgggaaccagcaattgttgaaaaataatggaagcgtggatgtctctgttcaggccaatagtgcctcagctgtacctgttccttcttccctactgggaatcggtggtccggctgcgcatatcgctgcgatgcatgcttttatgattcatcctcaaggcattcctcaacccttagtagcatcacccaactctggtgttcctcaatttggcagttttcagtctcagtctacaattcaaccaaattcacaatggccaaatcagcaggaagtacaaaatgtctcacaaccacaagatgaaacaaactatcagacatcccaatcagaccggactgttttacaacaaggcgctattaatactgatgagttgtcctcaaagccaagccaggatagtcagccagaccatcttaatgcccatgtgaaacaacagcagagccctgttgttgaagcgaatgtagctgaacatgtatcttgtgacgaacaacaaaaaatcttaaacgaacaggattcactgtcaaatatgaacaaccatattggaatagttgagcatctagagcaaaataccgaatccaaggtttctatggtactgcgtttcttatatagttcttcattccatgagtgtctcacatttacttctctttttaaaaccaggatgaaagagctgcatctgataagcaacctgaacctgtatctaggcagcataaacatttgaactttcctccgttcactacccagattcacttgaaaaagagtgcaacagagaatcctaatgttgtaaatcaggttgatataatgaaatcagttgcaggtggttttagttcgcagttacctcgtgcaccaaaggaaccttctctcctagatgagagatctctattggcttgcattgtacgtgcagttcctgctgggactgagggtggaatcaggataagttcaactctgccaaataggcttgggaaaatgttggctccccttcactggcatgactataagaagcaatacgggaagctcgacgattttgtggctagtcatccagagctgtttgtgattgagggagacttcattcaccttcgtgatggagcacagcagattatttctgccactacagctgctgcaaaaatagctgctgcgacagcatcttctgcctcttactcatccttactgccttctgttgccgttactcctgtggcacaaaatactcggcaaaagaggaggcccgcagttgattccagatcatcaaatgcaattccctctggaaacggcttcacagatcaatttaacatcattcagggtgtcagcgacgtaacaatttcaggcaaagtaagaaatatccaagataatggcttcatagatgaagttcgcactgggcagccatccgtgctcacagctgctactgccaacggagcaagacatgacaaatgtgcaaataataccagacatggttatggtggaaaacaacaggggaggcgatgatgctgttggaattggaaaccatgcgagtggcgatgatgcggttggggaaaccatacgagtgacgatgctttggcttcgaaatgatggtgaagatgacctggattaaagttattctagattcattttttattttgcactattggtcttcacagagcctgtatggttgggggccttgttttggcaaagctgtactgatatatccctaccccaagaatcagaagcctgccaaagttttgcgactatgtacctcgtctgcgcttgtgtattgtggtgcacttgaatgatgcgaatgttatatcgaatccccgtccttgatcgtgatgttcttgaacgttcacctctgggaaattaactcgcatggtgagctgagctcgtgatcggtggcatggtcgatccaaggtcgggtgtcattgttgtatggtcgagctggacatgtaggctctgttactatttaggtaactatttagaccttattccaaaaagttagtagagat

SEQ ID NO: 200170 - DNA, 2213 bp, Zea Mays
gacaaaatatcgattttttccacccccacaggccacacccaacccaacccagagcccgaactcttcacgtcgcgtcggccggcaattggcattcccactgcgccgccgtcggatcgactgggtcctcgccgccgatgggcttcttccgccggatcgccggcttcctaggcatctcgcgggacgacgccgaccacccggactccccgacctccgtcggcggcgccgcggcggcggcggaactccctcatgacagggcggcggcgcacggggtgaggcaggggttcagcgtcaaggttcctgtccatgtcgagcggcaggtgttggtgtttcggttgcaatagagtgattggggaaactgatcagccagaattgttggtcaaccgatgggaagcaatgaccctaacacaccctcgaaggcttcaaaggcgtcagaacaactaccaccacatccagtggaacagcttcagtgtaccctgaatggcccagctttcaggcctactcagcaattccaccgcatgcgttcttcccccctaccgttgctgcaaatccacaggcccatccatacatgtggggggctcaggtgcttcctatatctgaaactttgcccccagggcccccctctgttctctgctacaactgttaacgttgatctgtattatgtgttatatattgcgagaacatgtgatttttcatatgtgatcgaaagcaatgtccttcgattgcagcccatagtgccaccttacgggacaccgccaccaccaccttatgtgatgtatccacctggaacagtatatgcccatccctctacacctcctgtatgcactttttatgcctaacaaatttgacctacatgctagctaatgtacacacacacacccttttatccttgtttggctgacatatttttttgcatggtgagtaaattactggcaggccatgcatccatttggccattatcctatgccaacaaatgggcatgctgaaactcatggagctgcgccaagcgctccggaaatgaatgggaaaagcgagcctggcagaacgtctgctccatccgccaacgggattacctcgcacagtgagagtggaagcgagagtgagagcgaaggaagtgacgacaattctcaaaacgattcacactcaaaggacaatgatgggaaggaagatggcaattctcagaacggcatgtcttattcaggatcgcaaggagtggtaaaccaaaccatggcgatgcttccaatgcaaccgggtgcaatggtcggaggagttcctagctccacggcagctaacctgaatatcggagtggactactgggcagctccgggttctgcggctgtccccgcagcgcacggcaaagcgccagctggttcagctcgaggagaccaatgggatgaaagggagctcaagaagcagaagcggaagcagtcaaacagagagtccgctcgcagatcccggctgcgcaaacaggctgagtgtgaggagcttgggcaacgtgctgaggctctgaggtcggagaactcgtcgctgagggccgagctcgagcggatcagaaaggagtacgaacagctactttcacagaacgcttccctaaaggaaaagctgggggctgccagtagtgattcgcttcctgatatgaacgaacagaacgacggcgacggagacggcggctacaggaagcagcctgattccgatggccaccagcctgggagcgagtcctgacccgtttttagctcaggattcttttggaatgcacattgcttatatattcattctcttgaacgttgtggaacgcagcataggaaggaaatccaactttaattagaatcgattcgctgtcatccctcatgcatggccggagaggggagagggttctcttcttccttggatgttggatacaccgacagtcacgtgcatggcaagagcagaagctagcagctgcggcgactcagggcagcgagcgtttgactggctggggtgcttgctgatatgctcaacacatgaagcagcagcagcctggagcgccagacattcctgactgagtgactgctcatcacgaccagagccaaatccaaatggaataaaaaaaacacacacacactacgtgcagcaatatcagctctccttttctttgtccatgaaaggaaaaacaacgtcacgggaacaattgcggtcagcttttctggaccgtccaccatgccttcatttcaaattcg

SEQ ID NO: 200171 - DNA, 1790 bp, Zea Mays
atcttcctcctcctcccctactctgacctctcgtcgtcgacgaaggaaggattccgcccccgccccggccgccttcgccctcgccgctgcattttccggtggcctctccacgaagccttacacctgttctgttcaagacggcaggtgttggtgtttcggttgcaatagagtgattggggaaactgatcagccagaattgttggtcaaccgatgggaagcaatgaccctaacacaccctcgaaggcttcaaaggcgtcagaacaagatcaacctccagctaccaccacatccagtggaacagcttcagtgtaccctgaatggcccagctttcaggcctactcagcaattccaccgcatgcgttcttcccccctaccgttgctgcaaatccacaggcccatccatacatgtggggggctcagcccatagtgccaccttacgggacaccgccaccaccaccttatgtgatgtatccacctggaacagtatatgcccatccctctacacctcctgccatgcatccatttggccattatcctatgccaacaaatgggcatgctgaaactcatggagctgcgccaagcgctccggaaatgaatgggaaaagcgagcctggcagaacgtctgctccatccgccaacgggattacctcgcacagtgagagtggaagcgagagtgagagcgaaggaagtgacgacaattctcaaaacgattcacactcaaaggacaatgatgggaaggaagatggcaattctcagaacggcatgtcttattcaggatcgcaaggagtggtaaaccaaaccatggcgatgcttccaatgcaaccgggtgcaatggtcggaggagttcctagctccacggcagctaacctgaatatcggagtggactactgggcagctccgggttctgcggctgtccccgcagcgcacggcaaagcgccagctggttcagctcgaggagaccaatgggatgaaagggagctcaagaagcagaagcggaagcagtcaaacagagagtccgctcgcagatcccggctgcgcaaacaggctgagtgtgaggagcttgggcaacgtgctgaggctctgaggtcggagaactcgtcgctgagggccgagctcgagcggatcagaaaggagtacgaacagctactttcacagaacgcttccctaaaggaaaagctgggggctgccagtagtgattcgcttcctgatatgaacgaacagaacgacggcgacggagacggcggctacaggaagcagcctgattccgatggccaccagcctgggagcgagtcctgacccgtttttagctcaggattcttttggaatgcacattgcttatatattcattctcttgaacgttgtggaacgcagcataggaaggaaatccaactttaattagaatcgattcgctgtcatccctcatgcatggccggagaggggagagggttctcttcttccttggatgttggatacaccgacagtcacgtgcatggcaagagcagaagctagcagctgcggcgactcagggcagcgagcgtttgactggctggggtgcttgctgatatgctcaacacatgaagcagcagcagcctggagcgccagacattcctgactgagtgactgctcatcacgaccagagccaaatccaaatggaataaaaaaaacacacacacactacgtgcagcaatatcagctctccttttctttgtccatgaaaggaaaaacaacgtcacgggaacaattgcggtcagcttttctggaccgtccaccatgccttcatttcaaattcg

SEQ ID NO: 200172 - DNA, 1757 bp, Zea Mays
atcttcctcctcctcccctactctgacctctcgtcgtcgacgaaggaaggattccgcccccgccccggccgccttcgccctcgccgctgcattttccggtggcctctccacgtgttggtgtttcggttgcaatagagtgattggggaaactgatcagccagaattgttggtcaaccgatgggaagcaatgaccctaacacaccctcgaaggcttcaaaggcgtcagaacaagatcaacctccagctaccaccacatccagtggaacagcttcagtgtaccctgaatggcccagctttcaggcctactcagcaattccaccgcatgcgttcttcccccctaccgttgctgcaaatccacaggcccatccatacatgtggggggctcagcccatagtgccaccttacgggacaccgccaccaccaccttatgtgatgtatccacctggaacagtatatgcccatccctctacacctcctgccatgcatccatttggccattatcctatgccaacaaatgggcatgctgaaactcatggagctgcgccaagcgctccggaaatgaatgggaaaagcgagcctggcagaacgtctgctccatccgccaacgggattacctcgcacagtgagagtggaagcgagagtgagagcgaaggaagtgacgacaattctcaaaacgattcacactcaaaggacaatgatgggaaggaagatggcaattctcagaacggcatgtcttattcaggatcgcaaggagtggtaaaccaaaccatggcgatgcttccaatgcaaccgggtgcaatggtcggaggagttcctagctccacggcagctaacctgaatatcggagtggactactgggcagctccgggttctgcggctgtccccgcagcgcacggcaaagcgccagctggttcagctcgaggagaccaatgggatgaaagggagctcaagaagcagaagcggaagcagtcaaacagagagtccgctcgcagatcccggctgcgcaaacaggctgagtgtgaggagcttgggcaacgtgctgaggctctgaggtcggagaactcgtcgctgagggccgagctcgagcggatcagaaaggagtacgaacagctactttcacagaacgcttccctaaaggaaaagctgggggctgccagtagtgattcgcttcctgatatgaacgaacagaacgacggcgacggagacggcggctacaggaagcagcctgattccgatggccaccagcctgggagcgagtcctgacccgtttttagctcaggattcttttggaatgcacattgcttatatattcattctcttgaacgttgtggaacgcagcataggaaggaaatccaactttaattagaatcgattcgctgtcatccctcatgcatggccggagaggggagagggttctcttcttccttggatgttggatacaccgacagtcacgtgcatggcaagagcagaagctagcagctgcggcgactcagggcagcgagcgtttgactggctggggtgcttgctgatatgctcaacacatgaagcagcagcagcctggagcgccagacattcctgactgagtgactgctcatcacgaccagagccaaatccaaatggaataaaaaaaacacacacacactacgtgcagcaatatcagctctccttttctttgtccatgaaaggaaaaacaacgtcacgggaacaattgcggtcagcttttctggaccgtccaccatgccttcatttcaaattcg

SEQ ID NO: 200173 - DNA, 846 bp, Zea Mays
gtacagtcctaactttacaattgatgaaagggagctcaagaagcagaagcggaagcagtcaaacagagagtccgctcgcagatcccggctgcgcaaacaggctgagtgtgaggagcttgggcaacgtgctgaggctctgaggtcggagaactcgtcgctgagggccgagctcgagcggatcagaaaggagtacgaacagctactttcacagaacgcttccctaaaggaaaagctgggggctgccagtagtgattcgcttcctgatatgaacgaacagaacgacggcgacggagacggcggctacaggaagcagcctgattccgatggccaccagcctgggagcgagtcctgacccgtttttagctcaggattcttttggaatgcacattgcttatatattcattctcttgaacgttgtggaacgcagcataggaaggaaatccaactttaattagaatcgattcgctgtcatccctcatgcatggccggagaggggagagggttctcttcttccttggatgttggatacaccgacagtcacgtgcatggcaagagcagaagctagcagctgcggcgactcagggcagcgagcgtttgactggctggggtgcttgctgatatgctcaacacatgaagcagcagcagcctggagcgccagacattcctgactgagtgactgctcatcacgaccagagccaaatccaaatggaataaaaaaaacacacacacactacgtgcagcaatatcagctctccttttctttgtccatgaaaggaaaaacaacgtcacgggaacaattgcggtcagcttttctggaccgtccaccatgccttcatttcaaattcg

SEQ ID NO: 200174 - DNA, 651 bp, Zea Mays
aaacaagctatccgacgcagttttgaccacagccgacggcaatagaagtagagaactccgacttcttcactcacacacacatggcgctgatgagccttggcgccgccgggtacaccacggccaccgcgccgcctcgtccccgaagatgtaccctgccgtttcgcgccgccgcctcccctgcggcactggaccgccggcgacggccgcataatgtggctggcgacttcttcgtcgaccaccgctgcatcgactgccagacctgccgatggatggcgccggaggtgttcaagagggtggatggcaaggccgccgtagcggcgcagcccagctccgaggaggagaggaccaaggccctgcaggcgctgctatcctgtccaacatcctcaattcacactgagaaacctccaaaagacattcttaaagtgcaaaacatgtttcctctaccaatcgacgacaagctactcccaggtgtttatctctgtgggtataattctgaagactcatatggggcaacatcgtacctggtaattcatccacaaggaaacatactgattgacagcccaaggtatactccaaagctggccaacaatattgaaaagcttggtggagcgcgctacatgtttttgacccacatgttattttcagatgtac

SEQ ID NO: 200175 - DNA, 1320 bp, Zea Mays
gacaacccaggcctggttcggcccggccttcccgatttagtacaacgtctcctgtgtcctctcgcgcgccgcgccgcccctcaggccgagactcccctcaggccccagctctcgctctccggtctccaccgccgctccggtgctcccttccgggattcccctccggcgagcttgctcagctccgctccagatttccacgtcgtccatggcgctcgtcgtgatgtgtgggcagccgtgcagcggtaaaacagcagccgccgcttgccttgctgtggcgctgcactcctcctcgcctgaccttacagtccgaatcatcgatgagtcatccctccatctcaggcgcaacgatagctacaaagatatggttgtggagaaaaacttgagagggcttcttagatcagaagttgacaggtctgtgtcacgcgacagcataattattgtcgactcgttgaataatattaaggggtaccgctatgagttgtggtgtcttgcgcgtgcatctggtgtaagatattgtgtgaagtggaccattgtaaggaatggaacagcaaccgccaggagaaaggagaaccagcatatgatactaatatatttgaagatcttgtaagtagatttgagaagccagatagacgcaatcgttgggattcccctctttttgaattgttcccatctagagatgaattagtggaaacagctcctgttattgctgaagctgtgtcatatttgacaaaaaaagtggattccaaaacaagagatgtaaaagttctccagcctacaatagccactcagacggtgcgaacaacagaggctaattccctctatgagatggacaaggcaacacaggaggtggtcaatgcaattgttgaagcacagtcatgcggtcttgggcttgctgtgaataagatctccattgggcccaacttgccaactatcaagcttgagagatctgttggcctacctgagctcagaagcctgcggagaactttcatcaagctggcagggcagtacagtctgagtgggccaccaccaccgacagatgctgacagcgcaaagaggatgtttgtcgactacttaaaccgtgaacttggtgcatgataattttcattcgcctgcgttgcatgaacactatgtagcatgtggttaacttgggggaatagataattgaagacaacttgattgtacttgttccttgttttgtggaaatctttatatgactatcttaacgtccttgacgccttggtggacatgcaacatgaatatttttttctctcaaacccgcatgagaggtgctcatcattatattaagaaaataaaaagggt

SEQ ID NO: 200176 - DNA, 1686 bp, Zea Mays
gacaacccaggcctggttcggcccggccttcccgatttagtacaacgtctcctgtgtcctctcgcgcgccgcgccgcccctcaggccgagactcccctcaggccccagctctcgctctccggtctccaccgccgctccggtgctcccttccgggattcccctccggcgagcttgctcagctccgctccaggaacgatcagcctggctggctggattgaaatttcggcccagtggcccacttcacttgcccagcggcccagcccagcttcccttttcccgattcccaccacgtgagcagaagctgcacaaccaagaggcaagagccaacagagcgcagaagctgcacaaccaagaggtaagagccaaccgagcaacgaacgcccaggcacacacgagacacgacacgaaccaggcaaccagctgccgagggaggaaccctagcggaacactgtgcaggtgacggcggcgcgctaccggtgacgggggatacggcggcatcgtccccctcggcccctcctccatccccggcgcggcggcgccagcagccggcctgcagatttccacgtcgtccatggcgctcgtcgtgatgtgtgggcagccgtgcagcggtaaaacagcagccgccgcttgccttgctgtggcgctgcactcctcctcgcctgaccttacagtccgaatcatcgatgagtcatccctccatctcaggcgcaacgatagctacaaagatatggttgtggagaaaaacttgagagggcttcttagatcagaagttgacaggtctgtgtcacgcgacagcataattattgtcgactcgttgaataatattaaggggtaccgctatgagttgtggtgtcttgcgcgtgcatctggtgtaagatattgtgtgaagtggaccattgtaaggaatggaacagcaaccgccaggagaaaggagaaccagcatatgatactaatatatttgaagatcttgtaagtagatttgagaagccagatagacgcaatcgttgggattcccctctttttgaattgttcccatctagagatgaattagtggaaacagctcctgttattgctgaagctgtgtcatatttgacaaaaaaagtggattccaaaacaagagatgtaaaagttctccagcctacaatagccactcagacggtgcgaacaacagaggctaattccctctatgagatggacaaggcaacacaggaggtggtcaatgcaattgttgaagcacagtcatgcggtcttgggcttgctgtgaataagatctccattgggcccaacttgccaactatcaagcttgagagatctgttggcctacctgagctcagaagcctgcggagaactttcatcaagctggcagggcagtacagtctgagtgggccaccaccaccgacagatgctgacagcgcaaagaggatgtttgtcgactacttaaaccgtgaacttggtgcatgataattttcattcgcctgcgttgcatgaacactatgtagcatgtggttaacttgggggaatagataattgaagacaacttgattgtacttgttccttgttttgtggaaatctttatatgactatcttaacgtccttgacgccttggtggacatgcaacatgaatatttttttctctcaaacccgcatgagaggtgctcatcattatattaagaaaataaaaagggt

SEQ ID NO: 200177 - DNA, 1837 bp, Zea Mays
gacaacccaggcctggttcggcccggccttcccgatttagtacaacgtctcctgtgtcctctcgcgcgccgcgccgcccctcaggccgagactcccctcaggccccagctctcgctctccggtctccaccgccgctccggtgctcccttccgggattcccctccggcgagcttgctcagctccgctccaggccgcgcggcgctgccgtaggttcgataccctgctgtacttgtcactgggatagattgcggtggttttacgcctcattggatattcccaaatggttatggaccctactagaggcctgcgattaatagcgactaatcgtccgattagtttaggaacgatcagcctggctggctggattgaaatttcggcccagtggcccacttcacttgcccagcggcccagcccagcttcccttttcccgattcccaccacgtgagcagaagctgcacaaccaagaggcaagagccaacagagcgcagaagctgcacaaccaagaggtaagagccaaccgagcaacgaacgcccaggcacacacgagacacgacacgaaccaggcaaccagctgccgagggaggaaccctagcggaacactgtgcaggtgacggcggcgcgctaccggtgacgggggatacggcggcatcgtccccctcggcccctcctccatccccggcgcggcggcgccagcagccggcctgcagatttccacgtcgtccatggcgctcgtcgtgatgtgtgggcagccgtgcagcggtaaaacagcagccgccgcttgccttgctgtggcgctgcactcctcctcgcctgaccttacagtccgaatcatcgatgagtcatccctccatctcaggcgcaacgatagctacaaagatatggttgtggagaaaaacttgagagggcttcttagatcagaagttgacaggtctgtgtcacgcgacagcataattattgtcgactcgttgaataatattaaggggtaccgctatgagttgtggtgtcttgcgcgtgcatctggtgtaagatattgtgtgaagtggaccattgtaaggaatggaacagcaaccgccaggagaaaggagaaccagcatatgatactaatatatttgaagatcttgtaagtagatttgagaagccagatagacgcaatcgttgggattcccctctttttgaattgttcccatctagagatgaattagtggaaacagctcctgttattgctgaagctgtgtcatatttgacaaaaaaagtggattccaaaacaagagatgtaaaagttctccagcctacaatagccactcagacggtgcgaacaacagaggctaattccctctatgagatggacaaggcaacacaggaggtggtcaatgcaattgttgaagcacagtcatgcggtcttgggcttgctgtgaataagatctccattgggcccaacttgccaactatcaagcttgagagatctgttggcctacctgagctcagaagcctgcggagaactttcatcaagctggcagggcagtacagtctgagtgggccaccaccaccgacagatgctgacagcgcaaagaggatgtttgtcgactacttaaaccgtgaacttggtgcatgataattttcattcgcctgcgttgcatgaacactatgtagcatgtggttaacttgggggaatagataattgaagacaacttgattgtacttgttccttgttttgtggaaatctttatatgactatcttaacgtccttgacgccttggtggacatgcaacatgaatatttttttctctcaaacccgcatgagaggtgctcatcattatattaagaaaataaaaagggt

SEQ ID NO: 200178 - DNA, 1597 bp, Zea Mays
gacaacccaggcctggttcggcccggccttcccgatttagtacaacgtctcctgtgtcctctcgcgcgccgcgccgcccctcaggccgagactcccctcaggccccagctctcgctctccggtctccaccgccgctccggtgctcccttccgggattcccctccggcgagcttgctcagctccgctccagcagaagctgcacaaccaagaggcaagagccaacagagcgcagaagctgcacaaccaagaggtaagagccaaccgagcaacgaacgcccaggcacacacgagacacgacacgaaccaggcaaccagctgccgagggaggaaccctagcggaacactgtgcaggtgacggcggcgcgctaccggtgacgggggatacggcggcatcgtccccctcggcccctcctccatccccggcgcggcggcgccagcagccggcctgcagatttccacgtcgtccatggcgctcgtcgtgatgtgtgggcagccgtgcagcggtaaaacagcagccgccgcttgccttgctgtggcgctgcactcctcctcgcctgaccttacagtccgaatcatcgatgagtcatccctccatctcaggcgcaacgatagctacaaagatatggttgtggagaaaaacttgagagggcttcttagatcagaagttgacaggtctgtgtcacgcgacagcataattattgtcgactcgttgaataatattaaggggtaccgctatgagttgtggtgtcttgcgcgtgcatctggtgtaagatattgtgtgcttttttgtgatacagaagtggaccattgtaaggaatggaacagcaaccgccaggagaaaggagaaccagcatatgatactaatatatttgaagatcttgtaagtagatttgagaagccagatagacgcaatcgttgggattcccctctttttgaattgttcccatctagagatgaattagtggaaacagctcctgttattgctgaagctgtgtcatatttgacaaaaaaagtggattccaaaacaagagatgtaaaagttctccagcctacaatagccactcagacggtgcgaacaacagaggctaattccctctatgagatggacaaggcaacacaggaggtggtcaatgcaattgttgaagcacagtcatgcggtcttgggcttgctgtgaataagatctccattgggcccaacttgccaactatcaagcttgagagatctgttggcctacctgagctcagaagcctgcggagaactttcatcaagctggcagggcagtacagtctgagtgggccaccaccaccgacagatgctgacagcgcaaagaggatgtttgtcgactacttaaaccgtgaacttggtgcatgataattttcattcgcctgcgttgcatgaacactatgtagcatgtggttaacttgggggaatagataattgaagacaacttgattgtacttgttccttgttttgtggaaatctttatatgactatcttaacgtccttgacgccttggtggacatgcaacatgaatatttttttctctcaaacccgcatgagaggtgctcatcattatattaagaaaataaaaagggt

SEQ ID NO: 200179 - DNA, 3073 bp, Zea Mays
gccttctctcttctccacgggagcgaggccgaggccgagacctcgaggcggtcgcgtggcgtctcggaacccgggaggaatccacagaaaaatccgcgcgtggggggccgaatctctgctcctggggcgagccggcgagctgcagttttcgtccctctcctgtggccttcctttactcccgagtcccgacgacgacaggagcccttcaccggcgacgcacccttcgccgggcacttcaccgccgacgaccacgctcctgtgttgaatggtgtttggagtgtggtaaactggtaatcctgggaaaagatgaaagaggaaatcatgtttgacaaccaaacaaagccatgcagatcgagggttgactccaaaagcaattcaagttctctgaaacctaagtttggatcatcatggggttcccaaattgtcaaagggtttacaacagacaagaaaaccaagaagacagcagcaaatgcaagcaaaaaaccacctcttccaagtgtcgaaaatgttaatcaggccaaccaacagattccgtatcactctagggtgaaaagatcccttattggggatttcccttgttcacctgctggtgctcaagtccacccccatgtctttgattgccacaatattaggtcccctgcatcccatgatctttttcttgagctggatcatctcagagagcagcttcgtgagtcgaaagaaagggaattgacattacagtcagagttgagacagtgcagagaaaacccaaaagtttcagaacttgagaaggagcttgattctatgagggatgaagttgacaggcttgcacgactgaaaatttcattagaagctgagaaaacaagcatatctgaacagttatcagctctatcttctatggaagaacatcatgaagaaaatgtaagattagatagccacggcaatcggatacttactgtagatggggacaatgcaccttcagaaaacttggagtttgaagttgttgaactacgccggttaaacaaagagctacagtttcagaaacgaaatcttgcaattaaactctcttcagctgaatccaaattggctggccttgagaagaatgaagagagtgatattgttgccaaagttcaagctgaggcatcgttgttgaggcatacaaatgcaaacctcagcaagcaagttgagggattgcaaatgagccgactaacagaggttgaggagcttgcttatctacggtggatcaattcttgtctacgccatgagctttgtaactcagatcaagcagctagagcaacgacggatatagattacaatggtggcatggcttttaatgaggatgataatagcgaaggtgatgcaaaaacttccgaggacagttctgatataaaattcagcattgcagaacgcatcaagcagtggtcccagaatgataagagctgccaagcatcgaaaaaggaatcccttcttgatagggcatggattgaagctgcagaagcacgaagcccgacacgtaggcactcactcggtggaccaaagggatgtgcacaagacttcaacatcattaaaagaaggcaatccgatacctttatcagcctcccggatgcgacagatgagtcatttgcctttaataaggatcctgcaatcagggagaagcgtgatcttcttgtagacaagtatgattttggtcgatctgaaagttcaagatttgttctcagcaagccagaagtatgcaaatcacagtgtctggatgttgaaaagcgtgcgttgcgcatccctaatcctccaccaagaccttctgtttctgtgtcaaattctggtccatcaaatggatcgactgtaaatccaccgcgaccaccgccgccgccgccgcctccaaagttttcctcaaaaagtactggggtcatgaagagggcacctcaggttgcagagctctaccattcacttatgagaagggactccaaaaaggatacttccggtggcggaatctgtgaagcagctaattctgcgaatgtgcggagtagcatgattggtgaaatcgagaaccggtcttcccatttgcaagctatcaaggcagatgttgagactcaaggtgaatttgtgaaatcattaatcaaggaggtgactagtgcagcctacaaagatatcgaagatgtggttgcatttgtgaagtggttagatgatgaacttggcttcctagtggatgagagagcagtgttgaagcattttgattggcctgagagaaaggcggacactctacgagaggcagcttttggctaccaggacctgaagaagctggagtcggaagtttcaaactacaaagatgatccacgcctgccctgtgaaatcgcactgaagaaaatggttgcattatctgaaaagaccgagagaggtgtctacagccttctaaggacaagagatgctatgatgaggcagtgcaaggagttcaatatccctacagactggatgcttgataacaatcttattagcaagataaagtttgcttctgtgaaattagcgaagatgtacatgaaaagggttgcaatggagcttcagtacatgggtcctctgaacaaggatccagctctggagtacatgctgcttcaggctgtgagatttgccttcaggatgcatcagtttgctggaggtttcgatccggagaccatggatgcattcgaggagctgaggaacctcgttcacgtcagaaacagcacccagtagctaggacgcggcaccgcaatgtagtgtttgaagaagaggattagttttcagactctcaggcttaccatctcagtaagcgtagcaggcacgatttttggtcgtgtgatgtttgcatgtgttcctgcgtggtgtgtttcagtgtttgcagtgtgtaagatatgtttgttctgtaccgcgtgtggtgggtgggatgaagtgacccgccggcgctggcttttaacctcactgttgccagaaaatagaaaacgcactgggacatgcacatgcttttgttttgtgcctattgagcacagaagtagcggtggggttttgatttgagggtttgtttaggacgtattcaattgctttggatattgtcggagaccataattag

SEQ ID NO: 200180 - DNA, 3021 bp, Zea Mays
cgccttctctcttctccacgggagcgaggccgaggccgagacctcgaggcggtcgcgtggcgtctcggaacccgggaggaatccacagaaaaatccgcgcgtggggggccgaatctctgctcctggggcgagccggcgagttttcgtccctctcctgtggccttcctttactcccgagtcccgacgacgacaggagcccttcaccggcgacgcacccttcgccgggcacttcaccgccgacgaccacgctcctgatgaaagaggaaatcatgtttgacaaccaaacaaagccatgcagatcgagggttgactccaaaagcaattcaagttctctgaaacctaagtttggatcatcatggggttcccaaattgtcaaagggtttacaacagacaagaaaaccaagaagacagcagcaaatgcaagcaaaaaaccacctcttccaagtgtcgaaaatgttaatcaggccaaccaacagattccgtatcactctagggtgaaaagatcccttattggggatttcccttgttcacctgctggtgctcaagtccacccccatgtctttgattgccacaatattaggtcccctgcatcccatgatctttttcttgagctggatcatctcagagagcagcttcgtgagtcgaaagaaagggaattgacattacagtcagagttgagacagtgcagagaaaacccaaaagtttcagaacttgagaaggagcttgattctatgagggatgaagttgacaggcttgcacgactgaaaatttcattagaagctgagaaaacaagcatatctgaacagttatcagctctatcttctatggaagaacatcatgaagaaaatgtaagattagatagccacggcaatcggatacttactgtagatggggacaatgcaccttcagaaaacttggagtttgaagttgttgaactacgccggttaaacaaagagctacagtttcagaaacgaaatcttgcaattaaactctcttcagctgaatccaaattggctggccttgagaagaatgaagagagtgatattgttgccaaagttcaagctgaggcatcgttgttgaggcatacaaatgcaaacctcagcaagcaagttgagggattgcaaatgagccgactaacagaggttgaggagcttgcttatctacggtggatcaattcttgtctacgccatgagctttgtaactcagatcaagcagctagagcaacgacggatatagattacaatggtggcatggcttttaatgaggatgataatagcgaaggtgatgcaaaaacttccgaggacagttctgatataaaattcagcattgcagaacgcatcaagcagtggtcccagaatgataagagctgccaagcatcgaaaaaggaatcccttcttgatagggcatggattgaagctgcagaagcacgaagcccgacacgtaggcactcactcggtggaccaaagggatgtgcacaagacttcaacatcattaaaagaaggcaatccgatacctttatcagcctcccggatgcgacagatgagtcatttgcctttaataaggatcctgcaatcagggagaagcgtgatcttcttgtagacaagtatgattttggtcgatctgaaagttcaagatttgttctcagcaagccagaagtatgcaaatcacagtgtctggatgttgaaaagcgtgcgttgcgcatccctaatcctccaccaagaccttctgtttctgtgtcaaattctggtccatcaaatggatcgactgtaaatccaccgcgaccaccgccgccgccgccgcctccaaagttttcctcaaaaagtactggggtcatgaagagggcacctcaggttgcagagctctaccattcacttatgagaagggactccaaaaaggatacttccggtggcggaatctgtgaagcagctaattctgcgaatgtgcggagtagcatgattggtgaaatcgagaaccggtcttcccatttgcaagctatcaaggcagatgttgagactcaaggtgaatttgtgaaatcattaatcaaggaggtgactagtgcagcctacaaagatatcgaagatgtggttgcatttgtgaagtggttagatgatgaacttggcttcctagtggatgagagagcagtgttgaagcattttgattggcctgagagaaaggcggacactctacgagaggcagcttttggctaccaggacctgaagaagctggagtcggaagtttcaaactacaaagatgatccacgcctgccctgtgaaatcgcactgaagaaaatggttgcattatctgaaaagaccgagagaggtgtctacagccttctaaggacaagagatgctatgatgaggcagtgcaaggagttcaatatccctacagactggatgcttgataacaatcttattagcaagataaagtttgcttctgtgaaattagcgaagatgtacatgaaaagggttgcaatggagcttcagtacatgggtcctctgaacaaggatccagctctggagtacatgctgcttcaggctgtgagatttgccttcaggatgcatcagtttgctggaggtttcgatccggagaccatggatgcattcgaggagctgaggaacctcgttcacgtcagaaacagcacccagtagctaggacgcggcaccgcaatgtagtgtttgaagaagaggattagttttcagactctcaggcttaccatctcagtaagcgtagcaggcacgatttttggtcgtgtgatgtttgcatgtgttcctgcgtggtgtgtttcagtgtttgcagtgtgtaagatatgtttgttctgtaccgcgtgtggtgggtgggatgaagtgacccgccggcgctggcttttaacctcactgttgccagaaaatagaaaacgcactgggacatgcacatgcttttgttttgtgcctattgagcacagaagtagcggtggggttttgatttgagggtttgtttaggacgtattcaattgctttggatattgtcggagaccataattag

SEQ ID NO: 200181 - DNA, 3415 bp, Zea Mays
ctcgccttctctcttctccacgggagcgaggccgaggccgagacctcgaggcggtcgcgtggcgtctcggaacccgggaggaatccacagaaaaatccgcgcgtggggggccgaatctctgctcctggggcgagccggcgaggcaagcatccgaagcactgccccttgtttgtttccgtcctcctccacgactccacattccgctgggcgctgtccgatctcctttatttagtggttacagcgccactgccgctactgatagcgccagtcgctctctgcctcattattctcaacgccggcggccaccgcggtcgtggctgcggtctttgttggaatagctaggttgagctgattcggggctgtttgtgggcatacccaggtcgaactgattcgaggctcgttctggtagagtggaatgcgtcggatttgagctgcttagggttgggattggggggtttcggtatttctttttcttttttagctgcagttttcgtccctctcctgtggccttcctttactcccgagtcccgacgacgacaggagcccttcaccggcgacgcacccttcgccgggcacttcaccgccgacgaccacgctcctgtgttgaatggtgtttggagtgtggtaaactggtaatcctgggaaaagatgaaagaggaaatcatgtttgacaaccaaacaaagccatgcagatcgagggttgactccaaaagcaattcaagttctctgaaacctaagtttggatcatcatggggttcccaaattgtcaaagggtttacaacagacaagaaaaccaagaagacagcagcaaatgcaagcaaaaaaccacctcttccaagtgtcgaaaatgttaatcaggccaaccaacagattccgtatcactctagggtgaaaagatcccttattggggatttcccttgttcacctgctggtgctcaagtccacccccatgtctttgattgccacaatattaggtcccctgcatcccatgatctttttcttgagctggatcatctcagagagcagcttcgtgagtcgaaagaaagggaattgacattacagtcagagttgagacagtgcagagaaaacccaaaagtttcagaacttgagaaggagcttgattctatgagggatgaagttgacaggcttgcacgactgaaaatttcattagaagctgagaaaacaagcatatctgaacagttatcagctctatcttctatggaagaacatcatgaagaaaatgtaagattagatagccacggcaatcggatacttactgtagatggggacaatgcaccttcagaaaacttggagtttgaagttgttgaactacgccggttaaacaaagagctacagtttcagaaacgaaatcttgcaattaaactctcttcagctgaatccaaattggctggccttgagaagaatgaagagagtgatattgttgccaaagttcaagctgaggcatcgttgttgaggcatacaaatgcaaacctcagcaagcaagttgagggattgcaaatgagccgactaacagaggttgaggagcttgcttatctacggtggatcaattcttgtctacgccatgagctttgtaactcagatcaagcagctagagcaacgacggatatagattacaatggtggcatggcttttaatgaggatgataatagcgaaggtgatgcaaaaacttccgaggacagttctgatataaaattcagcattgcagaacgcatcaagcagtggtcccagaatgataagagctgccaagcatcgaaaaaggaatcccttcttgatagggcatggattgaagctgcagaagcacgaagcccgacacgtaggcactcactcggtggaccaaagggatgtgcacaagacttcaacatcattaaaagaaggcaatccgatacctttatcagcctcccggatgcgacagatgagtcatttgcctttaataaggatcctgcaatcagggagaagcgtgatcttcttgtagacaagtatgattttggtcgatctgaaagttcaagatttgttctcagcaagccagaagtatgcaaatcacagtgtctggatgttgaaaagcgtgcgttgcgcatccctaatcctccaccaagaccttctgtttctgtgtcaaattctggtccatcaaatggatcgactgtaaatccaccgcgaccaccgccgccgccgccgcctccaaagttttcctcaaaaagtactggggtcatgaagagggcacctcaggttgcagagctctaccattcacttatgagaagggactccaaaaaggatacttccggtggcggaatctgtgaagcagctaattctgcgaatgtgcggagtagcatgattggtgaaatcgagaaccggtcttcccatttgcaagctatcaaggcagatgttgagactcaaggtgaatttgtgaaatcattaatcaaggaggtgactagtgcagcctacaaagatatcgaagatgtggttgcatttgtgaagtggttagatgatgaacttggcttcctagtggatgagagagcagtgttgaagcattttgattggcctgagagaaaggcggacactctacgagaggcagcttttggctaccaggacctgaagaagctggagtcggaagtttcaaactacaaagatgatccacgcctgccctgtgaaatcgcactgaagaaaatggttgcattatctgaaaagaccgagagaggtgtctacagccttctaaggacaagagatgctatgatgaggcagtgcaaggagttcaatatccctacagactggatgcttgataacaatcttattagcaagataaagtttgcttctgtgaaattagcgaagatgtacatgaaaagggttgcaatggagcttcagtacatgggtcctctgaacaaggatccagctctggagtacatgctgcttcaggctgtgagatttgccttcaggatgcatcagtttgctggaggtttcgatccggagaccatggatgcattcgaggagctgaggaacctcgttcacgtcagaaacagcacccagtagctaggacgcggcaccgcaatgtagtgtttgaagaagaggattagttttcagactctcaggcttaccatctcagtaagcgtagcaggcacgatttttggtcgtgtgatgtttgcatgtgttcctgcgtggtgtgtttcagtgtttgcagtgtgtaagatatgtttgttctgtaccgcgtgtggtgggtgggatgaagtgacccgccggcgctggcttttaacctcactgttgccagaaaatagaaaacgcactgggacatgcacatgcttttgttttgtgcctattgagcacagaagtagcggtggggttttgatttgagggtttgtttaggacgtattcaattgctttggatattgtcggagaccataattag

SEQ ID NO: 200182 - DNA, 3072 bp, Zea Mays
cactcgccttctctcttctccacgggagcgaggccgaggccgagacctcgaggcggtcgcgtggcgtctcggaacccgggaggaatccacagaaaaatccgcgcgtggggggccgaatctctgctcctggggcgagccggcgagttttcgtccctctcctgtggccttcctttactcccgagtcccgacgacgacaggagcccttcaccggcgacgcacccttcgccgggcacttcaccgccgacgaccacgctcctgtgttgaatggtgtttggagtgtggtaaactggtaatcctgggaaaagatgaaagaggaaatcatgtttgacaaccaaacaaagccatgcagatcgagggttgactccaaaagcaattcaagttctctgaaacctaagtttggatcatcatggggttcccaaattgtcaaagggtttacaacagacaagaaaaccaagaagacagcagcaaatgcaagcaaaaaaccacctcttccaagtgtcgaaaatgttaatcaggccaaccaacagattccgtatcactctagggtgaaaagatcccttattggggatttcccttgttcacctgctggtgctcaagtccacccccatgtctttgattgccacaatattaggtcccctgcatcccatgatctttttcttgagctggatcatctcagagagcagcttcgtgagtcgaaagaaagggaattgacattacagtcagagttgagacagtgcagagaaaacccaaaagtttcagaacttgagaaggagcttgattctatgagggatgaagttgacaggcttgcacgactgaaaatttcattagaagctgagaaaacaagcatatctgaacagttatcagctctatcttctatggaagaacatcatgaagaaaatgtaagattagatagccacggcaatcggatacttactgtagatggggacaatgcaccttcagaaaacttggagtttgaagttgttgaactacgccggttaaacaaagagctacagtttcagaaacgaaatcttgcaattaaactctcttcagctgaatccaaattggctggccttgagaagaatgaagagagtgatattgttgccaaagttcaagctgaggcatcgttgttgaggcatacaaatgcaaacctcagcaagcaagttgagggattgcaaatgagccgactaacagaggttgaggagcttgcttatctacggtggatcaattcttgtctacgccatgagctttgtaactcagatcaagcagctagagcaacgacggatatagattacaatggtggcatggcttttaatgaggatgataatagcgaaggtgatgcaaaaacttccgaggacagttctgatataaaattcagcattgcagaacgcatcaagcagtggtcccagaatgataagagctgccaagcatcgaaaaaggaatcccttcttgatagggcatggattgaagctgcagaagcacgaagcccgacacgtaggcactcactcggtggaccaaagggatgtgcacaagacttcaacatcattaaaagaaggcaatccgatacctttatcagcctcccggatgcgacagatgagtcatttgcctttaataaggatcctgcaatcagggagaagcgtgatcttcttgtagacaagtatgattttggtcgatctgaaagttcaagatttgttctcagcaagccagaagtatgcaaatcacagtgtctggatgttgaaaagcgtgcgttgcgcatccctaatcctccaccaagaccttctgtttctgtgtcaaattctggtccatcaaatggatcgactgtaaatccaccgcgaccaccgccgccgccgccgcctccaaagttttcctcaaaaagtactggggtcatgaagagggcacctcaggttgcagagctctaccattcacttatgagaagggactccaaaaaggatacttccggtggcggaatctgtgaagcagctaattctgcgaatgtgcggagtagcatgattggtgaaatcgagaaccggtcttcccatttgcaagctatcaaggcagatgttgagactcaaggtgaatttgtgaaatcattaatcaaggaggtgactagtgcagcctacaaagatatcgaagatgtggttgcatttgtgaagtggttagatgatgaacttggcttcctagtggatgagagagcagtgttgaagcattttgattggcctgagagaaaggcggacactctacgagaggcagcttttggctaccaggacctgaagaagctggagtcggaagtttcaaactacaaagatgatccacgcctgccctgtgaaatcgcactgaagaaaatggttgcattatctgaaaagaccgagagaggtgtctacagccttctaaggacaagagatgctatgatgaggcagtgcaaggagttcaatatccctacagactggatgcttgataacaatcttattagcaagataaagtttgcttctgtgaaattagcgaagatgtacatgaaaagggttgcaatggagcttcagtacatgggtcctctgaacaaggatccagctctggagtacatgctgcttcaggctgtgagatttgccttcaggatgcatcagtttgctggaggtttcgatccggagaccatggatgcattcgaggagctgaggaacctcgttcacgtcagaaacagcacccagtagctaggacgcggcaccgcaatgtagtgtttgaagaagaggattagttttcagactctcaggcttaccatctcagtaagcgtagcaggcacgatttttggtcgtgtgatgtttgcatgtgttcctgcgtggtgtgtttcagtgtttgcagtgtgtaagatatgtttgttctgtaccgcgtgtggtgggtgggatgaagtgacccgccggcgctggcttttaacctcactgttgccagaaaatagaaaacgcactgggacatgcacatgcttttgttttgtgcctattgagcacagaagtagcggtggggttttgatttgagggtttgtttaggacgtattcaattgctttggatattgtcggagaccataattag

SEQ ID NO: 200183 - DNA, 2936 bp, Zea Mays
cctcactcgccttctctcttctccacgggagcgaggccgaggccgagacctcgaggcggtcgcgtggcgtctcggaacccgggaggaatccacagaaaaatccgcgcgtggggggccgaatctctgctcctggggcgagccggcgagtgttgaatggtgtttggagtgtggtaaactggtaatcctgggaaaagatgaaagaggaaatcatgtttgacaaccaaacaaagccatgcagatcgagggttgactccaaaagcaattcaagttctctgaaacctaagtttggatcatcatggggttcccaaattgtcaaagggtttacaacagacaagaaaaccaagaagacagcagcaaatgcaagcaaaaaaccacctcttccaagtgtcgaaaatgttaatcaggccaaccaacagattccgtatcactctagggtgaaaagatcccttattggggatttcccttgttcacctgctggtgctcaagtccacccccatgtctttgattgccacaatattaggtcccctgcatcccatgatctttttcttgagctggatcatctcagagagcagcttcgtgagtcgaaagaaagggaattgacattacagtcagagttgagacagtgcagagaaaacccaaaagtttcagaacttgagaaggagcttgattctatgagggatgaagttgacaggcttgcacgactgaaaatttcattagaagctgagaaaacaagcatatctgaacagttatcagctctatcttctatggaagaacatcatgaagaaaatgtaagattagatagccacggcaatcggatacttactgtagatggggacaatgcaccttcagaaaacttggagtttgaagttgttgaactacgccggttaaacaaagagctacagtttcagaaacgaaatcttgcaattaaactctcttcagctgaatccaaattggctggccttgagaagaatgaagagagtgatattgttgccaaagttcaagctgaggcatcgttgttgaggcatacaaatgcaaacctcagcaagcaagttgagggattgcaaatgagccgactaacagaggttgaggagcttgcttatctacggtggatcaattcttgtctacgccatgagctttgtaactcagatcaagcagctagagcaacgacggatatagattacaatggtggcatggcttttaatgaggatgataatagcgaaggtgatgcaaaaacttccgaggacagttctgatataaaattcagcattgcagaacgcatcaagcagtggtcccagaatgataagagctgccaagcatcgaaaaaggaatcccttcttgatagggcatggattgaagctgcagaagcacgaagcccgacacgtaggcactcactcggtggaccaaagggatgtgcacaagacttcaacatcattaaaagaaggcaatccgatacctttatcagcctcccggatgcgacagatgagtcatttgcctttaataaggatcctgcaatcagggagaagcgtgatcttcttgtagacaagtatgattttggtcgatctgaaagttcaagatttgttctcagcaagccagaagtatgcaaatcacagtgtctggatgttgaaaagcgtgcgttgcgcatccctaatcctccaccaagaccttctgtttctgtgtcaaattctggtccatcaaatggatcgactgtaaatccaccgcgaccaccgccgccgccgccgcctccaaagttttcctcaaaaagtactggggtcatgaagagggcacctcaggttgcagagctctaccattcacttatgagaagggactccaaaaaggatacttccggtggcggaatctgtgaagcagctaattctgcgaatgtgcggagtagcatgattggtgaaatcgagaaccggtcttcccatttgcaagctatcaaggcagatgttgagactcaaggtgaatttgtgaaatcattaatcaaggaggtgactagtgcagcctacaaagatatcgaagatgtggttgcatttgtgaagtggtggatgagagagcagtgttgaagcattttgattggcctgagagaaaggcggacactctacgagaggcagcttttggctaccaggacctgaagaagctggagtcggaagtttcaaactacaaagatgatccacgcctgccctgtgaaatcgcactgaagaaaatggttgcattatctgaaaagaccgagagaggtgtctacagccttctaaggacaagagatgctatgatgaggcagtgcaaggagttcaatatccctacagactggatgcttgataacaatcttattagcaagataaagtttgcttctgtgaaattagcgaagatgtacatgaaaagggttgcaatggagcttcagtacatgggtcctctgaacaaggatccagctctggagtacatgctgcttcaggctgtgagatttgccttcaggatgcatcagtttgctggaggtttcgatccggagaccatggatgcattcgaggagctgaggaacctcgttcacgtcagaaacagcacccagtagctaggacgcggcaccgcaatgtagtgtttgaagaagaggattagttttcagactctcaggcttaccatctcagtaagcgtagcaggcacgatttttggtcgtgtgatgtttgcatgtgttcctgcgtggtgtgtttcagtgtttgcagtgtgtaagatatgtttgttctgtaccgcgtgtggtgggtgggatgaagtgacccgccggcgctggcttttaacctcactgttgccagaaaatagaaaacgcactgggacatgcacatgcttttgttttgtgcctattgagcacagaagtagcggtggggttttgatttgagggtttgtttaggacgtattcaattgctttggatattgtcggagaccataattag

SEQ ID NO: 200184 - DNA, 3005 bp, Zea Mays
ctttttctttcccatctccgatttcaaaattcaaaagtccccttcctcactcgccttctctcttctccacgggagcgaggccgaggccgagacctcgaggcggtcgcgtggcgtctcggaacccgggaggaatccacagaaaaatccgcgcgtggggggccgaatctctgctcctggggcgagccggcgagtgttgaatggtgtttggagtgtggtaaactggtaatcctgggaaaagatgaaagaggaaatcatgtttgacaaccaaacaaagccatgcagatcgagggttgactccaaaagcaattcaagttctctgaaacctaagtttggatcatcatggggttcccaaattgtcaaagggtttacaacagacaagaaaaccaagaagacagcagcaaatgcaagcaaaaaaccacctcttccaagtgtcgaaaatgttaatcaggccaaccaacagattccgtatcactctagggtgaaaagatcccttattggggatttcccttgttcacctgctggtgctcaagtccacccccatgtctttgattgccacaatattaggtcccctgcatcccatgatctttttcttgagctggatcatctcagagagcagcttcgtgagtcgaaagaaagggaattgacattacagtcagagttgagacagtgcagagaaaacccaaaagtttcagaacttgagaaggagcttgattctatgagggatgaagttgacaggcttgcacgactgaaaatttcattagaagctgagaaaacaagcatatctgaacagttatcagctctatcttctatggaagaacatcatgaagaaaatgtaagattagatagccacggcaatcggatacttactgtagatggggacaatgcaccttcagaaaacttggagtttgaagttgttgaactacgccggttaaacaaagagctacagtttcagaaacgaaatcttgcaattaaactctcttcagctgaatccaaattggctggccttgagaagaatgaagagagtgatattgttgccaaagttcaagctgaggcatcgttgttgaggcatacaaatgcaaacctcagcaagcaagttgagggattgcaaatgagccgactaacagaggttgaggagcttgcttatctacggtggatcaattcttgtctacgccatgagctttgtaactcagatcaagcagctagagcaacgacggatatagattacaatggtggcatggcttttaatgaggatgataatagcgaaggtgatgcaaaaacttccgaggacagttctgatataaaattcagcattgcagaacgcatcaagcagtggtcccagaatgataagagctgccaagcatcgaaaaaggaatcccttcttgatagggcatggattgaagctgcagaagcacgaagcccgacacgtaggcactcactcggtggaccaaagggatgtgcacaagacttcaacatcattaaaagaaggcaatccgatacctttatcagcctcccggatgcgacagatgagtcatttgcctttaataaggatcctgcaatcagggagaagcgtgatcttcttgtagacaagtatgattttggtcgatctgaaagttcaagatttgttctcagcaagccagaagtatgcaaatcacagtgtctggatgttgaaaagcgtgcgttgcgcatccctaatcctccaccaagaccttctgtttctgtgtcaaattctggtccatcaaatggatcgactgtaaatccaccgcgaccaccgccgccgccgccgcctccaaagttttcctcaaaaagtactggggtcatgaagagggcacctcaggttgcagagctctaccattcacttatgagaagggactccaaaaaggatacttccggtggcggaatctgtgaagcagctaattctgcgaatgtgcggagtagcatgattggtgaaatcgagaaccggtcttcccatttgcaagctatcaaggcagatgttgagactcaaggtgaatttgtgaaatcattaatcaaggaggtgactagtgcagcctacaaagatatcgaagatgtggttgcatttgtgaagtggttagatgatgaacttggcttcctagtggatgagagagcagtgttgaagcattttgattggcctgagagaaaggcggacactctacgagaggcagcttttggctaccaggacctgaagaagctggagtcggaagtttcaaactacaaagatgatccacgcctgccctgtgaaatcgcactgaagaaaatggttgcattatctgaaaagaccgagagaggtgtctacagccttctaaggacaagagatgctatgatgaggcagtgcaaggagttcaatatccctacagactggatgcttgataacaatcttattagcaagataaagtttgcttctgtgaaattagcgaagatgtacatgaaaagggttgcaatggagcttcagtacatgggtcctctgaacaaggatccagctctggagtacatgctgcttcaggctgtgagatttgccttcaggatgcatcagtttgctggaggtttcgatccggagaccatggatgcattcgaggagctgaggaacctcgttcacgtcagaaacagcacccagtagctaggacgcggcaccgcaatgtagtgtttgaagaagaggattagttttcagactctcaggcttaccatctcagtaagcgtagcaggcacgatttttggtcgtgtgatgtttgcatgtgttcctgcgtggtgtgtttcagtgtttgcagtgtgtaagatatgtttgttctgtaccgcgtgtggtgggtgggatgaagtgacccgccggcgctggcttttaacctcactgttgccagaaaatagaaaacgcactgggacatgcacatgcttttgttttgtgcctattgagcacagaagtagcggtggggttttgatttgagggtttgtttaggacgtattcaattgctttggatattgtcggagaccataattag

SEQ ID NO: 200185 - DNA, 2538 bp, Zea Mays
aaacttttcagatcattgactgattttattgcttgtggactttggagagatgggacccattcggtgttctcgttgcaaagcatacataaatcctttcatgaaatttgttgatcaagggaggcatttcgtctgtaacttatgtggattcagaaatgatactcctagagaatacatgtgcaacttagggcccgatggtaggcggcgtgatgctgatgacaggcctgaattgtctagaggaactgttgaatttgttgctacgaaggaatttctggttcgtgatccaatgcctgctgtatacttcttccttattgatgtctccatgaatgctatacaaactggtgcaactgctgcagcttgcagtgctatttcccagtctatttcagatctaccagaaggtcctcggacaatggttggaattgcaacatttgattctgctattcacttctacagtcttaaacgtgctcagcagcagcctttgatgctcatcgttcctgatgttcaagatgtatatacacctcttcagactgaccttattcttccagtttctgagtgccgggagaatctggagcagttgctagaaagtatcccaaacatgtttgagaataatagggttgctgattctgcttttggagcagcaatgaaggctggcttcctggcgatgaaatctactggcggaaaacttcttgttttccaatcagtgctgccatcacttgggattggttctttatctgctagagaagccgaaggcagagcaaacattacaactggtgacaaggaagcccataaacttttgcagcctgttgacaataccctccagacaatggcactagaatttgctgaatatcaggtctgtgtggacgtattcctcacaacacaatcctacgttgatattgcttctatatccgttgtgcctcagactacaggtggccgggtctactactactatccattttctgctctttcagatccagccaagctcttcaatgatctcagatggaatatcagtagaccccagggttttgaggctgttatgcgtgtaaggtgcagtcaggtgggtttaatctcaggtcatttctattagcactctacgttatgagtctgaatgtgacttgttttcttttcacctcttcatcagggtctccaagttcaggactattttggcaatttctgcaagcgtgttcccactgacattgatcttccagcgattgattccgacaaaactgtgatggtcacgtttaagcatgatgacaagttaccagaaaatgtggaatgtggcttccagtgtgcacttctctatactactgtatatggacaaaggaggatccgagtcataaacctctcactttcatgtacaaatttgcttgccaatcttttccggtatgctgatttggagacacagtttgcatgcttcctgaagcaagctgctaatggcatcccgacctcttcattacctcgtattcgggatgaagcaacaaacacatgcataaatattcttcaatcttaccgcaaacactgtgcatctgtaacctcatcggggcagttgattctcccagaggctctaaaactgctgcctttatatactctggcactggtaaaaagtgtaggcttgagaactgatgggcgattagatgaccgttcctattggatatctctggtctcgtcagtttctgtagtactagctgttcctctggtgttccctagattgattcctatccatgatctcacgtccagggatgatgatgattcccttgtaccaagtccacttatgctcaaaagtgaaaatgtacaagaggatggggtctatttattggaaaacggtgaggatggtctagtctacgtaggaaacatggtaaatccggctaccctggaacaaatattcggtgtctcttctttggctgcattaccagcccagttagcattggagcagtttgacaacgaactctcgaggaagattaacgaagttgtaaatgaaattaggcgccagaggtgctcatacttgaggttgagactatgcagaaggggcgaaccatctggagattttttccggtcatttctaatagaggacaaggcacctggcgtcttctcctacgaggagtttctcgtgcatgtccacaggcagatccaaagcaagatgacctgaggggcccagatcctgtctgtagcatttcggtcagtagatggattgtaggtaccaaaacgagttcgatttctgcataaggagacagcgaagtggcgattccacatcactatggagcataatgtttgctcggacagtagaactcaggaatagaggcaccgtttttggagtggggtggtatatgtgttgtatacagagatgagaggcgttagtttttgtgttgtcattgtcgctgtgcatccttattgttttaccccttgtccaaaaagggatgcattattatgttgagaggaaggttatagaggtttcgcaataaaatgcacctagccaattgatagtatgaatcagatatataatctaatttatgactgcctattcgccttgtaccctgtcatgatgtt

SEQ ID NO: 200186 - DNA, 3756 bp, Zea Mays
gccagaccccaccgcgcacgaaacgatccatgttctaacaggaggagtgcacaagaggggcctccgcctcccctgcccccgcttgctatcgcgcgccagatcccgatctcgccgcgatccatggcgtcgtcgccgcagcagccgccgccgttcgccacgcaaaaccctactgcgcagggtccaggccaggggcctccagtctcggggacgggggcactccccggggcgttctccaatctccagatctcccgcggcgcggccccgccgcccggtgccccgcgggggctcacgcctcagcaggcaccgcccgccttcgccgcgctttcgggtcctccaccggctgcagcccggcccttcttccctggcagcccgcccgcaccgccgttcgtgcgggcgccgacggcggcagcttccgtctcgccgcccttcggcggacaaccgggggtagtgtcccagcagccgccaccgtttgggggacctccaggtgcggcgtctcagccgccgccgccgttcggtgttgcccccggggtggtgtcccaggcgccgcctccgttcggaggccctcctactgcggcgtcgcaggcccctcctccgtttggaggccctcctgccatggcatcgcaggtgccttcgccctttgttggtcactctgttgctgcgtctcaggcagcaccgttcggcgtcccccctgttgcggggtcacatcctccgccgttcggtgggcctcctggagcagggcctcatccagcaccgccactacggcagacattccctggccagtctgggccaatggcatccgcggcagcttggacgcagccaacaccacctagctttggagccccgcaacaatctccaccaccattcagttcgcggccagttgggcagccgccctttgctacgcaatcagcgcctgtggcacagcagctgcccttcatggggccacccagggcaaatgccccggcgtttgggcctccatcctggcaaactcagggagctgggtctggtgcaatgcagccacctatgagaatgccaggcattcctggtagcatgcagccaaacacactaggaccccctggcaccccgactatgacttattctccacatgctggaacacaggtatcaaccccatccaaaattgatcccaatcaaattccacggcctatgcctgaatcatcagtcatcatttatgagacccgtcaaggtggccaagcaaccatccccccggctgcatctagtgaatttattgtgaaggacactgggaactgtagcccccgtttaatgcgctgcactgtgaatcaaataccttgtaccggtgatctcttgatgacttcgggtatgcctttagctctgatggttcaacctttttctcttcctcacccatccgaggaacctattcagcttgtggactttggagagatgggacccattcggtgttctcgttgcaaagcatacataaatcctttcatgaaatttgttgatcaagggaggcatttcgtctgtaacttatgtggattcagaaatgatactcctagagaatacatgtgcaacttagggcccgatggtaggcggcgtgatgctgatgacaggcctgaattgtctagaggaactgttgaatttgttgctacgaaggaatttctggttcgtgatccaatgcctgctgtatacttcttccttattgatgtctccatgaatgctatacaaactggtgcaactgctgcagcttgcagtgctatttcccagtctatttcagatctaccagaaggtcctcggacaatggttggaattgcaacatttgattctgctattcacttctacagtcttaaacgtgctcagcagcagcctttgatgctcatcgttcctgatgttcaagatgtatatacacctcttcagactgaccttattcttccagtttctgagtgccgggagaatctggagcagttgctagaaagtatcccaaacatgtttgagaataatagggttgctgattctgcttttggagcagcaatgaaggctggcttcctggcgatgaaatctactggcggaaaacttcttgttttccaatcagtgctgccatcacttgggattggttctttatctgctagagaagccgaaggcagagcaaacattacaactggtgacaaggaagcccataaacttttgcagcctgttgacaataccctccagacaatggcactagaatttgctgaatatcaggtctgtgtggacgtattcctcacaacacaatcctacgttgatattgcttctatatccgttgtgcctcagactacaggtggccgggtctactactactatccattttctgctctttcagatccagccaagctcttcaatgatctcagatggaatatcagtagaccccagggttttgaggctgttatgcgtgtaaggtgcagtcagggtctccaagttcaggactattttggcaatttctgcaagcgtgttcccactgacattgatcttccagcgattgattccgacaaaactgtgatggtcacgtttaagcatgatgacaagttaccagaaaatgtggaatgtggcttccagtgtgcacttctctatactactgtatatggacaaaggaggatccgagtcataaacctctcactttcatgtacaaatttgcttgccaatcttttccggtatgctgatttggagacacagtttgcatgcttcctgaagcaagctgctaatggcatcccgacctcttcattacctcgtattcgggatgaagcaacaaacacatgcataaatattcttcaatcttaccgcaaacactgtgcatctgtaacctcatcggggcagttgattctcccagaggctctaaaactgctgcctttatatactctggcactggtaaaaagtgtaggcttgagaactgatgggcgattagatgaccgttcctattggatatctctggtctcgtcagtttctgtagtactagctgttcctctggtgttccctagattgattcctatccatgatctcacgtccagggatgatgatgattcccttgtaccaagtccacttatgctcaaaagtgaaaatgtacaagaggatggggtctatttattggaaaacggtgaggatggtctagtctacgtaggaaacatggtaaatccggctaccctggaacaaatattcggtgtctcttctttggctgcattaccagcccaggcgccagaggtgctcatacttgaggttgagactatgcagaaggggcgaaccatctggagattttttccggtcatttctaatagaggacaaggcacctggcgtcttctcctacgaggagtttctcgtgcatgtccacaggcagatccaaagcaagatgacctgaggggcccagatcctgtctgtagcatttcggtcagtagatggattgtaggtaccaaaacgagttcgatttctgcataaggagacagcgaagtggcgattccacatcactatggagcataatgtttgctcggacagtagaactcaggaatagaggcaccgtttttggagtggggtggtatatgtgttgtatacagagatgagaggcgttagtttttgtgttgtcattgtcgctgtgcatccttattgttttaccccttgtccaaaaagggatgcattattatgttgagaggaaggttatagaggtttcgcaataaaatgcacctagccaattgatagtatgaatcagatatataatctaatttatgactgcctattcgccttgtaccctgtcatgatgtt

SEQ ID NO: 200187 - DNA, 3821 bp, Zea Mays
gccagaccccaccgcgcacgaaacgatccatgttctaacaggaggagtgcacaagaggggcctccgcctcccctgcccccgcttgctatcgcgcgccagatcccgatctcgccgcgatccatggcgtcgtcgccgcagcagccgccgccgttcgccacgcaaaaccctactgcgcagggtccaggccaggggcctccagtctcggggacgggggcactccccggggcgttctccaatctccagatctcccgcggcgcggccccgccgcccggtgccccgcgggggctcacgcctcagcaggcaccgcccgccttcgccgcgctttcgggtcctccaccggctgcagcccggcccttcttccctggcagcccgcccgcaccgccgttcgtgcgggcgccgacggcggcagcttccgtctcgccgcccttcggcggacaaccgggggtagtgtcccagcagccgccaccgtttgggggacctccaggtgcggcgtctcagccgccgccgccgttcggtgttgcccccggggtggtgtcccaggcgccgcctccgttcggaggccctcctactgcggcgtcgcaggcccctcctccgtttggaggccctcctgccatggcatcgcaggtgccttcgccctttgttggtcactctgttgctgcgtctcaggcagcaccgttcggcgtcccccctgttgcggggtcacatcctccgccgttcggtgggcctcctggagcagggcctcatccagcaccgccactacggcagacattccctggccagtctgggccaatggcatccgcggcagcttggacgcagccaacaccacctagctttggagccccgcaacaatctccaccaccattcagttcgcggccagttgggcagccgccctttgctacgcaatcagcgcctgtggcacagcagctgcccttcatggggccacccagggcaaatgccccggcgtttgggcctccatcctggcaaactcagggagctgggtctggtgcaatgcagccacctatgagaatgccaggcattcctggtagcatgcagccaaacacactaggaccccctggcaccccgactatgacttattctccacatgctggaacacaggtatcaaccccatccaaaattgatcccaatcaaattccacggcctatgcctgaatcatcagtcatcatttatgagacccgtcaaggtggccaagcaaccatccccccggctgcatctagtgaatttattgtgaaggacactgggaactgtagcccccgtttaatgcgctgcactgtgaatcaaataccttgtaccggtgatctcttgatgacttcgggtatgcctttagctctgatggttcaacctttttctcttcctcacccatccgaggaacctattcagcttgtggactttggagagatgggacccattcggtgttctcgttgcaaagcatacataaatcctttcatgaaatttgttgatcaagggaggcatttcgtctgtaacttatgtggattcagaaatgatactcctagagaatacatgtgcaacttagggcccgatggtaggcggcgtgatgctgatgacaggcctgaattgtctagaggaactgttgaatttgttgctacgaaggaatttctggttcgtgatccaatgcctgctgtatacttcttccttattgatgtctccatgaatgctatacaaactggtgcaactgctgcagcttgcagtgctatttcccagtctatttcagatctaccagaaggtcctcggacaatggttggaattgcaacatttgattctgctattcacttctacagtcttaaacgtgctcagcagcagcctttgatgctcatcgttcctgatgttcaagatgtatatacacctcttcagactgaccttattcttccagtttctgagtgccgggagaatctggagcagttgctagaaagtatcccaaacatgtttgagaataatagggttgctgattctgcttttggagcagcaatgaaggctggcttcctggcgatgaaatctactggcggaaaacttcttgttttccaatcagtgctgccatcacttgggattggttctttatctgctagagaagccgaaggcagagcaaacattacaactggtgacaaggaagcccataaacttttgcagcctgttgacaataccctccagacaatggcactagaatttgctgaatatcaggtctgtgtggacgtattcctcacaacacaatcctacgttgatattgcttctatatccgttgtgcctcagactacaggtggccgggtctactactactatccattttctgctctttcagatccagccaagctcttcaatgatctcagatggaatatcagtagaccccagggttttgaggctgttatgcgtgtaaggtgcagtcagggtctccaagttcaggactattttggcaatttctgcaagcgtgttcccactgacattgatcttccagcgattgattccgacaaaactgtgatggtcacgtttaagcatgatgacaagttaccagaaaatgtggaatgtggcttccagtgtgcacttctctatactactgtatatggacaaaggaggatccgagtcataaacctctcactttcatgtacaaatttgcttgccaatcttttccggtatgctgatttggagacacagtttgcatgcttcctgaagcaagctgctaatggcatcccgacctcttcattacctcgtattcgggatgaagcaacaaacacatgcataaatattcttcaatcttaccgcaaacactgtgcatctgtaacctcatcggggcagttgattctcccagaggctctaaaactgctgcctttatatactctggcactggtaaaaagtgtaggcttgagaactgatgggcgattagatgaccgttcctattggatatctctggtctcgtcagtttctgtagtactagctgttcctctggtgttccctagattgattcctatccatgatctcacgtccagggatgatgatgattcccttgtaccaagtccacttatgctcaaaagtgaaaatgtacaagaggatggggtctatttattggaaaacggtgaggatggtctagtctacgtaggaaacatggtaaatccggctaccctggaacaaatattcggtgtctcttctttggctgcattaccagcccaggcaacattggagcagtttgacaacgaactctcgaggaagattaacgaagttgtaaatgaaattaggcgccagaggtgctcatacttgaggttgagactatgcagaaggggcgaaccatctggagattttttccggtcatttctaatagaggacaaggcacctggcgtcttctcctacgaggagtttctcgtgcatgtccacaggcagatccaaagcaagatgacctgaggggcccagatcctgtctgtagcatttcggtcagtagatggattgtaggtaccaaaacgagttcgatttctgcataaggagacagcgaagtggcgattccacatcactatggagcataatgtttgctcggacagtagaactcaggaatagaggcaccgtttttggagtggggtggtatatgtgttgtatacagagatgagaggcgttagtttttgtgttgtcattgtcgctgtgcatccttattgttttaccccttgtccaaaaagggatgcattattatgttgagaggaaggttatagaggtttcgcaataaaatgcacctagccaattgatagtatgaatcagatatataatctaatttatgactgcctattcgccttgtaccctgtcatgatgtt

SEQ ID NO: 200188 - DNA, 2345 bp, Zea Mays
ccaggcccgcctgagtacctgaccagagagagctatatctacttcgcccgcgcccgcggatcccctcgcctcgcgatcgccaccacagaccacaccaacaatcccctcccttctccccggggccgggcttgtcttcttcctcccgattcgttttctttttcttttcttccgctgctgcaaaatctcgcgctggcgcggcccgaggccagaggactccgatccttatccctcacgcatctcccgcctcgcctccgccacacgttccgcgcctctacagctctcgacctcgtctggatttttttccccgacccgattttcgcatcagctccttctgcccaccgggctcgtctcctcccctggtttctttttcgtcacttgtcaccgctagttcctttagagaaggtgtacccccattattccattagcggcctcactgacgagagagattttggcgtgactatccagagtctccaatcttttacacccaaaactcttctcagctaccggtgcggcatatcgcccctgtcggcggcgaacatttgagttctcgcgacgtgtctcgaggattctgtggtggaagatcggatcttttgctgcggattccagttgccaaccaagatgtcggctctcctcgatctactgatggggatctttcgccagcagaccctcggcggcgccgccctggagctcgccgcgctggcggcgccgctctcgctcgccgcgctcgtcggccttctcatcgggtgggcgtggcgcccgaggtgggcgggggtcgtcacggtcgacaacgcccaacagatggcgcagctccccgcggcggcgcctcctccggaccgcgccaccgccaccgcggtggtctctcgcaacgaggcggccgccgtcgtaccgagaactgtggtggctcatgcggcggccgaggacgagcagcagcagctggcggtcaacaccggtgacttgctgcacctctggcggctcgtcgacgagaaggacggtggcccgtcgtggattcacatgatggaccgcaccttaccaaccatgaggtaccaagcctggcggagagacccaccgagtggtccaccacagtaccgcagcagcacaatcttcgaggacgcgtcaccggaggttgtgagagatttcttctgggacgatgagttccggatgaagaacagctgggacgacatgcttcttcagcacgagacgctggaggagtgcaccgagactggaaccatggtggtccggtgggtcaggaaggctgcttatataaaccgacgatgcgtggttctcgcgtgcagttcccgttcttctgcagcgacagggagtacatcataggccgcaggatatgggcgtctgggaagacattttactgtgtgaccaagggtgttcctcgtccctccgttccaagacaaaacaaacctcgccgtgtggacttgtactactctagctggtgcatccgtccagttgagtcgagaaaaggcgacggtgcaatgagtgcatgcgaggtgctcttgttccaccacgaagacatggggattccatgggagatcgcgaagcttggcgtccggcaggggatgtggggctgcgtcaagaggatagagcctggccttcgggcgtaccaggtcgggaggaccgccggagaggctgtttccaagtgtgctgccatggcacaggtcaccaccaggttcagtgccgacgagctcgtcatcgcagggccgggcaacacggaggccagttcttcttcgtccggcgacggcgcagaggttggcaaggtgacgaagcactgggcgaacagcatacccaaggttctcatggtcggtggcgctgtggccctggcctgctgcaccttcgacggtgggttgttgaccaaggccgtcatcttcggcactgccaggaggtttgcaggagggccaggaaggcggtaggtacggtgtaacggtggacggaaagatccagcggcacaacacaaaacaagtgttgctgcactgcagcccgctgcgggttaataggttagaaatatagcatttgttacgaggacacatatagaagtattatggaagaaaaccgctgttagataagaaatacactgctgtgtattagtagttaataacaagaattcttggtttttgtatgtaaccatattgtggatcggatccattgttcttccccatggacactactactaccagatcgatgttgaccttgtggcagttgctgcagtttttttttgacagagtgtgcttagaataagaaaatttttctccaaagtaggcaaagatttgaacgtatttattcattcattcatcgtgtcgccttctccatacaacatggcaggaaggtaggtacttggc

SEQ ID NO: 200189 - DNA, 1084 bp, Zea Mays
  misc_feature (1)..(2): n is a, c, g, or t
nngaacaaaccagcccggggaagatggtcaaaatcagataccgacttgttttacgagggtcttcgacaaattggtagtgattttgcaatgatacaacaattattccctgataagactcgccatcaggtgcggcagaaatttaaatctgaggagagaaaaaatccattgctagtccatgatgctataactcatcgctcaggagataatttgtatttcaaaaaggtaattaagcagctcaacattgaagatgttgtgctgccagatattaaaagtacacaaaaacaagatggtgcatcaagtgaaagaggccctggaaatgagaatgtactggatgatttatacggggaggaaaatagttcaaattggttgaacgaagagcatgacgtacagatggctgatgtggaagaagagcatggcgaacagatggatgatgtggaagaagagcatgatcttggaaatgatggtggtgatgatgatcttggggatgtttttgcttggtactagtttgatcatggctgggattaggactcacgatattatgattatgattctgctaatgttttgaggtacctgacttgctgactgttgagttgattgctaactagaggaagtgacagtcgacgatgcccaattgtatcagcatattcttggtgattagcatcagtaccagtggttgtgacagatatgtcctgctggatgccgagttttgcaagccgatggaaggtgtctgtaacgagttatagaatttgtatttttttattaccttgcacacgaatatagtgttgatggatggtagatacgtcacgtttacctttatttatagctactttatcttagttgttgttgctctcatgctctgtgactttaaaagcagtatcggtttccgtagagcctcagttggcatcttttttttttcctggtagccttcctggagaaagaatgcaagattgaatggtgtctatgctcttttttttagctcccgtgaggaggttgtgtattcctatttgtatagttgcatgccgagtgtggtgctagtgctcccaaattaggaggggggaaaacagagggcaaatgaattcgagcg

SEQ ID NO: 200190 - DNA, 659 bp, Zea Mays
gcccggggaagatggtcaaaatcagataccgacttgttttacgagggtcttcgacaaattggtagtgattttgcaatgatacaacaattattccctgataagactcgccatcaggtgcggcagaaatttaaatctgaggagagaaaaaatccattgctagtccatgatgctataactcatcgctcaggagataatttgtatttcaaaaaggtaattaagcagctcaacattgaagatgttgtgctgccagatattaaaagtacacaaaaacaagatggtgcatcaagtgaaagaggccctggaaatgagaatgtactggatgatttatacggggaggaaaatagttcaaattggttgaacgaagagcatgacgtacagatggctgatgtggaagaagagcatggcgaacagatggatgatgtggatctcggaaatgatggtggtgatgatgatcttggggatgtttttgattggtactagtttgatcatggctggatgatgtggaagaagagcatgatcttggaaatgatggtggtgatgatgatcttggggatgtttttgcttggtactagtttgatcatggctgggattaggactcacgatattatgattatgattctgctaatgttttgaggtacattgatggctgggccctgttg

SEQ ID NO: 200191 - DNA, 2138 bp, Zea Mays
acctgggccgtcagactcgccgcgcggcgcggccccgaccacatcgccgattcctcgtttcctccgcacccgcacgcttcccacccgctgccccgcgcccagccgtcgccgtgatcgccagagcgttcctctgccgagccgttcggccggtccactcccgcgaagcttccagtagaggcgaccttcggatcgagtctcggccgccgaggagtcgaaggccatggaagtggtggcgtcggcgccggggaaggtgctcatcgcgggaggatacctcgtgctggagcgccccaacgccggcctagtcctcagcaccaccgcccgcttctacgccgtcgtccgccccctccgcgacagcctccccgccgacgcttgggcctgggcgtggacggatgtcaaagtgacttcccctcagctctcacgggaggccacatacaagctgtccctaacgaagtcgacgctgcaattgacgtctgcgagggaatctacaaacccttttgtggagcaggccatacaattctcggtagcagctgctaaagcgaccattattgataaggagaggaaggatgtagtagataagttgctgctgcaaggtctgaacattacaattcttggatgcaatgatttctattcttatagaaagcagattgaagcacgcggtctccctcttactccagaggcactgctttcattgcctccattctcttcaatcacatttaactcagaggttgctaatggaacaatgactggagagaaatgtaaacctgaagtagccaaaactggacttgggtcatcagctgccatgaccacatcagttgttgcagctcttcttcactatcttggtgtcgttagcctctcatgtccaggacaatcttctggtgataatacaactacacgagaacttgacttggttcactctattgcccaaagtgcacattgtatagcacaggggaaaattggcagtggttttgatgttagtgctgctgtctatgggagtcaacgctatgtaaggttttctccagaaatactctcgtctcaggctacaggtgggactttcctcccagatgtagtatcagatattgttacacaaaggtgggatcatgagaataaacagttctcattacctcctctgatgacccttctccttggggaacctggaaccggaggatcatctactccatcaatggttggatctgtgaaacggtggcagaagtctgactctgagaaatgcaaagatacatggagtaaactggcctttgccaattcagcgctggagaaccaactgcgaatcttaaaaggactttctgaaaatcaccgagaggcatatgagtcggtagtgctatcctgtagccatctcacttatgagaagtggacagaggtggctactaaccaacatcaagaattaattattaaatcattgttggctgcaagggatgcttgccttgagataaggcttcacatgcgagagatgggcatagcagccggtgttccgattgagccagattcacaaacacggctacttgacgccactatgaatatggagggtgttttacttgctggagttccgggagctggtggcttcgatgcagtattctcagtgactttgggggatgcaagtaatgctgtagcaaatgcttggagctctgctggcgttctgccacttctcgttcgagaagactgccgtggtgtctcattggaagatgctgacccaagaacaagggaggcaaaataagctgcacgagatgaggcggaggagatgatggttgaagtcacatttcgaatttcgaatgtgggaggaaaagaccctgggccattggagagtcagggctcgtattcgcccgttgtagggaccacctcattggggatggtagctatgagaggccctctctctctcttgtcctgttggacgagttgacgtgcatctagggaggtgccctcgtatcaccacttggactggtctctcatgcatttagagttttagggttcaggatttagggagatgccctcgagacttgttgcagggatgtgctcgtgtcatgtagcggcatagacatgcgttgacttgtgccaggctcacgttgcacatggagctctctgtctgtctgctgcatcacagcgtgctcaggaagcgcgcagacctc

SEQ ID NO: 200192 - DNA, 2220 bp, Zea Mays
acctgggccgtcagactcgccgcgcggcgcggccccgaccacatcgccgattcctcgtttcctccgcacccgcacgcttcccacccgctgccccgcgcccagccgtcgccgtgatcgccagagcgttcctctgccgagccgttcggccggtccactcccgcgaagcttccagtagaggcgaccttcggatcgagtctcggccgccgaggagtcgaaggccatggaagtggtggcgtcggcgccggggaaggtgctcatcgcgggaggatacctcgtgctggagcgccccaacgccggcctagtcctcagcaccaccgcccgcttctacgccgtcgtccgccccctccgcgacagcctccccgccgacgcttgggcctgggcgtggacggatgtcaaagtgacttcccctcagctctcacgggaggccacatacaagctgtccctaacgaagtcgacgctgcaattgacgtctgcgagggaatctacaaacccttttgtggagcaggccatacaattctcggtagcagctgctaaagcgaccattattgataaggagaggaaggatgtagtagataagttgctgctgcaaggtctgaacattacaattcttggatgcaatgatttctattcttatagaaagcagattgaagcacgcggtctccctcttactccagaggcactgctttcattgcctccattctcttcaatcacatttaactcagaggttgctaatggaacaatgactggagagaaatgtaaacctgaagtagccaaaactggacttgggtcatcagctgccatgaccacatcagttgttgcagctcttcttcactatcttggtgtcgttagcctctcatgtccaggacaatcttctggtgataatacaactacacgagaacttgacttggttcactctattgcccaaagtgcacattgtatagcacaggggaaaattggcagtggttttgatgttagtgctgctgtctatgggagtcaacgctatgtaaggttttctccagaaatactctcgtctcaggctacaggtgggactttcctcccagatgtagtatcagatattgttacacaaaggtgggatcatgagaataaacagttctcattacctcctctgatgacccttctccttggggaacctggaaccggaggatcatctactccatcaatggttggatctgtgaaacggtggcagaagtctgactctgagaaatgcaaagatacatggagtaaactggcctttgccaattcagcgctggagaaccaactgcgaatcttaaaaggactttctgaaaatcaccgagaggcatatgagtcggtagtgctatcctgtagccatctcacttatgagaagtggacagaggtggctactaaccaacatcaagaattaattattaaatcattgttggctgcaagggatgcttgccttgagataaggcttcacatgcgagagatgggcatagcagccggtgttccgattgagccagattcacaaacacggctacttgacgccactatgaatatggagggtgttttacttgctggagttccgggagctggtggcttcgatgcagtattctcagtgactttgggggatgcaagtaatgctgtagcaaatgcttggagctctgctggcgttctgccacttctcgttcgagaagactgccgtggtgtctcattggaagatgctgacccaagaacaagggaggtatcggcagctgtatcgtccattcagattaattgattctactgttaatattctatttatgtattgtgccgaatgctaggaggcaaaataagctgcacgagatgaggcggaggagatgatggttgaagtcacatttcgaatttcgaatgtgggaggaaaagaccctgggccattggagagtcagggctcgtattcgcccgttgtagggaccacctcattggggatggtagctatgagaggccctctctctctcttgtcctgttggacgagttgacgtgcatctagggaggtgccctcgtatcaccacttggactggtctctcatgcatttagagttttagggttcaggatttagggagatgccctcgagacttgttgcagggatgtgctcgtgtcatgtagcggcatagacatgcgttgacttgtgccaggctcacgttgcacatggagctctctgtctgtctgctgcatcacagcgtgctcaggaagcgcgcagacctc

SEQ ID NO: 200193 - DNA, 1589 bp, Zea Mays
acctgggccgtcagactcgccgcgcggcgcggccccgaccacatcgccgattcctcgtttcctccgcacccgcacgcttcccacccgctgccccgcgcccagccgtcgccgtgatcgccagagcgttcctctgccgagccgttcggccggtccactcccgcgaagcttccagtagaggcgaccttcggatcgagtctcggccgccgaggagtcgaaggccatggaagtggtggcgtcggcgccggggaaggtgctcatcgcgggaggatacctcgtgctggagcgccccaacgccggcctagtcctcagcaccaccgcccgcttctacgccgtcgtccgccccctccgcgacagcctccccgccgacgcttgggcctgggcgtggacggatgtcaaagtgacttcccctcagctctcacgggaggccacatacaagctgtccctaacgaagtcgacgctgcaattgacgtctgcgagggaatctacaaacccttttgtggagcaggccatacaattctcggtagcagctgctaaagcgaccattattgataaggagaggaaggatgtagtagataagttgctgctgcaaggtctgaacattacaattcttggatgcaatgatttctattcttatagaaagcagattgaagcacgcggtctccctcttactccagaggcactgctttcattgcctccattctcttcaatcacatttaactcagaggttgctaatggaacaatgactggagagaaatgtaaacctgaagtagccaaaactggacttgggtcatcagctgccatgaccacatcagttgttgcagctcttcttcactatcttggtgtcgttagcctctcatgtccaggacaatcttctggtgataatacaactacacgagaacttgacttggttcactctattgcccaaagtgcacattgtatagcacaggggaaaattggcagtggttttgatgttagtgctgctgtctatgggagtcaacgctatgtaaggttttctccagaaatactctcgtctcaggctacaggtgggactttcctcccagatgtagtatcagatattgttacacaaaggtgggatcatgagaataaacagttctcattacctcctctgatgacccttctccttggggaacctggaaccggaggatcatctactccatcaatggttggatctgtgaaacggtggcagaagtctgactctgagaaatgcaaagatacatggagtaaactggcctttgccaattcagcgctggagaaccaactgcgaatcttaaaaggactttctgaaaatcaccgagaggcatatgagtcggtagtgctatcctgtagccatctcacttatgagaagtggacagaggtggctactaaccaacatcaagaattaattattaaatcattgttggctgcaagggatgcttgccttgagataaggcttcacatgcgagagatgggcatagcagccggtgttccgggtagaacagatgccctactctccggctgcctgctggaggttgcagctcataatgcagctggatggatggatggatccatggatcgatcgccaggtcccc

SEQ ID NO: 200194 - DNA, 1765 bp, Zea Mays
gcacacggatccatccccaacacggcaacacgccaacacccatcagtccatcacaggcgcagcgaactctgcgcttccacttctctctccaccgtccctttacccaaccaaccaccgcactgcgcgagggcggcgcggtctcaagccgggatggggtatctgccggcgctgggcgggaaggcggcccacctggtgaacgacctcgccactgtcatcctgaaccccgtctccgagcgcgagcgccagccacaccaccccacccacctcccgcttaatgtttctttctctcttataggaggccactgaaggagaagacacactattcgttgacgatgattctgaccaaaattctgatggtcctgacacatcttcattcagagcatttctgatgtcctttgtgccttcctcaactgccagcaagaattcaatggagaccatacctgagcataatctagatgtggaatacccaactttaacacctgttgggaaggcgtgcagtgggaggaaaggcctgtttagtagagggaagcattcccttggtaggattattagcaaagcaggacttggtaatttgagacagaaacagacccacagcattgatggtgaaatcataggccaaaccgaatcagttgcacctagatttgaagtgaagggttcaaaagaatcaactttgcacgataaattgccagctatgtctgaaccttctcttcttctgacagaaatgatgcgagctgttctttatacatctcttcctgtacttgttcaaggaaggaactggatgctggtatatagcacctggaggcatggaatatctttgtctactctgtatcgaagaagcaggctttgtgctggctactcacttttgatagttggggatcgaagaggggcagtttttggtggcttggtcgaggccccactgcaacctatcgtaaaaaggaagtatcaggtttgatatgcatgctgttgctgatttcaggatgcctatttcacactacgctgaatgtatttcatctaatgtttcagggaactaatgactgctttgtgttcaccaacgtagatggttgtcctgttatatgccatccaacaggtgctaataactattttacattttgctctaccgattatatggcaatgggaggtggtggtcacttcgcactttatctcgatggagacctgtaatctctgttcttcctttccatcacatgacacaaagttcctagtttctaggttttgtatgtatattgatggaaaattcctagaaagtatgactggttctagctccacctccgagacttttaacaacccatgcttatcccatacccaggaattcaaaatcaaagatgtcgagctgtggggtttcgtcaatgcttccaagtttgaagagatgctcatgatctgccgcaccgaaaagcaaggaatttggaacctgtgaccgtttggagttcactgagctgttgcttgttggtgtcaaccgatcctctgatgtggcttgtactgttgtacagttttgtagtaaacgtttgtatagcatgtagagagtttccatatggaatcagaagttgagaacatgtagagttttgctttgtagaataccaaatgccatttacagagaaaataccagtcactaacactcaaatgtatatatttcatagaaactaagaatgccctgcctacgttgcagatggaagttttaaaactggaaattgctatttgtatgcccggtgggggttgccactcgcaacaaccgctgatcttgcattttgag

SEQ ID NO: 200195 - DNA, 1575 bp, Zea Mays
gcacacggatccatccccaacacggcaacacgccaacacccatcagtccatcacaggcgcagcgaactctgcgcttccacttctctctccaccgtccctttacccaaccaaccaccgcactgcgcgagggcggcgcggtctcaagccgggatggggtatctgccggcgctgggcgggaaggcggcccacctggtgaacgacctcgccactgtcatcctgaaccccgtctccgagcgcgagcgccagccacaccaccccacccacctcccggaggccactgaaggagaagacacactattcgttgacgatgattctgaccaaaattctgatggtcctgacacatcttcattcagagcatttctgatgtcctttgtgccttcctcaactgccagcaagaattcaatggagaccatacctgagcataatctagatgtggaatacccaactttaacacctgttgggaaggcgtgcagtgggaggaaaggcctgtttagtagagggaagcattcccttggtaggattattagcaaagcaggacttggtaatttgagacagaaacagacccacagcattgatggtgaaatcataggccaaaccgaatcagttgcacctagatttgaagtgaagggttcaaaagaatcaactttgcacgataaattgccagctatgtctgaaccttctcttcttctgacagaaatgatgcgagctgttctttatacatctcttcctgtacttgttcaaggaaggaactggatgctggtatatagcacctggaggcatggaatatctttgtctactctgtatcgaagaagcaggctttgtgctggctactcacttttgatagttggggatcgaagaggggcagtttttggtggcttggtcgaggccccactgcaacctatcgtaaaaaggaagtatcagggaactaatgactgctttgtgttcaccaacgtagatggttgtcctgttatatgccatccaacaggtgctaataactattttacattttgctctaccgattatatggcaatgggaggtggtggtcacttcgcactttatctcgatggagaccttatgactggttctagctccacctccgagacttttaacaacccatgcttatcccatacccaggaattcaaaatcaaagatgtcgagctgtggggtttcgtcaatgcttccaagtttgaagagatgctcatgatctgccgcaccgaaaagcaaggaatttggaacctgtgaccgtttggagttcactgagctgttgcttgttggtgtcaaccgatcctctgatgtggcttgtactgttgtacagttttgtagtaaacgtttgtatagcatgtagagagtttccatatggaatcagaagttgagaacatgtagagttttgctttgtagaataccaaatgccatttacagagaaaataccagtcactaacactcaaatgtatatatttcatagaaactaagaatgccctgcctacgttgcagatggaagttttaaaactggaaattgctatttgtatgcccggtgggggttgccactcgcaacaaccgctgatcttgcattttgag

SEQ ID NO: 200196 - DNA, 2990 bp, Zea Mays
atcgtgacgacggggagcgcaggggcgccagcgttgcttgggaagatgggtctgccgtgggggagtccaggcatgctacagatgagcacaggcgcgccgtggggtagagcaaaccaccgtcgtcgttgctgatggggaggccggtggtcaccatgaccgcagggccggtgctggggagggcagggccacaacggggcctgtgggtccgacgaagaaggcctactggggacgttgttactgttgaatccccccgttccccaggccaggccacatggtgatgtgactgatctaggggttgtaggagggccaggcgggagcgggtgcctgttcggcttgggtgcgctgcgtctagagggaagcatcgccaaggttgaccatggagcagattagagctgctagggggcctggcggctatgctaggaaggaaaacgaaaacgatagggaaaatctaggtctctagatacataccatgacagaatgagctgccagatattggattaatggtagaggtacaagggggtataatatataggcatggattgtctaaggtttatagaaagcatgcaatcaatagaaatccttgcataatctaaagcacccaatcaatgaagatctttgtgtaatctatgatttgttctcgaaagcgtaggagagctacacatcatatatataaagaagaaaaaggtctaaaataggccaatacaaaaaactggaaaaaaaacagtggccaagaccagctcatggcggccgaaagcaacaaaacataaaaacatccaacattacagctaggagagactaaatccgcggcaactaccataaacatcaaggcacatatggcagacatgatcaatctaattacatagtctaacactactatgtactaattattgctcaaaagataacatacgatatacacatttttgttcttttcttctcatctttgtttgtttgggattcctacggaagggcctctagctgtgttggttaggtggtccgagtagcactcctcagatcctgggttggactccccgtggaagcgaattttaggctgtggttaaaaaatgtcctcgtttgtcccatgccaaagcacaggtctaaggcccagctccggccgtggtcgttctcacatggactacggtgccgctgtgtacgcgtggggcttatggcgtagctttagcgtcgctaaagcgataaggcgagcgtggaggcataaggcgtcttgtcgccttgcctgcgagagtaagggcggcagcgcgtgtcgcatatctcccgccggcggcgcgcagggaggagagctatggagagggagaagctgctgctatcggctaagggacaatctgctgctagcagctgagaaggtaaccctaaaattgttggactgggttgactggttatgggcttcttcttttgttctttttctttttcctgattctctcgtctactaggccgaaataggcctattaaggccttacagttgtgctatcttttttattacttccaaattagtgatatataaataaaacgagggtggagggctagcgcagaggccgagtgaggatggaggcgggggaggcgtgcacgtgcgctgagggggagtcgggggcatgggtgtgcgcactctagcagcgcggaaggggaggtggccgtagccatattagcgccaggcgcccacactacgttcttaatagaatagtatagatgtgatctaatttttaataattatatatataattgaggtgtcgcctcgcctctcttaaaagttaaaaagggggcgctcgcctttacttgccttaccgccttaataactatgggtggggcaggggttcgagagtttattcgacctgcgtgagaagatcttctcaatataatgccgtggggccggtcttaccccgcaggtccagtttggattttggtaatactcagtgttattaaaactacatttaaacgtcgtttaaactacgtttaaacgtcaaaaccctaattagaggttgaaaccgcgttttagtattttggcattctaaactgtaaaacgcagtgtttcatgcgttttagaccattagctacttttgggcctagtctgttatttacttttggggtccaattcaactcatgggtgaagttttggtaagccactcatttctttgttttggtatttaactccataatattgtctaaaattatgatatattggtatttttctatgttgtttaaaactacgtttaaactttgtttaaacgtttaaaagtcaaaatttcacccatgagtgtttcgacattttatcgttttaataaccttgttaatactacaatgtttttgcttaaactataggtgctagagatgttgacaaagaagatgatatgtttgtcctcattgctccacaaaatgctgttggaaactgcataattgatgatatgagagctatgactgatgctgctggtgatagacctgtgattcttgtaaatcctcgcctaaaggatatgcctgcatcaagtggtgttatgcaaacaatgggaagggatattaggctgaagtatgctgcatcatttgagacatgctattcattccgtcttctctactacgctggttcattctatcctattatgggagctttaaggatggcttatccaaataaatatgagatttatcgaagggttgacactctcaatggaaaagagaactatattcttatagctgaattcacgaacaagccaactcctgatgagatcaccagtgctttcaaaggacaaaaaagggaagaaaaggcatcttctggattctggggtttcttaagtggtttattttaagtcaagcgatctgctgtacggcgatgcaatcctccttgtatatttttatctgataatggtttggtgccgtgacccacagcgacaaggtaaagcaccttggcgccgagatctcaggcctgcgttgtgggtgactgggtgtggcctggtaacttggcactgatgttgtgggaccttggctccacaggc

SEQ ID NO: 200197 - DNA, 1148 bp, Zea Mays
gcatgctacagatgagcacaggtgctagagatgttgacaaagaagatgatatgtttgtcctcattgctccacaaaatgctgttggaaactgcataattgatgatatgagagctatgactgatgctgctggtgatagacctgtgattcttgtaaatcctcgcctaaaggatatgcctgcatcaagtggtgttatgcaaacaatgggaagggatattaggctgaagtatgctgcatcatttgagacatgctattcattccgtcttctctactacgctggttcattctatcctattatgggagctttaaggatggcttatccaaataaatatgagatttatcgaagggttgacactctcaatggaaaagagaactatattcttatagctgaattcacgaacaagccaactcctgatgagatcaccagtgctttcaaaggacaaaaaagggaagaaaaggcatcttctggattctggggtttcttaagtggtttattttaagtcaagcgatctgctgtacggcgatgcaatcctccttgtatatttttatctgataatggatgtaatatggttcggaaaatatccgttcggatcaggattcgaagatggtgaacactggttcagatggaattttcggatatccggacttttttcggataacggatacgaatacgaatattttgttcggatatcgaattcgaatacaatatgtctgatattcgtcggatatcgaatatctggatattttctcggataaatcttctcggatatccggatatcttatctggatagctgtgtgcattttgttgattgtttgtagaaagaaattaataatacacaaatagcctcaaaaattcatgaaaatttatggaggcataccatatgtccacatataatcctccaaaatatttggaccataaaatccacaatattgtagtgtttctttcatttcactttcacttgtgtgaattacatgagaaatcactctaattatccaagttcactttatcattttcatatggagacttgaggttatattcttatagaatgtttattagttttggtaacttatttgcattttaatgattttatacaaaataaattaataacacgcatataggctaaaaattcatgttttttacaaaaaaaaaa

SEQ ID NO: 200198 - DNA, 1968 bp, Zea Mays
ggtcaccatgaccgcagggccggtgctggggagggcagggccacaacggggcctgtgggtccgacgaagaaggcctactggggacgttgttactgttgaatccccccgttccccaggccaggccacatggtgatgtgactgatctaggggttgtaggagggccaggcgggagcgggtgcctgttcggcttgggtgcgctgcgtctagagggaagcatcgccaaggttgaccatggagcagattagagctgctagggggcctggcggctatgctaggaaggaaaacgaaaacgatagggaaaatctaggtctctagatacataccatgacagaatgagctgccagatattggattaatggtagaggtacaagggggtataatatataggcatggattgtctaaggtttatagaaagcatgcaatcaatagaaatccttgcataatctaaagcacccaatcaatgaagatctttgtgtaatctatgatttgttctcgaaagcgtaggagagctacacatcatatatataaagaagaaaaaggtctaaaataggccaatacaaaaaactggaaaaaaaacagtggccaagaccagctcatggcggccgaaagcaacaaaacataaaaacatccaacattacagctaggagagactaaatccgcggcaactaccataaacatcaaggcacatatggcagacatgatcaatctaattacatagtctaacactactatgtactaattattgctcaaaagataacatacgatatacacatttttgttcttttcttctcatctttgtttgtttgggattcctacggaagggcctctagctgtgttggttaggtggtccgagtagcactcctcagatcctgggttggactccccgtggaagcgaattttaggctgtggttaaaaaatgtcctcgtttgtcccatgccaaagcacaggtctaaggcccagctccggccgtggtcgttctcacatggactacggtgccgctgtgtacgcgtggggcttatggcgtagctttagcgtcgctaaagcgataaggcgagcgtggaggcataaggcgtcttgtcgccttgcctgcgagagtaagggcggcagcgcgtgtcgcatatctcccgccggcggcgcgcagggaggagagctatggagagggagaagctgctgctatcggctaagggacaatctgctgctagcagctgagaaggtgctagagatgttgacaaagaagatgatatgtttgtcctcattgctccacaaaatgctgttggaaactgcataattgatgatatgagagctatgactgatgctgctggtgatagacctgtgattcttgtaaatcctcgcctaaaggatatgcctgcatcaagtggtgttatgcaaacaatgggaagggatattaggctgaagtatgctgcatcatttgagacatgctattcattccgtcttctctactacgctggttcattctatcctattatgggagctttaaggatggcttatccaaataaatatgagatttatcgaagggttgacactctcaatggaaaagagaactatattcttatagctgaattcacgaacaagccaactcctgatgagatcaccagtgctttcaaaggacaaaaaagggaagaaaaggcatcttctggattctggtaacttatgctcctggtttttgtttctccattccaatactaacttcctaccaacatgaatatgggttactaaacatttcaatccttgtgtaggggtttcttaagtggtttattttaagtcaagcgatctgctgtacggcgatgcaatcctccttgtatatttttatctgataatggtttggtgccgtgacccacagcgacaaggtaaagcaccttggcgccgagatctcaggcctgcgttgtgggtgactgggtgtggcctggtaacttggcactgatgttgtgggaccttggctccacaggc

SEQ ID NO: 200199 - DNA, 2340 bp, Zea Mays
ggtcaccatgaccgcagggccggtgctggggagggcagggccacaacggggcctgtgggtccgacgaagaaggcctactggggacgttgttactgttgaatccccccgttccccaggccaggccacatggtgatgtgactgatctaggggttgtaggagggccaggcgggagcgggtgcctgttcggcttgggtgcgctgcgtctagagggaagcatcgccaaggttgaccatggagcagattagagctgctagggggcctggcggctatgctaggaaggaaaacgaaaacgatagggaaaatctaggtctctagatacataccatgacagaatgagctgccagatattggattaatggtagaggtacaagggggtataatatataggcatggattgtctaaggtttatagaaagcatgcaatcaatagaaatccttgcataatctaaagcacccaatcaatgaagatctttgtgtaatctatgatttgttctcgaaagcgtaggagagctacacatcatatatataaagaagaaaaaggtctaaaataggccaatacaaaaaactggaaaaaaaacagtggccaagaccagctcatggcggccgaaagcaacaaaacataaaaacatccaacattacagctaggagagactaaatccgcggcaactaccataaacatcaaggcacatatggcagacatgatcaatctaattacatagtctaacactactatgtactaattattgctcaaaagataacatacgatatacacatttttgttcttttcttctcatctttgtttgtttgggattcctacggaagggcctctagctgtgttggttaggtggtccgagtagcactcctcagatcctgggttggactccccgtggaagcgaattttaggctgtggttaaaaaatgtcctcgtttgtcccatgccaaagcacaggtctaaggcccagctccggccgtggtcgttctcacatggactacggtgccgctgtgtacgcgtggggcttatggcgtagctttagcgtcgctaaagcgataaggcgagcgtggaggcataaggcgtcttgtcgccttgcctgcgagagtaagggcggcagcgcgtgtcgcatatctcccgccggcggcgcgcagggaggagagctatggagagggagaagctgctgctatcggctaagggacaatctgctgctagcagctgagaaggtgctagagatgttgacaaagaagatgatatgtttgtcctcattgctccacaaaatgctgttggaaactgcataattgatgatatgagagctatgactgatgctgctggtgatagacctgtgattcttgtaaatcctcgcctaaaggatatgcctgcatcaagtggtgttatgcaaacaatgggaagggatattaggctgaagtatgctgcatcatttgagacatgctattcattccgtcttctctactacgctggttcattctatcctattatgggagctttaaggatggcttatccaaataaatatgagatttatcgaagggttgacactctcaatggaaaagagaactatattcttatagctgaattcacgaacaagccaactcctgatgagatcaccagtgctttcaaaggacaaaaaagggaagaaaaggcatcttctggattctggggtttcttaagtggtttattttaagtcaagcgatctgctgtacggcgatgcaatcctccttgtatatttttatctgataatggatgtaatatggttcggaaaatatccgttcggatcaggattcgaagatggtgaacactggttcagatggaattttcggatatccggacttttttcggataacggatacgaatacgaatattttgttcggatatcgaattcgaatacaatatgtctgatattcgtcggatatcgaatatctggatattttctcggataaatcttctcggatatccggatatcttatctggatagctgtgtgcattttgttgattgtttgtagaaagaaattaataatacacaaatagcctcaaaaattcatgaaaatttatggaggcataccatatgtccacatataatcctccaaaatatttggaccataaaatccacaatattgtagtgtttctttcatttcactttcacttgtgtgaattacatgagaaatcactctaattatccaagttcactttatcattttcatatggagacttgaggttatattcttatagaatgtttattagttttggtaacttatttgcattttaatgattttatacaaaataaattaataacacgcatataggctaaaaattcatgttttttacaaaaaaaaaa

SEQ ID NO: 200200 - DNA, 1741 bp, Zea Mays
ctaaaacttccacttgttctagccgtcacggcgctaccagttctctgccgcatctctctgttcctctgtttcttcctcttctctaatacattccactagtaatctgttaacacttcgtcatgaagttcggcggctcgtcgctcgcgtcagccgagcggatgcaggaggtggccgacctcatccttagcttcctcggcgagatgcccgtcgtcgtcctctccgccatggggaagaccaccaataacctcctcctaggaccctccatttctagctctcagcgcctgggccggagagaaggcagtgagctgcggtggaggaggggcgtccgaaatccctgagctcgctgtcatcagggagctgaatcttaggacaattgatgagctcggtttagataagtcgatagtttcaggtatgttgttgtttgctccactctgctcttggaacgcctcagctgttcctcttgctctatcatgaatgcttctgttatacaatgggatgtcgttctcttggatgtgccaaagttttctctccccttagtctgaataacaattcctggtggatgtatgtatgtatgtattctcttggatgtgcgaaagttttccccttggatgtgcgaaacacatttactcctcactgcaatccacgcctccactctcgacccctcctccttcctcctctccctagggaccgttctccccaacacgcaggggtagcgtaggaggtgttgtggcggcattatctaggaagcggtctgtggacgtgaggcggatcaacccgaaggtgcctaaggaggaggctgtcaccatctccggtcgactcgtccagatcctctccgaccatgggcccctcaccatcggcaacacctggaacaacaccaaggtacccaatcaaccagtcagtcaagcagagtggcaaaagccggggagcgatgcaggcgtcggagcagcaacaacggaggactctgctggtgtagatgagaaggaaacacacaaagagcatcaaaagcaagttcaacgatcttatgtcaacccatccacctctgaatgaggcatattcagatgtgtgtgtattcagcactcatgctgccttcagtttacggagctcaatatgttacatcgacctttccaacctgccggcagaactcaagaagctcaagcacaagaagtgcctcgtccagtccccccaactccttcatggtccaattcgcttgtggcataggaatcccatcctagattcaatagaggggttgcaatgccggcatcgccatagctggaaatcgagcactgacggacaccgagcgccgagatgggccgtcttgtccaccgccgcaagaaccgcatgcgttggatccatccttacacctgctcctacttccgcgccagcagcccaacactccgacgacacgagctcctccctataaaagtgacatctttactgtatagataacgaatggttatagttatttattcttatgtccaagtggtattggatttttttagcttgggattaaagaaaagacaatcatgtactttgcatcttttttgtatttatgttttatgctaaattgtggaataacactatattagttgttagcaaagaatttgtgagatattaaggttgatgataatatatgttgttatttcatttaatcattgtgtattaatattttatcgaataatttgtgtaccgtcgcaacgcacgggcactatactagtagagtcctaaaatccatccacctgcc

SEQ ID NO: 200201 - DNA, 910 bp, Zea Mays
ctaaaacttccacttgttctagccgtcacggcgctaccagttctctgccgcatctctctgttcctctgtttcttcctcttctctaatacattccactagtaatctgttaacacttcgtcatgaagttcggcggctcgtcgctcgcgtcagccgagcggatgcaggaggtggccgacctcatccttagcttcctcggcgagatgcccgtcgtcgtcctctccgccatggggaagaccaccaataacctcctcctaggaccctccatttctagctctcagcgcctgggccggagagaaggcagtgagctgcggtggaggaggggcgtccgaaatccctgagctcgctgtcatcagggagctgaatcttaggacaattgatgagctcggtttagataagtcgatagtttcagggaccgttctccccaacacgcaggggtagcgtaggaggtgttgtggcggcattatctaggaagcggtctgtggacgtgaggcggatcaacccgaaggtgcctaaggaggaggctgtcaccatctccggtcgactcgtccagatcctctccgaccatgggcccctcaccatcggcaacacctggaacaacaccaaggtacccaatcaaccagtcagtcaagcagagtggcaaaagccggggagcgatgcaggcgtcggagcagcaacaacggaggaatgagaaggaaacacacaaagagcatcaaaagcaagttcaacgatcttatgtcaacccatccacctctgaatgaggcatattcagatgtgtgtgtattcagcactcatgctgccttcagtttacggagctcaatatgttacatcgacctttccaacctgccggcagaactcaagaagctcaagcacaagaagtgcctcgtccagtccccccaactccttcatggta

SEQ ID NO: 200202 - DNA, 1134 bp, Zea Mays
ctaaaacttccacttgttctagccgtcacggcgctaccagttctctgccgcatctctctgttcctctgtttcttcctcttctctaatacattccactagtaatctgttaacacttcgtcatgaagttcggcggctcgtcgctcgcgtcagccgagcggatgcaggaggtggccgacctcatccttagcttcctcggcgagatgcccgtcgtcgtcctctccgccatggggaagaccaccaataacctcctcctaggaccctccatttctagctctcagcgcctgggccggagagaaggcagtgagctgcggtggaggaggggcgtccgaaatccctgagctcgctgtcatcagggagctgaatcttaggacaattgatgagctcggtttagataagtcgatagtttcaggtatgttgttgtttgctccactctgctcttggaacgcctcagctgttcctcttgctctatcatgaatgcttctgttatacaatgggatgtcgttctcttggatgtgccaaagttttctctccccttagtctgaataacaattcctggtggatgtatgtatgtatgtattctcttggatgtgcgaaagttttccccttggatgtgcgaaacacatttactcctcactgcaatccacgcctccactctcgacccctcctccttcctcctctccctagggaccgttctccccaacacgcaggggtagcgtaggaggtgttgtggcggcattatctaggaagcggtctgtggacgtgaggcggatcaacccgaaggtgcctaaggaggaggctgtcaccatctccggtcgactcgtccagatcctctccgaccatgggcccctcaccatcggcaacacctggaacaacaccaaggtacccaatcaaccagtcagtcaagcagagtggcaaaagccggggagcgatgcaggcgtcggagcagcaacaacggaggactctgctggtgtagatgagaaggaaacacacaaagagcatcaaaagcaagttcaacgatcttatgtcaacccatccacctctgaatgaggcatattcagatgtgtgtgtattcagaactcaagaagctcaagcacaagaagtgcctcgtccagtccccccaactccttcatggta

SEQ ID NO: 200203 - DNA, 1205 bp, Zea Mays
ctaaaacttccacttgttctagccgtcacggcgctaccagttctctgccgcatctctctgttcctctgtttcttcctcttctctaatacattccactagtaatctgttaacacttcgtcatgaagttcggcggctcgtcgctcgcgtcagccgagcggatgcaggaggtggccgacctcatccttagcttcctcggcgagatgcccgtcgtcgtcctctccgccatggggaagaccaccaataacctcctcctaggaccctccatttctagctctcagcgcctgggtcggggccggagagaaggcagtgagctgcggtggaggaggggcgtccgaaatccctgagctcgctgtcatcagggagctgaatcttaggacaattgatgagctcggtttagataagtcgatagtttcaggtatgttgttgtttgctccactctgctcttggaacgcctcagctgttcctcttgctctatcatgaatgcttctgttatacaatgggatgtcgttctcttggatgtgccaaagttttctctccccttagtctgaataacaattcctggtggatgtatgtatgtatgtattctcttggatgtgcgaaagttttccccttggatgtgcgaaacacatttactcctcactgcaatccacgcctccactctcgacccctcctccttcctcctctccctagggaccgttctccccaacacgcaggggtagcgtaggaggtgttgtggcggcattatctaggaagcggtctgtggacgtgaggcggatcaacccgaaggtgcctaaggaggaggctgtcaccatctccggtcgactcgtccagatcctctccgaccatgggcccctcaccatcggcaacacctggaacaacaccaaggtacccaatcaaccagtcagtcaagcagagtggcaaaagccggggagcgatgcaggcgtcggagcagcaacaacggaggactctgctggtgtagatgagaaggaaacacacaaagagcatcaaaagcaagttcaacgatcttatgtcaacccatccacctctgaatgaggcatattcagatgtgtgtgtattcagcactcatgctgccttcagtttacggagctcaatatgttacatcgacctttccaacctgccggcagaactcaagaagctcaagcacaagaagtgcctcgtccagtccccccaactccttcatggta

SEQ ID NO: 200204 - DNA, 1181 bp, Zea Mays
ctaaaacttccacttgttctagccgtcacggcgctaccagttctctgccgcatctctctgttcctctgtttcttcctcttctctaatacattccactagtaatctgttaacacttcgtcatgaagttcggcggctcgtcgctcgcgtcagccgagcggatgcaggaggtggccgacctcatccttagcttcctcggcgagatgcccgtcgtcgtcctctccgccatggggaagaccaccaataacctcctcctaggaccctccatttctagctctcagcgcctgggccggagagaaggcagtgagctgcggtggaggaggggcgtccgaaatccctgagctcgctgtcatcagggagctgaatcttaggacaattgatgagctcggtttagataagtcgatagtttcaggtatgttgttgtttgctccactctgctcttggaacgcctcagctgttcctcttgctctatcatgaatgcttctgttatacaatgggatgtcgttctcttggatgtgccaaagttttctctccccttagtctgaataacaattcctggtggatgtatgtatgtatgtattctcttggatgtgcgaaagttttccccttggatgtgcgaaacacatttactcctcactgcaatccacgcctccactctcgacccctcctccttcctcctctccctagggaccgttctccccaacacgcaggggtagcgtaggaggtgttgtggcggcattatctaggaagcggtctgtggacgtgaggcggatcaacccgaaggtgcctaaggaggaggctgtcaccatctccggtcgactcgtccagatcctctccgaccatgggcccctcaccatcggcaacacctggaacaacaccaaggtacccaatcaaccagtcagtcaagcagagtggcaaaagccggggagcgatgcaggcgtcggagcagcaacaacggaggactctgctggtgtagatgagaaggaaacacacaaagagcatcaaaagcaagttcaacgatcttatgtcaacccatccacctctgaatgaggcatattcagatgtgtgtgtattcagtttacggagctcaatatgttacatcgacctttccaacctgccggcagaactcaagaagctcaagcacaagaagtgcctcgtccagtccccccaactccttcatggta

SEQ ID NO: 200205 - DNA, 906 bp, Zea Mays
ctaaaacttccacttgttctagccgtcacggcgctaccagttctctgccgcatctctctgttcctctgtttcttcctcttctctaatacattccactagtaatctgttaacacttcgtcatgaagttcggcggctcgtcgctcgcgtcagccgagcggatgcaggaggtggccgacctcatccttagcttcctcggcgagatgcccgtcgtcgtcctctccgccatggggaagaccaccaataacctcctcctaggaccctccatttctagctctcagcgcctgggccggagagaaggcagtgagctgcggtggaggaggggcgtccgaaatccctgagctcgctgtcatcagggagctgaatcttaggacaattgatgagctcggtttagataagtcgatagtttcagggaccgttctccccaacacgcaggggtagcgtaggaggtgttgtggcggcattatctaggaagcggtctgtggacgtgaggcggatcaacccgaaggtgcctaaggaggaggctgtcaccatctccggtcgactcgtccagatcctctccgaccatgggcccctcaccatcggcaacacctggaacaacaccaaggtacccaatcaaccagtcagtcaagcagagtggcaaaagccggggagcgatgcaggcgtcggagcagcaacaacggaggactctgctggtgtagatgagaaggaaacacacaaagagcatcaaaagcaagttcaacgatcttatgtcaacccatccacctctgaatgaggcatattcagatgtgtgtgtattcagtttacggagctcaatatgttacatcgacctttccaacctgccggcagaactcaagaagctcaagcacaagaagtgcctcgtccagtccccccaactccttcatggta

SEQ ID NO: 200206 - DNA, 859 bp, Zea Mays
ctaaaacttccacttgttctagccgtcacggcgctaccagttctctgccgcatctctctgttcctctgtttcttcctcttctctaatacattccactagtaatctgttaacacttcgtcatgaagttcggcggctcgtcgctcgcgtcagccgagcggatgcaggaggtggccgacctcatccttagcttcctcggcgagatgcccgtcgtcgtcctctccgccatggggaagaccaccaataacctcctcctaggaccctccatttctagctctcagcgcctgggccggagagaaggcagtgagctgcggtggaggaggggcgtccgaaatccctgagctcgctgtcatcagggagctgaatcttaggacaattgatgagctcggtttagataagtcgatagtttcagggaccgttctccccaacacgcaggggtagcgtaggaggtgttgtggcggcattatctaggaagcggtctgtggacgtgaggcggatcaacccgaaggtgcctaaggaggaggctgtcaccatctccggtcgactcgtccagatcctctccgaccatgggcccctcaccatcggcaacacctggaacaacaccaaggtacccaatcaaccagtcagtcaagcagagtggcaaaagccggggagcgatgcaggcgtcggagcagcaacaacggaggactctgctggtgtagatgagaaggaaacacacaaagagcatcaaaagcaagttcaacgatcttatgtcaacccatccacctctgaatgaggcatattcagatgtgtgtgtattcagaactcaagaagctcaagcacaagaagtgcctcgtccagtccccccaactccttcatggta

SEQ ID NO: 200207 - DNA, 967 bp, Zea Mays
ctaaaacttccacttgttctagccgtcacggcgctaccagttctctgccgcatctctctgttcctctgtttcttcctcttctctaatacattccactagtaatctgttaacacttcgtcatgaagttcggcggctcgtcgctcgcgtcagccgagcggatgcaggaggtggccgacctcatccttagcttcctcggcgagatgcccgtcgtcgtcctctccgccatggggaagaccaccaataacctcctcctaggaccctccatttctagctctcagcgcctgggtcggggtgctcgattctttcgcttactagctaacaaggctagatgtgcgtgtgcctgattcgttgtctgtgtaggccggagagaaggcagtgagctgcggtggaggaggggcgtccgaaatccctgagctcgctgtcatcagggagctgaatcttaggacaattgatgagctcggtttagataagtcgatagtttcagggaccgttctccccaacacgcaggggtagcgtaggaggtgttgtggcggcattatctaggaagcggtctgtggacgtgaggcggatcaacccgaaggtgcctaaggaggaggctgtcaccatctccggtcgactcgtccagatcctctccgaccatgggcccctcaccatcggcaacacctggaacaacaccaaggtacccaatcaaccagtcagtcaagcagagtggcaaaagccggggagcgatgcaggcgtcggagcagcaacaacggaggaatgagaaggaaacacacaaagagcatcaaaagcaagttcaacgatcttatgtcaacccatccacctctgaatgaggcatattcagatgtgtgtgtattcagtttacggagctcaatatgttacatcgacctttccaacctgccggcagaactcaagaagctcaagcacaagaagtgcctcgtccagtccccccaactccttcatggta

SEQ ID NO: 200208 - DNA, 920 bp, Zea Mays
ctaaaacttccacttgttctagccgtcacggcgctaccagttctctgccgcatctctctgttcctctgtttcttcctcttctctaatacattccactagtaatctgttaacacttcgtcatgaagttcggcggctcgtcgctcgcgtcagccgagcggatgcaggaggtggccgacctcatccttagcttcctcggcgagatgcccgtcgtcgtcctctccgccatggggaagaccaccaataacctcctcctaggaccctccatttctagctctcagcgcctgggtcggggtgctcgattctttcgcttactagctaacaaggctagatgtgcgtgtgcctgattcgttgtctgtgtaggccggagagaaggcagtgagctgcggtggaggaggggcgtccgaaatccctgagctcgctgtcatcagggagctgaatcttaggacaattgatgagctcggtttagataagtcgatagtttcagggaccgttctccccaacacgcaggggtagcgtaggaggtgttgtggcggcattatctaggaagcggtctgtggacgtgaggcggatcaacccgaaggtgcctaaggaggaggctgtcaccatctccggtcgactcgtccagatcctctccgaccatgggcccctcaccatcggcaacacctggaacaacaccaaggtacccaatcaaccagtcagtcaagcagagtggcaaaagccggggagcgatgcaggcgtcggagcagcaacaacggaggaatgagaaggaaacacacaaagagcatcaaaagcaagttcaacgatcttatgtcaacccatccacctctgaatgaggcatattcagatgtgtgtgtattcagaactcaagaagctcaagcacaagaagtgcctcgtccagtccccccaactccttcatggta

SEQ ID NO: 200209 - DNA, 1081 bp, Zea Mays
ctaaaacttccacttgttctagccgtcacggcgctaccagttctctgccgcatctctctgttcctctgtttcttcctcttctctaatacattccactagtaatctgttaacacttcgtcatgaagttcggcggctcgtcgctcgcgtcagccgagcggatgcaggaggccggagagaaggcagtgagctgcggtggaggaggggcgtccgaaatccctgagctcgctgtcatcagggagctgaatcttaggacaattgatgagctcggtttagataagtcgatagtttcaggtatgttgttgtttgctccactctgctcttggaacgcctcagctgttcctcttgctctatcatgaatgcttctgttatacaatgggatgtcgttctcttggatgtgccaaagttttctctccccttagtctgaataacaattcctggtggatgtatgtatgtatgtattctcttggatgtgcgaaagttttccccttggatgtgcgaaacacatttactcctcactgcaatccacgcctccactctcgacccctcctccttcctcctctccctagggaccgttctccccaacacgcaggggtagcgtaggaggtgttgtggcggcattatctaggaagcggtctgtggacgtgaggcggatcaacccgaaggtgcctaaggaggaggctgtcaccatctccggtcgactcgtccagatcctctccgaccatgggcccctcaccatcggcaacacctggaacaacaccaaggtacccaatcaaccagtcagtcaagcagagtggcaaaagccggggagcgatgcaggcgtcggagcagcaacaacggaggactctgctggtgtagatgagaaggaaacacacaaagagcatcaaaagcaagttcaacgatcttatgtcaacccatccacctctgaatgaggcatattcagatgtgtgtgtattcagcactcatgctgccttcagtttacggagctcaatatgttacatcgacctttccaacctgccggcagaactcaagaagctcaagcacaagaagtgcctcgtccagtccccccaactccttcatggta

SEQ ID NO: 200210 - DNA, 828 bp, Zea Mays
tttgagggcacgtagtgtcagatttgagggcacgtagcaggataattcaggggctcttatgcaaagtttgagccaacccatctcgccctgctatataataagattggtccctagggttttcgccgccgcaccccacgacttccgtccgagtctgagctcatctccacgcgccgccgccgccgctcgacgcccaccgcgcagccatggcggaacagactgagaaggctttcctcaagcagcctaaggtgttcctcagctcaaagaaatctggcaagggtaagaagccaggcaagggtggcaatcgattttggaagagcattggccttggtttcaagactcccagggaagcaattgaagggacctacattgacaagaaatgtccattcactggaaccgtttctatcagaggcagaattattgctggaacatgccacagtgctaagatgaacagaaccatcattgttcgcaggaactatctccactttgttaagaaataccagaggtatgaaaagaggcactccaacattccagctcacatctccccatgcttccgtgtgaaggaaggcgaccatgtcatcattggccagtgcaggcccctatcaaaaactgtgaggttcaatgtcgtcaaagtcattccagctggatctgctgctgccggcaagaaggctttcaccgcagcctgagtttaagactatgttccatgagtagtttatatagtgatgtctttttttgttaaaaaaactgccttctaggcttgtgcctttcgactatggtttggagattgttcccatcttaatgaagtccaatcatctgaacatgttaaagcaa

SEQ ID NO: 200211 - DNA, 1964 bp, Zea Mays
agcagaccgcaggaatttgtgtggtccgcgcctcacttccacgacgctccagcggcatccgccacttcgtcgtcgtcgtcgcacggattggcattggctgccccccggccctgttcctcgtcctcctcatcaattcccgtctctcagtcctcccaataatggtggcgtggtgagaaatccttccgtccggccgtcgtcttagaagatgaactgttcctcttgctgcgccgctgccactccatcttctccggcgcttctcgccaggccgcgggggggtttagctgctagctgctccacgacgacagcaaatcagaaggtgcttttcctgggctcaaaacagtttccacggatcacgtatagccgtgcgtcgtcacggttgtcgcggagagaggtaatagcttttgccgggcaacaaccttgggacatcggcagatttgtcaagacgctgtatttcttcaacgggcctccaaaccttctcaagattgtagaatctatcatcagcagtttcactggacctgcttctagtgaagtgccaaagaaaatggaaacgtcggatgtggtgctggttactggagccaccggtggtgttgggcgacgggtggtggacgtcctgcagaagaagggagtacctgttcgagtattggctagaaatgtagacaaggcaaggagcatgttggggccggatgtacctctgatcataggagatgttacgaaggaagatacacttgatcctaagctattcaaagggataaaaaaagtagtcaatgcagtctctgtcatagtggggccaaaggaaggtgatacgccagacaggcagaagtacaaacaaggcatcaaatttttcgaacctgagatcaagggaccttcacctgaaatggttgagtacatcggaatgcaaaacttgattaatgccataaagagtagtgttggactgagtgaagggaaactgctatttggtttcaaaggcaacttatctggagagattgtgtggggagctcttgatgacgttgtgatgggtggtgttagtgaaagtacattccaaatcttgccaacaggaagtgaaagtagtggaccaactgggttgttcaaagggactgtatctacttcaaataatggtgggtttactagtataaggacaaagaattttactgtgccagaggacctgtcagcatatgatggtattgagttacgagttaatggtgatgggcgacggtataaactcattatacggactagctatgaatgggatactgttggctatacagcaagttttaacacaactaaggggggatggcaaagtgttaaagtacctttctcttctctgaaacctgtattccgtgctcgtactgtgactgatgctccacccttcgatgcaagcaacattacttcactacaactcatgtttagcaaatttgaatacgatggaatactcaacccaacatttactgaaggtccgtttgagcttcctttttcgagtattagagcatacatcaatgagccgatcactccaaggttcgttcatgtgagttctgcgggagttacaagacctgaaagaccggggttagatttaagcaagcagccacctgctgttcgattgaacaaagagcttggctccattttaacttttaagttgaagggagaggatttaattcgggaaagcggtattccgtacactattgtaaggccatgtgcattaactgaggaaccagctggagccgatctcatgtttgaccagggggacaacatcacaggaaagatatcaagggaagaagttgcccgtatttgtgtagcagctctggcaagcccagatgctgtgggcaaaactttcgaggtcaagagcactgttccattcagcgaaccgtatgtgattgaccctgcaaatcctcctcctgaaaaggactatgaagtatatttcaaagaactcaaagaaggcatcacgggaagaaacattatggagggagtcg

SEQ ID NO: 200212 - DNA, 957 bp, Zea Mays
agacgaaaacaagagccagacgcggcagatcaccggggagacggtgggcgaggtgcgggccgtggcggggatgcaccagcgcaaggcggagatggcgcgcaactccgatgccttcatcgcgctcccgggcgggtacgggacgctggacgagctcctggaggtgatcgcgtgggcgcagctgggcatccacagcaagccggtgggcctgctgaacgtggacgggtactacgacttcctgctggcgttcatcgacaaggcggtggacgacgggttcatcaagccctcccagcgccacatcttcgtcagcgcccccgacgccagggaactcgtccagaagctggaggggtacgaggccgtgcaggacgaggacccggcgacgcccaagctgcggtgggagatcgagcaggtcggctacaacgcctcgctcctggccgagatcgcccgctgatcggccgcgcgacgatcgctgctgctgcgggagctctggtggctccagtccacgcatcgtctgccggccaggccactggcctccacctgctgctatctaccctacccctactaccccatcgatgatcgatgcgatgatcctgcgtatcagatcaacagaagcacgcattcatatgtgtgtgtttctcaagtgtgaccgcagaaacggggcaccggtgagcaagacgcacgcgaggacttgttttttttaggggtgtgcgttctgctcctagtcctagcagctagcagcggcttgatcgtcctgccgcatgtactctgctcctagccacgtactcgtactcatattcctgatcgacgatcacgtgtttgtttactacccagcagcagctagtactaatgtactaagttaatcgtcgtcccctggtaatgtaactgacctccagctccagctagctagctgcgacattattctgtgcatacctctcgcctcaatggcgtattggcgcttat

SEQ ID NO: 200213 - DNA, 1822 bp, Zea Mays
aagaactcatgtttccgcggggccccggctccggccccagcccaaaagcgcgcctattattatttatttatttatttatttatttatttatatatacatccgccggccaatccatcggccacacagcgccacgccacacgcaacgcaagcagctgcttctctctttccgctccgcaggccgcagcgcccatcaagagcgagaagccctgtcgcgcgcggagacgatggaagggccggcggcggcggaggcggagaacggcggcgcgggcaaggggtccggcagcaggttcaggcgggtgtgcgtgttctgcgggagcagctccggcaagcgcagcagctaccgcgacgccgccgtcgagctcggcaaggagctggtgtcgaggaaggtggatttggtgtacggcggaggcagcctggggctcatgggggaggtctccgaggccgtgcacaggggcggcggccatgtcattggcatcataccgaccagtctcatgggaaaggagatcaccggggagacggtgggcgaggtgcgggccgtggcggggatgcaccagcgcaaggcggagatggcgcgcaactccgatgccttcatcgcgctcccgggcgggtacgggacgctggacgagctcctggaggtgatcgcgtgggcgcagctgggcatccacagcaagccggtgggcctgctgaacgtggacgggtactacgacttcctgctggcgttcatcgacaaggcggtggacgacgggttcatcaagccctcccagcgccacatcttcgtcagcgcccccgacgccagggaactcgtccagaagctggaggtatgtatagtatagattgatttgtcgaatcatcatcaccatccaaagtcgcttggtgccgctgccgccacgggactcgctggccgtcgtccttgatggatgatgacttggtcaggcctggcacgaggcacgcacggcctctttttttttggtctggtcgtcatccaaacagaacagccacacacaggcggcgcggcagtgtcacattccacgctcgcctgctttctctctgcctgctgcttgctgctgcgctgccctgtgcgcaacggcatcggttcctttggtttccacacgcacgcacgctccccaaaagcgtccacagactgagattcttctctcctttctttcacctctacactcgctagagatgaattgaaacagtcttggccggggtacgaggccgtgcaggacgaggacccggcgacgcccaagctgcggtgggagatcgagcaggtcggctacaacgcctcgctcctggccgagatcgcccgctgatcggccgcgcgacgatcgctgctgctgcgggagctctggtggctccagtccacgcatcgtctgccggccaggccactggcctccacctgctgctatctaccctacccctactaccccatcgatgatcgatgcgatgatcctgcgtatcagatcaacagaagcacgcattcatatgtgtgtgtttctcaagtgtgaccgcagaaacggggcaccggtgagcaagacgcacgcgaggacttgttttttttaggggtgtgcgttctgctcctagtcctagcagctagcagcggcttgatcgtcctgccgcatgtactctgctcctagccacgtactcgtactcatattcctgatcgacgatcacgtgtttgtttactacccagcagcagctagtactaatgtactaagttaatcgtcgtcccctggtaatgtaactgacctccagctccagctagctagctgcgacattattctgtgcatacctctcgcctcaatggcgtattggcgcttat

SEQ ID NO: 200214 - DNA, 2810 bp, Zea Mays
cttacgtgggttcagtcttgtccatggctgaaggttctgagagatggccgatggggcgagcaagaggctgcaatcttggttcctggtgacatcatcagcatcaagcttggcgatatcgtccctgccgacgctcgtctcctcgagggtgatgcactcaaggttgaccagtctgcgcttactggagaatccctcccggttaccaagggcccaggggacgaagtcttctcgggttccacttgtaagcagggtgagatcgaggccgtggtcattgccaccggagtgcacaccttcttcggcaaggccgctcatcttgtggacagcaccaaccaggtcggacacttccagcaggtgctgacagcaatcggtaacttctgcatctgctccattggggtcggcatcctcgtcgagatcatcgtcatgttcccaatccagcaccggaagtaccgcagcggaatcgagaacctgttggtcctcttgatcggtggtatcccaatcgccatgcctaccgtgctttcagttaccatggccattggttcgcacaagctgtcacagcagggtgccatcactaagaggatgactgccattgaggagatggctggtatggacgtgctttgcagtgacaaaaccggcacactcaccctcaacaagcttagcgtcgataagaacctcgtcgaggtgttctgcaaaggcgtcgacaaagaccatgtgttgctgttggctgcaagggcttcaaggactgagaaccaggacgctatcgatgccgccatggttggcatgcttgctgatcctaaggaggccagggctggtataagggaaatccacttcttgcccttcaaccctgttgataagaggactgctctgacgtacattgatgccgatggcaactggcaccgtgtcagcaagggtgctcctgaacagattcttgacctgtgccactgcaaggaggatctgaggcggaaggtgcactctattatcgacaagtatgccgagcgtggtcttcgttcgcttgctgttgccagacaggaagtacctgagaaaaacaaggagtcccctggtggaccatggcagttcgttggtctgttgcccctgtttgatccgcctaggcatgacagcgctgagacaattcgcaaggctcttgttcttggtgttaacgtcaagatgatcacgggtgatcagcttgctattggtaaggagactggaaggaggcttggcatgggtaccaacatgtatccatcctctgcgctgctcggccaaaacaaggatgctacgcttgaagcgcttcctgtagatgagctcattgagaaggccgatggttttgccggagtcttccctgaacacaagtacgagatcgtgaagagactgcaggagaagaagcacatcgttggtatgactggagatggtgtcaacgatgccccggctcttaagaaggctgacatcggtattgctgttgcggatgctactgacgctgcgaggagtgcttccgatattgtccttactgagccaggtcttagcgtcattatcagcgccgtcctcaccagcagatgcatcttccagaggatgaagaactacaccatctatgcagtttccatcacaatccgtatagtgctcggatttatgctcattgcgttgatctggcaatacgatttctctcccttcatggttcttatcattgccattctcaatgacggtactatcatgaccatctctaaggacagagttaagccatctccgttgcccgacagttggaagctgaaggagatctttgctacgggcatcgtgcttggaagctaccttgctctgatgactgtcattttcttctgggctatgcacaagaccgacttcttctcggacaaattcggtgtgaggtcgatcagggacagcgagcatgagatgatgtccgccctgtacctccaagtcagtatcgtgagccaggctctgatcttcgtcacccgttcccgtagctggtccttcgtggagcgccctggtctgctcctggtcaccgcgttcctgctcgctcaacttgttgccaccttcctcgctgtctacgccaactggggcttcgccaggatcaagggtatcggctggggctgggcaggtgtggtctggctctacagcatcgtcttctacttccccctggacctgctcaagttcttcatccgcttcgtgctcagcggcagggcatgggacaacctcctcgagaacaagaccgccttcaccaccaagaaggactacgggcgggaagagagggaggcgcagtgggccaccgcgcagaggacgctgcacgggctccagccgccggaggcttcctccaacacgctgttcaacgacaagagcagctaccgcgagctgtccgagatcgccgagcaggccaagagacgagctgagatcgcgaggctgagggagctcaacaccctcaagggccacgtggagtcggtggtcaagctcaagggcctggacatcgacaccatccagcagaactacacggtgtgagagcccctctgctgcgatgtcgacgacaacacctttgctgcccgacgggagccatctgattacagataaaaattttcctagctgtaaagctctctataccaccagatactgccatatgatggtatggttgggtacccgtctttctagggagtttcttttctctctctcttttcttattgttatgtttttcaatagtggagtgtgcgcgtgttgtaatcgtttttacctgcgttttcctctaactagccggtgatctcgcgggaagcgaggtgaagaaataatgcaactaaaattctctgccaaaagcattgttccttctc

SEQ ID NO: 200215 - DNA, 1382 bp, Zea Mays
accaatcttttctttccagcctcaaatcccgtttttcccatcccgtgaagaaccatggcacggtactccccaccgtcgctgcgctgcttcttccgctgcgccgccagctccgcctcccgagccgtaggcagcggcactcggaagaagaaccttgtattcttgggctctccccaggtcgccgcctcggtcctggacaagctgctgggcgcgtccggctccccggaatccgcatttcaggtggctgccgtcgtgacgcagccgccggccgccaagaacagggggaggaagttgatgccgtcggccgtcgcgcagttagcgctcgatcgcgggttcccagaggaactcatcttcacgccagaacgagcccgagaagaagtggaaccggatgtttgcataactgctgcttacgggaacattctgccccagaaatttcttgatatcccatcgtgcggatggtgttgcagaaacaggtgtttcccttgcatatactgtccgtgcattggatgcaggtccagtgattgcgtgtgaaaggttttctgttgatgaatgtattaaggcaccagagctactttctatgctgtttcatttaggatccaagctattgattaatgaacttccatccattcttgatggttcggctaaagataaggcacaaccacaggatgactccaaagctacactggcaccaaagttaaattctgaggagtcatggctatcgtttgacgaagaagctaaagtgctgcataacaaggtgcgggcatttgcaggatggcctgggacgcgcgcaaagctgcaactcataaaccaaaacagtgtacccgatgtactagagattaaggttatcagcacgaaggtttcaacatcatgtgtcaaagttggagatgaaaacgagatactattctctgggagctcgttgctgattccttgcagtggttcgacctggctcgaggtgttggagcttcaactccctggaaagaaagtaacaaaggcacaagatttttggaatggtttgcgtggtcagaagctgatgaaattgccatagggggatatctgcattcgcagcacaggagtgtgcctatatgcatagcaagggttattgaggtcagtcattgcgcgaacataagcagggtagtgctagaagcctatatgcggagatctcggttttatgactaccttttccttctggtaaacttggtgctataaactcgtaactcagttacattaggcatgccatttgtattgcttcctcaatttcagaaaacacactgctgtaactatttcagttattcaatttttcactgtcataactgagctacaaacatttgagaaataatacagttatgtggtgagtaataaggcaataatttgccgtaccttcttga

SEQ ID NO: 200216 - DNA, 1390 bp, Zea Mays
accaatcttttctttccagcctcaaatcccgtttttcccatcccgtgaagaaccatggcacggtactccccaccgtcgctgcgctgcttcttccgctgcgccgccagctccgcctcccgagccgtaggcagcggcactcggaagaagaaccttgtattcttgggctctccccaggtcgccgcctcggtcctggacaagctgctgggcgcgtccggctccccggaatccgcatttcaggtggctgccgtcgtgacgcagccgccggccgccaagaacagggggaggaagttgatgccgtcggccgtcgcgcagttagcgctcgatcgcgggttcccagaggaactcatcttcacgccagaacgagcccgagaagagtcgttcctgtcggccttgaaggaagtggaaccggatgtttgcataactgctgcttacgggaacattctgccccagaaatttcttgatatcccatcgtgcggatggtgttgcagaaacaggtgtttcccttgcatatactgtccgtgcattggatgcaggtccagtgattgcgtgtgaaaggttttctgttgatgaatgtattaaggcaccagagctactttctatgctgtttcatttaggatccaagctattgattaatgaacttccatccattcttgatggttcggctaaagataaggcacaaccacaggatgactccaaagctacactggcaccaaagttaaattctgaggagtcatggctatcgtttgacgaagaagctaaagtgctgcataacaaggatggcctgggacgcgcgcaaagctgcaactcataaaccaaaacagtgtacccgatgtactagagattaaggttatcagcacgaaggtttcaacatcatgtgtcaaagttggagatgaaaacgagatactattctctgggagctcgttgctgattccttgcagtggttcgacctggctcgaggtgttggagcttcaactccctggaaagaaagtaacaaaggcacaagatttttggaatggtttgcgtggtcagaagctgatgaaattgccatagggggatatctgcattcgcagcacaggagtgtgcctatatgcatagcaagggttattgaggtcagtcattgcgcgaacataagcagggtagtgctagaagcctatatgcggagatctcggttttatgactaccttttccttctggtaaacttggtgctataaactcgtaactcagttacattaggcatgccatttgtattgcttcctcaatttcagaaaacacactgctgtaactatttcagttattcaatttttcactgtcataactgagctacaaacatttgagaaataatacagttatgtggtgagtaataaggcaataatttgccgtaccttcttga

SEQ ID NO: 200217 - DNA, 3098 bp, Zea Mays
gagagatttgccgtgttttttgagctcttgcgcttggatcgcattctttctttctcttttgctcttgtgatcaacactcaattgtaaccgaggcaagaggcaccgattgtgtggtggcccttgcggggaggttttgttcccggttgattgagaagaaggaaagctcactcggtccgagggaccgtttgagagagggaagggttgaaagagacccggcctttgtggcctcctcaacggggagtaggtttgcaagaaccgaacctcggtaaaacaaatccacgtgtcactctctttatttgcttgcgatttgttttgcgtcctctcttgcggactcatttattattactaacgctaaccccggcttgtagttgtgtttatatttgtaaatttcagtttcgccctattcaccccccctctaggcgactatcaccaagatttatagattcatcattccatccctcattagtgatatcatcaattttaaagtatatgtcatagaggaagggtttaacacctacctctataattggtggaatcatagcaacacttttgacatgcactttgaatctcacaatatctttagtgtctaaagataagatatccacctcttcaacagacccaattgttgaccccaactcacaaatagcttggtaattttggagttcctcagggacattttccgccacaatccacacaaaatgaagcttggatttaggtttagcctgtgagctccaataagagactgaaatttttgccccggacattttcattttaagtccaggaaaattaatcatctcatctaacttctcctgagaaggaaactgcatcaagaacccggcgtgacacttggttgctttccaagttttgccccacgggaaatgaaaaccaaaatccttctcaagatcttctgcagaaatcaacccctcaacaactttccccaaaccgatgaagctccttttcggttttctagataaggatttcgcaaaatgggaagaataaaaccttaacccgtcagccgccataccaacaataggcatgcatggcttgttttgtttgggaaggacacaacgagcattcacatgagtttctttgcgacaaatatcgcaccacagagacttgaaacaatctctagcatgatgaccctccaccccgcatttttgacagaaagggcgacgaacattatcaatctcttttttcaaagcaggggaggggttttgagaatacctgattggccccatcgccagaaaagtcacaatgtcttccttgatgtcagatttgccaagatttggcttcaatctccaactgagatttcgattcttgttccaagattgagatccttgaggcacctctttcggtccccaccgatcccaattagggtttcgaccttttggatccatcttcaacacggacgccaagcgaggcagaggcggccactcctcttccaccagcggaggacggatcggggactcgaaccagccaccgtggaaactggagcgaaccgacgacgggagagaccagagccgagagagcgaagaggcgagatgcggaaaggaatacgatccgacgaagtcagaaggaaaccctaacgcggtacctgtagaagtcactgtatcgcgcgacgagggacaggaatccttctgggccgcgccagagaccttctcacccggagacccgcctgcctatgaaacgcgagagagggatagcacgaggagcgtgcggagcgtgggaaatcggcccaagagaactccggtccactacggcgaaggaggaagacgacaagggcgcgcccgaccgcctttttttcctacgtcccatctcccatccccggtctaatcgatttagtaaaccatggggaacttgatgttctgttgttgagttttcaaaacaaaacaccttgtgattatgaagcctttatggttgtatctttatggtgtgtcgtccattactatgcaaggtactggaagtctagttcaaaacaagctagttggtgctccaggcgggggatcaagtccacatgtagtacaaaatgccgatatccctgttaagcaaaccactagctcttcctcacgtgagcagtcagacgatgatgacatggaaggagatgctgagactactggaaatggaaaccctgttcaacacagattacagagaaggaagcaatccaaccgagaatcagccaggcgttcgagaagcagaaaggcagctcacttgaatgaactggaggcacaggtatcacagttaagagttgagaactcttcgctcctaaggcgacttgctgacgttaatcagaagttcaatgaggctgctgttgacaatagggtgcttaaggcagatgttgaaaccttaagagcaaaggtgaagatggcagaggactcagtgaagcgggtaactggcatgaacacattgttccctgccgtgtctgatatgtcgtccctcagcatgccattcaatggctccccatctgactccgcctctgatgccgccgtacccatccaagatgacctgaacagttacttcgccaatccaagcgagatcggaggcagcaacggttacatgccagatatagcttcctcggttcaagaggacgacgatttcgtcaacggggctcaggtcgccggcaagatgggcagcactgactcgctgcagcgggtggcgagcctggagcacctccagaagaggatgtgcggaggcccggcttcatcggggtcgacctcctaggttcctactccatcggatatgataaaggccctgatgcccacggcaagaatatgataaattaacagtttcacatactttgtagtggacattgctaatgctgcgatgcgcattcgttcgttgtggacttacgggtctactgctattgatttattgttcgttcttcatgtggatctcgtgtgtccatttgacgtgtactacgccacctgatgtctgctacacattgctgtggacagagcaagttcggtttccatcgaagagcacgctctgccactcgctagttctgagtgccactggcttaatgcaaaacataaacacaacacagctcctagccagaagtatagcatatatgtggatataaactgtataacaacagtataaac

SEQ ID NO: 200218 - DNA, 1264 bp, Zea Mays
ataacatcatccaagtcagtcaactcattgttgccatcctcattttggatagatttatccatttcagagtcagaaccagcttggagattatgctctacagattttttgacagattgaatggtactggaagtctagttcaaaacaagctagttggtgctccaggcgggggatcaagtccacatgtagtacaaaatgccgatatccctgttaagcaaaccactagctcttcctcacgtgagcagtcagacgatgatgacatggaaggagatgctgagactactggaaatggaaaccctgttcaacacagattacagagaaggaagcaatccaaccgagaatcagccaggcgttcgagaagcagaaaggcagctcacttgaatgaactggaggcacaggtatcacagttaagagttgagaactcttcgctcctaaggcgacttgctgacgttaatcagaagttcaatgaggctgctgttgacaatagggtgcttaaggcagatgttgaaaccttaagagcaaaggtgaagatggcagaggactcagtgaagcgggtaactggcatgaacacattgttccctgccgtgtctgatatgtcgtccctcagcatgccattcaatggctccccatctgactccgcctctgatgccgccgtacccatccaagatgacctgaacagttacttcgccaatccaagcgagatcggaggcagcaacggttacatgccagatatagcttcctcggttcaagaggacgacgatttcgtcaacggggctcaggtcgccggcaagatgggcagcactgactcgctgcagcgggtggcgagcctggagcacctccagaagaggatgtgcggaggcccggcttcatcggggtcgacctcctaggttcctactccatcggatatgataaaggccctgatgcccacggcaagaatatgataaattaacagtttcacatactttgtagtggacattgctaatgctgcgatgcgcattcgttcgttgtggacttacgggtctactgctattgatttattgttcgttcttcatgtggatctcgtgtgtccatttgacgtgtactacgccacctgatgtctgctacacattgctgtggacagagcaagttcggtttccatcgaagagcacgctctgccactcgctagttctgagtgccactggcttaatgcaaaacataaacacaacacagctcctagccagaagtatagcatatatgtggatataaactgtataacaacagtataaac

SEQ ID NO: 200219 - DNA, 1275 bp, Zea Mays
gtactacagtaatatgagtgggagcccaatatgcatggcttctggtgcagcacctccagatcattctccagctggttcttccttgccaagtgtggatgttccacacgcaggccctcttaaacccatcggaggtactggaagtctagttcaaaacaagctagttggtgctccaggcgggggatcaagtccacatgtagtacaaaatgccgatatccctgttaagcaaaccactagctcttcctcacgtgagcagtcagacgatgatgacatggaaggagatgctgagactactggaaatggaaaccctgttcaacacagattacagagaaggaagcaatccaaccgagaatcagccaggcgttcgagaagcagaaaggcagctcacttgaatgaactggaggcacaggtatcacagttaagagttgagaactcttcgctcctaaggcgacttgctgacgttaatcagaagttcaatgaggctgctgttgacaatagggtgcttaaggcagatgttgaaaccttaagagcaaaggtgaagatggcagaggactcagtgaagcgggtaactggcatgaacacattgttccctgccgtgtctgatatgtcgtccctcagcatgccattcaatggctccccatctgactccgcctctgatgccgccgtacccatccaagatgacctgaacagttacttcgccaatccaagcgagatcggaggcagcaacggttacatgccagatatagcttcctcggttcaagaggacgacgatttcgtcaacggggctcaggtcgccggcaagatgggcagcactgactcgctgcagcgggtggcgagcctggagcacctccagaagaggatgtgcggaggcccggcttcatcggggtcgacctcctaggttcctactccatcggatatgataaaggccctgatgcccacggcaagaatatgataaattaacagtttcacatactttgtagtggacattgctaatgctgcgatgcgcattcgttcgttgtggacttacgggtctactgctattgatttattgttcgttcttcatgtggatctcgtgtgtccatttgacgtgtactacgccacctgatgtctgctacacattgctgtggacagagcaagttcggtttccatcgaagagcacgctctgccactcgctagttctgagtgccactggcttaatgcaaaacataaacacaacacagctcctagccagaagtatagcatatatgtggatataaactgtataacaacagtataaac

SEQ ID NO: 200220 - DNA, 1266 bp, Zea Mays
atcgatttagtaaaccatggggaacttgatgttctgttgttgagttttcaaaacaaaacaccttgtgattatgaagcctttatggttgtatctttatggtgtgtcgtccattactatgcaaggtactggaagtctagttcaaaacaagctagttggtgctccaggcgggggatcaagtccacatgtagtacaaaatgccgatatccctgttaagcaaaccactagctcttcctcacgtgagcagtcagacgatgatgacatggaaggagatgctgagactactggaaatggaaaccctgttcaacacagattacagagaaggaagcaatccaaccgagaatcagccaggcgttcgagaagcagaaaggcagctcacttgaatgaactggaggcacaggtatcacagttaagagttgagaactcttcgctcctaaggcgacttgctgacgttaatcagaagttcaatgaggctgctgttgacaatagggtgcttaaggcagatgttgaaaccttaagagcaaaggtgaagatggcagaggactcagtgaagcgggtaactggcatgaacacattgttccctgccgtgtctgatatgtcgtccctcagcatgccattcaatggctccccatctgactccgcctctgatgccgccgtacccatccaagatgacctgaacagttacttcgccaatccaagcgagatcggaggcagcaacggttacatgccagatatagcttcctcggttcaagaggacgacgatttcgtcaacggggctcaggtcgccggcaagatgggcagcactgactcgctgcagcgggtggcgagcctggagcacctccagaagaggatgtgcggaggcccggcttcatcggggtcgacctcctaggttcctactccatcggatatgataaaggccctgatgcccacggcaagaatatgataaattaacagtttcacatactttgtagtggacattgctaatgctgcgatgcgcattcgttcgttgtggacttacgggtctactgctattgatttattgttcgttcttcatgtggatctcgtgtgtccatttgacgtgtactacgccacctgatgtctgctacacattgctgtggacagagcaagttcggtttccatcgaagagcacgctctgccactcgctagttctgagtgccactggcttaatgcaaaacataaacacaacacagctcctagccagaagtatagcatatatgtggatataaactgtataacaacagtataaac

SEQ ID NO: 200221 - DNA, 263 bp, Zea Mays
ctttatggtgtgtcgtccattactatgcaaggtactggaagtctagttcaaaacaagctagttggtgctccaggcgggggatcaagtccacatgtagtacaaaatgccgatatccctgttaagcaaaccactagctcttcctcacgtgagcagtcagacgatgatgacatggaaggagatgctgagactactggaaatggaaaccctgttcaacacagattacagagaaggcactagtattatttagtggacaaattctcatt

SEQ ID NO: 200222 - DNA, 1558 bp, Zea Mays
aaaatggtgaactactactgctaggaaaatctgtcgctctctctctctctcaacgacgccgcgatccagatccagccaggtatcaagtcatccttccgccgccgcgtactgcgcctatcttgcttctccggcggacgggcgtacccatcgtcctcgatcatcccccggactggatcggaacggagatccagccggacctgcggtgatcccttccttttctcgtatagtgagctagccaatgaagaggtaaattcgtcaggcttgtatcaagttagtagttcatggtgcctggatgagcagtagagatgctactggccgtggaaggaggagggttcttctcgtcttcagcttcggggtacagccatggccttgctctcttgctactcggacggaaagctgaggagaagcccgtcaaggcttcgccgtggaaccagtaccggctagtcgaccgggaggccgagcaggtgtaccacctgccctccgccaaggatcaggcgcctgggaaatgtgctccctttgtctgtttcggatgcacggctaatggcctcgaggtggcgtctccttccaaagcggtctccagcaatgcgctcggtaggggtacctcacaggaagaagcatcttgttcagcacacaaggcgttgacaactagtgcttccatcagtggcagtgagagacgtggctgtcttaagagcaactccaaaagggattctttggagcaccgtatagtggtgagcgagggggaagaaccacgcgagtctgtggaagaggtgcagaccttgagatctagcatagaacggaggaaagttcagtggacagatacatgtggaaaggagctttttgagataagggagtttgaaacaagcgacgagggcctgtcggatgatgatgcagaaaacgatggtttccggaaatgtgaatgtgtgattcagtagatttcatctctgcacaacaagcctgacagaaacatctcatgggaagcctgccctgctgggaaagatgtgccacggagactactttgccgctgaaatgatcgacgacagtcgaaacaaaacaaacagccatgaatcgatatcgtgctagagtatttgttggttatatgcttaactagtctgctcagcagggttatagtttcgatgcccacctgtacaatatcaagatcccctttctttcttttctgtcacattttatttttctcgctttccattgtgttttcacgcccgctgtaccatatgaggctgccatgttacctcctccagggattttggatccctgacatcatgctgttttattttgttttgctcctgacgtatttagtgatggcttgttgatagtttcgtccaaattggtaacattcattcttcacttcataggagtgacgtacgagggacatttggttgtttagcccaggcgtactgtgttttcgatgagacgcttcttttccacggttcaataatgtcttctctgagaaaatgtactactgtattggttgcaaagtgcaaaagatcaattctgatttctgaatcttatacctttgacaagtttttatattattataata

SEQ ID NO: 200223 - DNA, 1548 bp, Zea Mays
ggtgaactactactgctaggaaaatctgtcgctctctctctctctcaacgacgccgcgatccagatccagccaggtatcaagtcatccttccgccgccgcgtactgcgcctatcttgcttctccggcggacgggcgtacccatcgtcctcgatcatcccccggactggatcggaacggagatccagccggacctgcggtgatcccttccttttctcgtgagctagccaatgaagaggtaaattcgtcaggcttgtatcaagttagtagttcatggtgcctggatgagcagtagagatgctactggccgtggaaggaggagggttcttctcgtcttcagcttcggggtacagccatggccttgctctcttgctactcggacggaaagctgaggagaagcccgtcaaggcttcgccgtggaaccagtaccggctagtcgaccgggaggccgagcaggtgtaccacctgccctccgccaaggatcaggcgcctgggaaatgtgctccctttgtctgtttcggatgcacggctaatggcctcgaggtggcgtctccttccaaagcggtctccagcaatgcgctcggtaggggtacctcacaggaagaagcatcttgttcagcacacaaggcgttgacaactagtgcttccatcagtggcagtgagagacgtggctgtcttaagagcaactccaaaagggattctttggagcaccgtatagtggtgagcgagggggaagaaccacgcgagtctgtggaagaggtgcagaccttgagatctagcatagaacggaggaaagttcagtggacagatacatgtggaaaggagctttttgagataagggagtttgaaacaagcgacgagggcctgtcggatgatgatgcagaaaacgatggtttccggaaatgtgaatgtgtgattcagtagatttcatctctgcacaacaagcctgacagaaacatctcatgggaagcctgccctgctgggaaagatgtgccacggagactactttgccgctgaaatgatcgacgacagtcgaaacaaaacaaacagccatgaatcgatatcgtgctagagtatttgttggttatatgcttaactagtctgctcagcagggttatagtttcgatgcccacctgtacaatatcaagatcccctttctttcttttctgtcacattttatttttctcgctttccattgtgttttcacgcccgctgtaccatatgaggctgccatgttacctcctccagggattttggatccctgacatcatgctgttttattttgttttgctcctgacgtatttagtgatggcttgttgatagtttcgtccaaattggtaacattcattcttcacttcataggagtgacgtacgagggacatttggttgtttagcccaggcgtactgtgttttcgatgagacgcttcttttccacggttcaataatgtcttctctgagaaaatgtactactgtattggttgcaaagtgcaaaagatcaattctgatttctgaatcttatacctttgacaagtttttatattattataata

SEQ ID NO: 200224 - DNA, 842 bp, Zea Mays
ccgcctctgtcctggacttgcaatatcgatctatcccatctatcattgtcgattcgtggctataaccggcagtgatgacccaataatccctgctggttggtcctatcactaccggttcttaagcaaccgatggaccgacaatgaagcgacgagggcctgtcggatgatgatgcagaaaacgatggtttccggaaatgtgaatgtgtgattcagtagatttcatctctgcacaacaagcctgacagaaacatctcatgggaagcctgccctgctgggaaagatgtgccacggagactactttgccgctgaaatgatcgacgacagtcgaaacaaaacaaacagccatgaatcgatatcgtgctagagtatttgttggttatatgcttaactagtctgctcagcagggttatagtttcgatgcccacctgtacaatatcaagatcccctttctttcttttctgtcacattttatttttctcgctttccattgtgttttcacgcccgctgtaccatatgaggctgccatgttacctcctccagggattttggatccctgacatcatgctgttttattttgttttgctcctgacgtatttagtgatggcttgttgatagtttcgtccaaattggtaacattcattcttcacttcataggagtgacgtacgagggacatttggttgtttagcccaggcgtactgtgttttcgatgagacgcttcttttccacggttcaataatgtcttctctgagaaaatgtactactgtattggttgcaaagtgcaaaagatcaattctgatttctgaatcttatacctttgacaagtttttatattattataata

SEQ ID NO: 200225 - DNA, 1184 bp, Zea Mays
aaaaagaggtcaaattcattgcaatcatccagtcaaattcactgctctcatgggcctagcgggctgaaccttatgtttcccctgcctgctgctgctgctgcgagccgaggtcaggtcggctacagtgcacattgctaaacgctcccgccgtctcgcgagccgccgccgggtccttacgcaagtccgcgacgtgcatcgcctggagaggctcccgtctcgccgccctggggatcccatctcatctgtgcagccgcgcgtggcccaagggagccagaagctaagagttagagaggcgcgtgatgtcttcagaggaggcgagggcaagcttttcggagttggtggttggttcgccaacccggacagagggcgaaacttattcttcaggtgatatgtcgtctgaggagggtgcacacgtcacttgtttcacagaggatcttcacgatgtaacacttcactttcagatagtgaggttttctaaacagatatacgtgtgggttggatgcaacacagcaaagtttggccatttatatgctgctgcaaccactagaccggaggaacatctgataacaccggttcaagtatggctcgccgtctagtgctgaagactggcctgaacatagtcctggcatgcaacatcccaaaggacagccccatacttgaggctgctgcggagaggaagctggttgagaagctgaaaggtttgggctacattaaaaccccagctgtgggggctaacacttcctcggcacaatgatccgtggtgtgatctagtgagctttcggtcgacgtgtagcttcatcactacatccagcagagagcggttgtgatttttggcgggctttgactgtgctacctgttctctcatgtggcaaaaggttattgtgaacatgttcgttgtgatgtactccgccctaaaataaacccccttcgtatttcaaggagaaacaatcttaattctgactaaatatataccaaaaatactgatatttatgataccggataaacatcattagattaatcatgtcatacattttatagtaaatatgtttagagatccaaatgtagatacaatttttaacctaatgaaagttaagattgattgatctgtcgaaataatgagatgaggacgtagggagtaaatacgatagtggaatgcatattgtacaatgccttgcaactttgag

SEQ ID NO: 200226 - DNA, 1250 bp, Zea Mays
gaaaaggatgagtcttactaggtaaaaaaagaggtcaaattcattgcaatcatccagtcaaattcactgctctcatgggcctagcgggctgaaccttatgtttcccctgcctgctgctgctgctgcgagccgaggtcaggtcggctacagtgcacattgctaaacgctcccgccgtctcgcgagccgccgccgggtccttacgcaagtccgcgacgtgcatcgcctggagaggctcccgtctcgccgccctggggatcccatctcatctgtgcagccgcgcgtggcccaagggagccagaagctaagagttagagaggcgcgtgatgtcttcagaggaggcgagggcaagcttttcggagttggtggttggttcgccaacccggacagagggcgaaacttattcttcaggtgatatgtcgtctgaggagggtgcacacgtcacttgtttcacagaggatcttcacgatgtaacacttcactttcagatagtgaggttttctaaacagatatacgtgtgggttggatgcaacacagcaaagtttggccatttatatgctgctgcaaccactagaccggataacagagtgagtgttacctctgtactaggaggaacatctgataacaccggttcaagtatggctcgccgtctagtgctgaagactggcctgaacatagtcctggcatgcaacatcccaaaggacagccccatacttgaggtacttacaggctgctgcggagaggaagctggttgagaagctgaaaggtttgggctacattaaaaccccagctgtgggggctaacacttcctcggcacaatgatccgtggtgtgatctagtgagctttcggtcgacgtgtagcttcatcactacatccagcagagagcggttgtgatttttggcgggctttgactgtgctacctgttctctcatgtggcaaaaggttattgtgaacatgttcgttgtgatgtactccgccctaaaataaacccccttcgtatttcaaggagaaacaatcttaattctgactaaatatataccaaaaatactgatatttatgataccggataaacatcattagattaatcatgtcatacattttatagtaaatatgtttagagatccaaatgtagatacaatttttaacctaatgaaagttaagattgattgatctgtcgaaataatgagatgaggacgtagggagtaaatacgatagtggaatgcatattgtacaatgccttgcaactttgag

SEQ ID NO: 200227 - DNA, 1864 bp, Zea Mays
agccgcgttgctgggaagtctggaacaaggaagcagccgtccccgtccagccttccgccccgcacgccgcaagccgtgctcctgccttcctacccgtcgcgcgcatcgccgattcaccggtgcccgtcgctcgcagacctctccctcgcccctcgcccagcttgtcggaggccgaaattgatttgctctgtccagctctgggctctgctgctttggcctccaagcgcgccatgtgtttctatcgacaataaaattcacaacaagtgcacttcgaattactggataattggagctgtgtgcagtgtgcttgcccctagcagcttgccggagcttgcaactgttctgctctaaaccagtgaaacgtgaagactgaacctgcttctgcttggctgcttgctccaattcaagaatcctctcttctcggcttacttcatttactcttgcttgtaagcttttatgcctcaacaaagttcactgttatgcacattttttctgattaatatattagttatatttatactctataatttatatcacaaattgcctaaatcttagcaaagttcactattatgcatattttatttcactgttatttttatagtttatatttacaaagttcactattatgcatttgatgtgctgctatttttatatgcagtgatccgcgttgtaactgtggttgaaacttgtcttataatttactgaaagagaattctttttgcaaggataaagtcatcatcgctcgttttcaaaatatgaaggatcgaaaacttaccttataatctttaaactttattagtcatttatttataggataggtgattaggttacattgtttggtattcctggtcaacagtttagttgactgctctttttgaaccagagatggtgcaatttgtttatgtgcaactgttgtcatgtcatatacccacctcacaagttattagctattacttcacctgtttgctttctttgctttcaggttctattccttgttaactgactgctgtaatacagatcaattacattgaattttaccatggcagctgaggaagatgtcaagcagaggcagatcattgaaaatcgtgccagaaatataagccacaatgttaggtgcactgagtgtggtagccaatcgattgaagattcacaggctgatgttgctattctccttaggaagctcattcgtgatgaaataaaagcaggaaagagtgataaagagatctacaagaaactagaggatgattatggggagacagtactatatgcccctaaatttgatcttcagactgctgggatttggctttcgcctgtcattgttggtggtatagcagctggaatctgggcttaccaaaggcataggcaaaggacaaatgttcacattatggctctgaacctggtccgaggggtaccactgactccaagggagaaggagaccatgctagacatccttacacctccaccggctccaaggaaatggtggtggccaggcaaatgatgtagaattcatgtgctggacctggtagatgctcacaaatggttaggatgcaaattacagtttggatgcatgatactttgatcgtgactttcagtttaaccaaaagcctgttcatttggctataattcatacaggcttctactagctcaatagtgttttgtctctatggattgtagctgcagcagctcaaacagttggctttaatccgaagcgaacaactagaagtcaaaactttgtaatgtgtactctatcatcgaactagttgtatgtcacacccgattttggaaggcaaaccgaatgcgaaccatgtatgtgtcaggatcagaaacccacgtacacatcgattatataattagacattatcac

SEQ ID NO: 200228 - DNA, 1275 bp, Zea Mays
ctgccctagccgcgttgctgggaagtctggaacaaggaagcagccgtccccgtccagccttccgccccgcacgccgcaagccgtgctcctgccttcctacccgtcgcgcgcatcgccgattcaccggtgcccgtcgctcgcagacctctccctcgcccctcgcccagcttgtcggaggccgaaattgatttgctctgtccagctctgggctctgctgctttggcctccaagcgcgccatgtgtttctatcgacaataaaattcacaacttgccggagcttgcaactgttctgctctaaaccagtgaaacgtgaagactgaacctgcttctgcttggctgcttgctccaattcaagaatcctctcttctcggcttacttcatttactcttgcttgttctattccttgttaactgactgctgtaatacagatcaattacattgaattttaccatggcagctgaggaagatgtcaagcagaggcagatcattgaaaatcgtgccagaaatataagccacaatgttaggtgcactgagtgtggtagccaatcgattgaagattcacaggctgatgttgctattctccttaggaagctcattcgtgatgaaataaaagcaggaaagagtgataaagagatctacaagaaactagaggatgattatggggagacagtactatatgcccctaaatttgatcttcagactgctgggatttggctttcgcctgtcattgttggtggtatagcagctggaatctgggcttaccaaaggcataggcaaaggacaaatgttcacattatggctctgaacctggtccgaggggtaccactgactccaagggagaaggagaccatgctagacatccttacacctccaccggctccaaggaaatggtggtggccaggcaaatgatgtagaattcatgtgctggacctggtagatgctcacaaatggttaggatgcaaattacagtttggatgcatgatactttgatcgtgactttcagtttaaccaaaagcctgttcatttggctataattcatacaggcttctactagctcaatagtgttttgtctctatggattgtagctgcagcagctcaaacagttggctttaatccgaagcgaacaactagaagtcaaaactttgtaatgtgtactctatcatcgaactagttgtatgtcacacccgattttggaaggcaaaccgaatgcgaaccatgtatgtgtcaggatcagaaacccacgtacacatcgattatataattagacattatcac

SEQ ID NO: 200229 - DNA, 1319 bp, Zea Mays
ccttagcccatgcggccagcgtgcacctgccctagccgcgttgctgggaagtctggaacaaggaagcagccgtccccgtccagccttccgccccgcacgccgcaagccgtgctcctgccttcctacccgtcgcgcgcatcgccgattcaccggtgcccgtcgctcgcagacctctccctcgcccctcgcccagcttgtcggaggccgaaattgatttgctctgtccagctctgggctctgctgctttggcctccaagcgcgccatgtgtttctatcgacaataaaattcacaatgtgcttgcccctagcagcttgccggagcttgcaactgttctgctctaaaccagtgaaacgtgaagactgaacctgcttctgcttggctgcttgctccaattcaagaatcctctcttctcggcttacttcatttactcttgcttgttctattccttgttaactgactgctgtaatacagatcaattacattgaattttaccatggcagctgaggaagatgtcaagcagaggcagatcattgaaaatcgtgccagaaatataagccacaatgttaggtgcactgagtgtggtagccaatcgattgaagattcacaggctgatgttgctattctccttaggaagctcattcgtgatgaaataaaagcaggaaagagtgataaagagatctacaagaaactagaggatgattatggggagacagtactatatgcccctaaatttgatcttcagactgctgggatttggctttcgcctgtcattgttggtggtatagcagctggaatctgggcttaccaaaggcataggcaaaggacaaatgttcacattatggctctgaacctggtccgaggggtaccactgactccaagggagaaggagaccatgctagacatccttacacctccaccggctccaaggaaatggtggtggccaggcaaatgatgtagaattcatgtgctggacctggtagatgctcacaaatggttaggatgcaaattacagtttggatgcatgatactttgatcgtgactttcagtttaaccaaaagcctgttcatttggctataattcatacaggcttctactagctcaatagtgttttgtctctatggattgtagctgcagcagctcaaacagttggctttaatccgaagcgaacaactagaagtcaaaactttgtaatgtgtactctatcatcgaactagttgtatgtcacacccgattttggaaggcaaaccgaatgcgaaccatgtatgtgtcaggatcagaaacccacgtacacatcgattatataattagacattatcac

SEQ ID NO: 200230 - DNA, 2945 bp, Zea Mays
gccatctctaccggtggcccggccccaaccccatgcgtcaagggatcaaaccatggcgcgtgtgcacatcgccaccgtcggcgctgcccagtcaccgcgccgacggcgaaatatattccggggtcccacgtggaagcatccggaggaatacacggatacacctccgcctcggtccatcgcaactgcaatcttctgctccgtcctgtaggctgtagctgcagcctgcagggagcgagccataaaggagactacgtagcggccgcggagcgcggggacgacggagggagacagacgggcgcggcagggaccagggagccagcagggctaggcgacgctccttccagttctcctatccatgatttcattctgagacattcacatgcttccatgtgattgaccttgtccctaatgttctgatcaagattgccatggttgaaaggctatagtttcttatggtccatgtccacgattcaagaataaaatattgtttggcccatccattgtgataatggtctggttgcaagaccagctggaaatgcacaagttccactgtgtggcggcgaaagatcagtttaagctggatgaaaataattgccagatcgaagaggaagaattttgaaagaaaccatgaggttcctactgctgaacatgtttggaacacagaatcattgattcgtgcaaaaggaatgatgtgctgtgtatgcttggaatctatctcacctgctcagccccttgggcagatgatgacatcagaaaatatggttcaccgctgcaatgtttgcggtgcagctgcgcacataatatgctcttcaaattctcagaaagactgcaaatgcatctcaatgtttgggttcaaacatgtggtccatcaatggactgtactctggacagacatagctgaccaatccgaagaaggccagtactgtagttactgtgaggagttatgcagtgagtcttttctgggaggtcctcccatatactgctgcatgtggtgccaacgattggtgcatgctgattgccagtctgccatggctactgaaaccggtgaaatttgcgaccttggtcccttcaagcgccttattctgtcgccactttttgtccgggccattagcaaacctggtagcatcttgagttctataactcatggagcaaatgagtttgcaaccactgtgcgggggcgtttaaaccgaactaaaaaggagaagcatcagaacagattttcatctgacagcaacgatgattcatcaagtgataccacgttgaactcaaaccagagggctggagaattaaaaacaattggcgacagtgctcaaaggagtcctgagaatgagcatgatagcagtgagagtgatggtagagaactcatatcggagtccagaaggctcggtaatgatgagaccggtgaagttaaacttaagtacgcattgtctgaattgcctgctgattccagaccccttctaatttttatcaacaagaaaagtggggctcagcgcggagatcttctcaagcacaagctacattttcttttgaatccggtgcaggtttttgaattaagttcttcacaagggccagaaacaggattatttttgttcagaaagctggcactggcaatgatctttcgagagttttatcatggggaggtggcctaggtgctgttgagaagcaaggtggcctttgcacaattttacatgacatagagcatgcagcagtcactatccttgatagatggaaggtgacagtagaagataagaaatcaaagaatgtgcttctagtaaagtacatgaacaactatctcggtatcggttgtgatgcaaaagttgcccttgacattcataatctccgtgagggaaatcctgagaaattctacagtcagttcttaaataaggtgctatatgcgagggaaggggccaagagcatcattgacagggcttttgtggacttaccatggcaagttcggttggaagtcgatggcaccgagatcgagataccagaggactcggaaggcgtgcttgtcgcgaacatcccgagctacatgggaggggttgacctgtggcaaaacgagggtgaggatcccgaagattttgacccgcagtcgatccatgacaagatgctcgaagtggtcagcattacaggagcatggcatctgggaacactccaggttggactttctcgggcgcggaggatcgcgcaaggccagtcgatcaagatacagatgtttgcccctttccccgttcaagtcgacggtgagccttgggtccagcagccctgcacgctcaagatatctcatcacgggcttttatgttgaggagagcagttgaagagccactgggtcatgccgctgctatgatcaccgacgtccttgagcatgcagagtccagccatgtaatcactgcttcgcagaagaaagccctcctccgagaaatggctctacggctgtcatgaagcaagcgccgctcattcggacgtcgcagaagaacggtttcctgcctctgcctgcacatcggtggttagtacgaggatctgtgatctcaacatgagctcgatcatgttgttagcagaagatacaggcccggagggacgtgtccacgtgcacatagagtttttttttttggggtcatgttcacgttttggaaatagcgaggcaatgttgtgtgcagctatgtatggtgtgtagacctcgggtaagccagttccttccttctgtgcaaaactagttacgcctgcggcctgccattccgtgttaggttgactggatggatttttagggctgcgtcgctgccacttcggttggtgccccatatgtaaacgagatgggcttgaatgcttggttgtaacctttttttttaatgataggagctctgtcctttaattaagacgaaagaaaacatatgtacaagaagagaacatattagatgcgaactaatttacaaacagcacaaattaat

SEQ ID NO: 200231 - DNA, 2899 bp, Zea Mays
cccaaccccatgcgtcaagggatcaaaccatggcgcgtgtgcacatcgccaccgtcggcgctgcccagtcaccgcgccgacggcgaaatatattccggggtcccacgtggaagcatccggaggaatacacggatacacctccgcctcggtccatcgcaactgcaatcttctgctccgtcctgtaggctgtagctgcagcctgcagggagcgagccataaaggagactacgtagcggccgcggagcgcggggacgacggagggagacagacgggcgcggcagggaccagggagccagcagggctaggcgacgctccttccagttctcctatccatgatttcattctgagacattcacatgcttccatgtgattgaccttgtccctaatgttctgatcaagattgccatggttgaaaggctatagtttcttatggtccatgtccacgattcaagaataaaatattgtttggcccatccattgtgataatggtctggttgcaagaccagctggaaatgcacaagttccactgtgtggcggcgaaagatcagtttaagctggatgaaaataattgccagatcgaagaggaagaattttgaaagaaaccatgaggttcctactgctgaacatgtttggaacacagaatcattgattcgtgcaaaaggaatgatgtgctgtgtatgcttggaatctatctcacctgctcagccccttgggcagatgatgacatcagaaaatatggttcaccgctgcaatgtttgcggtgcagctgcgcacataatatgctcttcaaattctcagaaagactgcaaatgcatctcaatgtttgggttcaaacatgtggtccatcaatggactgtactctggacagacatagctgaccaatccgaagaaggccagtactgtagttactgtgaggagttatgcagtgagtcttttctgggaggtcctcccatatactgctgcatgtggtgccaacgattggtgcatgctgattgccagtctgccatggctactgaaaccggtgaaatttgcgaccttggtcccttcaagcgccttattctgtcgccactttttgtccgggccattagcaaacctggtagcatcttgagttctataactcatggagcaaatgagtttgcaaccactgtgcgggggcgtttaaaccgaactaaaaaggagaagcatcagaacagattttcatctgacagcaacgatgattcatcaagtgataccacgttgaactcaaaccagagggctggagaattaaaaacaattggcgacagtgctcaaaggagtcctgagaatgagcatgatagcagtgagagtgatggtagagaactcatatcggagtccagaaggctcggtaatgatgagaccggtgaagttaaacttaagtacgcattgtctgaattgcctgctgattccagaccccttctaatttttatcaacaagaaaagtggggctcagcgcggagatcttctcaagcacaagctacattttcttttgaatccggtgcaggtttttgaattaagttcttcacaagggccagaaacaggattatttttgttcagaaagctggcactggcaatgatctttcgagagttttatcatggggaggtggcctttgcacaattttacatgacatagagcatgcagcagtcactatccttgatagatggaaggtgacagtagaagataagaaatcaaagaatgtgcttctagtaaagtacatgaacaactatctcggtatcggttgtgatgcaaaagttgcccttgacattcataatctccgtgagggaaatcctgagaaattctacagtcagttcttaaataaggtgctatatgcgagggaaggggccaagagcatcattgacagggcttttgtggacttaccatggcaagttcggttggaagtcgatggcaccgagatcgagataccagaggactcggaaggcgtgcttgtcgcgaacatcccgagctacatgggaggggttgacctgtggcaaaacgagggtgaggatcccgaagattttgacccgcagtcgatccatgacaagatgctcgaagtggtcagcattacaggagcatggcatctgggaacactccaggttggactttctcgggcgcggaggatcgcgcaaggccagtcgatcaagatacagatgtttgcccctttccccgttcaagtcgacggtgagccttgggtccagcagccctgcacgctcaagatatctcatcacgggcaggcttttatgttgaggagagcagttgaagagccactgggtcatgccgctgctatgatcaccgacgtccttgagcatgcagagtccagccatgtaatcactgcttcgcagaagaaagccctcctccgagaaatggctctacggctgtcatgaagcaagcgccgctcattcggacgtcgcagaagaacggtttcctgcctctgcctgcacatcggtggttagtacgaggatctgtgatctcaacatgagctcgatcatgttgttagcagaagatacaggcccggagggacgtgtccacgtgcacatagagtttttttttttggggtcatgttcacgttttggaaatagcgaggcaatgttgtgtgcagctatgtatggtgtgtagacctcgggtaagccagttccttccttctgtgcaaaactagttacgcctgcggcctgccattccgtgttaggttgactggatggatttttagggctgcgtcgctgccacttcggttggtgccccatatgtaaacgagatgggcttgaatgcttggttgtaacctttttttttaatgataggagctctgtcctttaattaagacgaaagaaaacatatgtacaagaagagaacatattagatgcgaactaatttacaaacagcacaaattaat

SEQ ID NO: 200232 - DNA, 2973 bp, Zea Mays
cgcgtgtgcacatcgccaccgtcggcgctgcccagtcaccgcgccgacggcgaaatatattccggggtcccacgtggaagcatccggaggaatacacggatacacctccgcctcggtccatcgcaactgcaatcttctgctccgtcctgtaggctgtagctgcagcctgcagggagcgagccataaaggagactacgtagcggccgcggagcgcggggacgacggagggagacagacgggcgcggcagggaccagggagccagcagggctaggcgacgctccttccagttctcctatccatgatttcattctgagacattcacatgcttccatgtgattgaccttgtccctaatgttctgatcaagattgccatggttgaaaggctatagtttcttatggtccatgtccacgattcaagaataaaatattgtttggcccatccattgtgataatggtctggttgcaagaccagctggaaatgcacaagttccactggtacagtagagcccctactccatcagagttctggataccacttgctgcttggttcactgttggcctagtcggtctttggacattttttcatttcttttcagtgtggcggcgaaagatcagtttaagctggatgaaaataattgccagatcgaagaggaagaattttgaaagaaaccatgaggttcctactgctgaacatgtttggaacacagaatcattgattcgtgcaaaaggaatgatgtgctgtgtatgcttggaatctatctcacctgctcagccccttgggcagatgatgacatcagaaaatatggttcaccgctgcaatgtttgcggtgcagctgcgcacataatatgctcttcaaattctcagaaagactgcaaatgcatctcaatgtttgggttcaaacatgtggtccatcaatggactgtactctggacagacatagctgaccaatccgaagaaggccagtactgtagttactgtgaggagttatgcagtgagtcttttctgggaggtcctcccatatactgctgcatgtggtgccaacgattggtgcatgctgattgccagtctgccatggctactgaaaccggtgaaatttgcgaccttggtcccttcaagcgccttattctgtcgccactttttgtccgggccattagcaaacctggtagcatcttgagttctataactcatggagcaaatgagtttgcaaccactgtgcgggggcgtttaaaccgaactaaaaaggagaagcatcagaacagattttcatctgacagcaacgatgattcatcaagtgataccacgttgaactcaaaccagagggctggagaattaaaaacaattggcgacagtgctcaaaggagtcctgagaatgagcatgatagcagtgagagtgatggtagagaactcatatcggagtccagaaggctcggtaatgatgagaccggtgaagttaaacttaagtacgcattgtctgaattgcctgctgattccagaccccttctaatttttatcaacaagaaaagtggggctcagcgcggagatcttctcaagcacaagctacattttcttttgaatccggtgcaggtttttgaattaagttcttcacaagggccagaaacaggattatttttgttcagaaagctggcactggcaatgatctttcgagagttttatcatggggaggtggcctaggtgctgttgagaagcaaggtggcctttgcacaattttacatgacatagagcatgcagcagtcactatccttgatagatggaaggtgacagtagaagataagaaatcaaagaatgtgcttctagtaaagtacatgaacaactatctcgttgcccttgacattcataatctccgtgagggaaatcctgagaaattctacagtcagttcttaaataaggtgctatatgcgagggaaggggccaagagcatcattgacagggcttttgtggacttaccatggcaagttcggttggaagtcgatggcaccgagatcgagataccagaggactcggaaggcgtgcttgtcgcgaacatcccgagctacatgggaggggttgacctgtggcaaaacgagggtgaggatcccgaagattttgacccgcagtcgatccatgacaagatgctcgaagtggtcagcattacaggagcatggcatctgggaacactccaggttggactttctcgggcgcggaggatcgcgcaaggccagtcgatcaagatacagatgtttgcccctttccccgttcaagtcgacggtgagccttgggtccagcagccctgcacgctcaagatatctcatcacgggcaggcttttatgttgaggagagcagttgaagagccactgggtcatgccgctgctatgatcaccgacgtccttgagcatgcagagtccagccatgtaatcactgcttcgcagaagaaagccctcctccgagaaatggctctacggctgtcatgaagcaagcgccgctcattcggacgtcgcagaagaacggtttcctgcctctgcctgcacatcggtggttagtacgaggatctgtgatctcaacatgagctcgatcatgttgttagcagaagatacaggcccggagggacgtgtccacgtgcacatagagtttttttttttggggtcatgttcacgttttggaaatagcgaggcaatgttgtgtgcagctatgtatggtgtgtagacctcgggtaagccagttccttccttctgtgcaaaactagttacgcctgcggcctgccattccgtgttaggttgactggatggatttttagggctgcgtcgctgccacttcggttggtgccccatatgtaaacgagatgggcttgaatgcttggttgtaacctttttttttaatgataggagctctgtcctttaattaagacgaaagaaaacatatgtacaagaagagaacatattagatgcgaactaatttacaaacagcacaaattaat

SEQ ID NO: 200233 - DNA, 3916 bp, Zea Mays
cgcgtgtgcacatcgccaccgtcggcgctgcccagtcaccgcgccgacggcgaaatatattccggggtcccacgtggaagcatccggaggaatacacggatacacctccgcctcggtccatcgcaactgcaatcttctgctccgtcctgtaggctgtagctgcagcctgcagggagcgagccataaaggagactacgtagcggccgcggagcgcggggacgacggagggagacagacgggcgcggcagggaccagggagccagcagggctaggcgacgctccttccagttctcctatccatgatttcattctgagacattcacatgcttccatgtgattgaccttgtccctaatgttctgatcaagattgccatggttgaaaggctatagtttcttatggtccatgtccacgattcaagaataaaatattgtttggcccatccattgtgataatggtctggttgcaagaccagctggaaatgcacaagttccactggtacagtagagcccctactccatcagagttctggataccacttgctgcttggttcactgttggcctagtcggtctttggacattttttcatttcttttcagtgtggcggcgaaagatcagtttaagctggatgaaaataattgccagatcgaagaggaagaattttgaaagaaaccatgaggttcctactgctgaacatgtttggaacacagaatcattgattcgtgcaaaaggaatgatgtgctgtgtatgcttggaatctatctcacctgctcagccccttgggcagatgatgacatcagaaaatatggttcaccgctgcaatgtttgcggtgcagctgcgcacataatatgctcttcaaattctcagaaagactgcaaatgcatctcaatgtttgggttcaaacatgtggtccatcaatggactgtactctggacagacatagctgaccaatccgaagaaggccagtactgtagttactgtgaggagttatgcagtgagtcttttctgggaggtcctcccatatactgctgcatgtggtgccaacgattggtgcatgctgattgccagtctgccatggctactgaaaccggtgaaatttgcgaccttggtcccttcaagcgccttattctgtcgccactttttgtccgggccattagcaaacctggtagcatcttgagttctataactcatggagcaaatgagtttgcaaccactgtgcgggggcgtttaaaccgaactaaaaaggagaagcatcagaacagattttcatctgacagcaacgatgattcatcaagtgataccacgttgaactcaaaccagagggctggagaattaaaaacaattggcgacagtgctcaaaggagtcctgagaatgagcatgatagcagtgagagtgatggtagagaactcatatcggagtccagaaggctcggtaatgatgagaccggtgaagttaaacttaagtacgcattgtctgaattgcctgctgattccagaccccttctaatttttatcaacaagaaaagtggggctcagcgcggagatcttctcaagcacaagctacattttcttttgaatccggtgcaggtttttgaattaagttcttcacaagggccagaaacaggattatttttgttcagaaagctggcactggcaatgatctttcgagagttttatcatggggaggtggcctaggtgctgttgagaagcaaggtggcctttgcacaattttacatgacatagagcatgcagcagtcactatccttgatagatggaaggtgacagtagaagataagaaatcaaagaatgtgcttctagtaaagtacatgaacaactatctcggtatcggttgtgatgcaaaagttgcccttgacattcataatctccgtgagggaaatcctgagaaattctacagtcagattgcagtatcctccgatacttcctcacgtatattacagtatcacttgtactttttttatagatcgaatgttcgtgtaattaatatgtatgtagcaatgaaacaaatataggaagtatcaggcctgctatagatattcagaacactgccaatctacgatgtacagagcaatctgtaatggtacgactaggacacaaaggagcaggtccagatctgaaggtaggtaggtactgacctcgccggagcttgatcttcttcttgtgggtgatgccctgcacggctgcacggagatccggccttggagtcgtccggcggtctgcgtggccttgggtgatgccctgcatggagcttgatcttcttcctgttcgggtcggcggtctgcgtggccttggcgtcgtccggcgcgaagagcacgacgtcgatgccctgcacggagatcctgccgtcggtgtagatgtccgggtccaagaggtagcggatcttgtgcggcagaaaccagaatgaaacgtaccttgtgcggcagaaaccagaagcaaaccggaatcaaacgacggaggcgctcagggcgttggagcgacggaggtgctggtgcatagcgaagacgagacgaggcggcggagaatcgcctggcctcctaaggccagggttgtttccgacgggaaaatggaacgaatatctgcacgagattgggctgccaaatgacacacatgaataatccgaggacaattttctggtgggctttctcccaggagaaaaggccaggaaacccgctggattttgggctgccaaaccagtcctgatatgtcttttttcccccctctagcgcgtctcagtaagacattaaggactaacgcggaggctttaaagagaatctttagttattaaatattaagatgactcttatgtttctttgttgggcttcatcagttcttaaataaggtgctatatgcgagggaaggggccaagagcatcattgacagggcttttgtggacttaccatggcaagttcggttggaagtcgatggcaccgagatcgagataccagaggactcggaaggcgtgcttgtcgcgaacatcccgagctacatgggaggggttgacctgtggcaaaacgagggtgaggatcccgaagattttgacccgcagtcgatccatgacaagatgctcgaagtggtcagcattacaggagcatggcatctgggaacactccaggttggactttctcgggcgcggaggatcgcgcaaggccagtcgatcaagatacagatgtttgcccctttccccgttcaagtcgacggtgagccttgggtccagcagccctgcacgctcaagatatctcatcacgggcttttatgttgaggagagcagttgaagagccactgggtcatgccgctgctatgatcaccgacgtccttgagcatgcagagtccagccatgtaatcactgcttcgcagaagaaagccctcctccgagaaatggctctacggctgtcatgaagcaagcgccgctcattcggacgtcgcagaagaacggtttcctgcctctgcctgcacatcggtggttagtacgaggatctgtgatctcaacatgagctcgatcatgttgttagcagaagatacaggcccggagggacgtgtccacgtgcacatagagtttttttttttggggtcatgttcacgttttggaaatagcgaggcaatgttgtgtgcagctatgtatggtgtgtagacctcgggtaagccagttccttccttctgtgcaaaactagttacgcctgcggcctgccattccgtgttaggttgactggatggatttttagggctgcgtcgctgccacttcggttggtgccccatatgtaaacgagatgggcttgaatgcttggttgtaacctttttttttaatgataggagctctgtcctttaattaagacgaaagaaaacatatgtacaagaagagaacatattagatgcgaactaatttacaaacagcacaaattaat

SEQ ID NO: 200234 - DNA, 2683 bp, Zea Mays
cgcgtgtgcacatcgccaccgtcggcgctgcccagtcaccgcgccgacggcgaaatatattccggggtcccacgtggaagcatccggaggaatacacggatacacctccgcctcggtccatcgcaactgcaatcttctgctccgtcctgtaggctgtagctgcagcctgcagggagcgagccataaaggagactacgtagcggccgcggagcgcggggacgacggagggagacagacgggcgcggcagggaccagggagccagcagggctaggcgacgctccttccagttctcctatccatgatttcattctgagacattcacatgcttccatgtgattgaccttgtccctaatgttctgatcaagattgccatggttgaaaggctatagtttcttatggtccatgtccacgattcaagaataaaatattgtttggcccatccattgtgataatggtctggttgcaagaccagctggaaatgcacaagttccactggtacagtagagcccctactccatcagagttctggataccacttgctgcttggttcactgttggcctagtcggtctttggacattttttcatttcttttcagtgtggcggcgaaagatcagtttaagctggatgaaaataattgccagatcgaagaggaagaattttgaaagaaaccatgaggttcctactgctgaacatgtttggaacacagaatcattgattcgtgcaaaaggaatgatgtgctgtgtatgcttggaatctatctcacctgctcagccccttgggcagatgatgacatcagaaaatatggttcaccgctgcaatgtttgcggtgcagctgcgcacataatatgctcttcaaattctcagaaagactgcaaatgcatctcaatgtttgggttcaaacatgtggtccatcaatggactgtactctggacagacatagctgaccaatccgaagaaggccagtactgtagttactgtgaggagttatgcagtgagtcttttctgggaggtcctcccatatactgctgcatgtggtgccaacgattggtgcatgctgattgccagtctgccatggctactgaaaccggtgaaatttgcgaccttggtcccttcaagcgccttattctgtcgccactttttgtccgggccattagcaaacctggtagcatcttgagttctataactcatggagcaaatgagtttgcaaccactgtgcgggggcgtttaaaccgaactaaaaaggagaagcatcagaacagattttcatctgacagcaacgatgattcatcaagtgataccacgttgaactcaaaccagagggctggagaattaaaaacaattggcgacagtgctcaaaggagtcctgagaatgagcatgatagcagtgagagtgatggtagagaactcatatcggagtccagaaggctcggtaatgatgagaccggtgaagttaaacttaagtacgcattgtctgaattgcctgctgattccagaccccttctaatttttatcaacaagaaaagtggggctcagcgcggagatcttctcaagcacaagctacattttcttttgaatccggtgcaggtttttgaattaagttcttcacaagggccagaaacaggattatttttgttcagaaaggtaccacatttcagaatacttgtgtgtggtggtgatggtactgttggttgggttcttgacgcgatagataagcaaaattatgaatcacctccacccattgcaattcttccagctggcactggcaatgatctttcgagagttttatcatggggaggtggcctaggtgctgttgagaagcaaggtggcctttgcacaattttacatgacatagagcatgcagcagtcactatccttgatagatggaaggtgacagtagaagataagaaatcaaagaatgtgcttctagtaaagtacatgaacaactatctcggtatcggttgtgatgcaaaagttgcccttgacattcataatctccgtgagggaaatcctgagaaattctacagtcaggcttttatgttgaggagagcagttgaagagccactgggtcatgccgctgctatgatcaccgacgtccttgagcatgcagagtccagccatgtaatcactgcttcgcagaagaaagccctcctccgagaaatggctctacggctgtcatgaagcaagcgccgctcattcggacgtcgcagaagaacggtttcctgcctctgcctgcacatcggtggttagtacgaggatctgtgatctcaacatgagctcgatcatgttgttagcagaagatacaggcccggagggacgtgtccacgtgcacatagagtttttttttttggggtcatgttcacgttttggaaatagcgaggcaatgttgtgtgcagctatgtatggtgtgtagacctcgggtaagccagttccttccttctgtgcaaaactagttacgcctgcggcctgccattccgtgttaggttgactggatggatttttagggctgcgtcgctgccacttcggttggtgccccatatgtaaacgagatgggcttgaatgcttggttgtaacctttttttttaatgataggagctctgtcctttaattaagacgaaagaaaacatatgtacaagaagagaacatattagatgcgaactaatttacaaacagcacaaattaat

SEQ ID NO: 200235 - DNA, 1388 bp, Zea Mays
cctctttcgccaaatacggggagtcggagaccccaaacctctgtcgaaagtttcacctccggtcgctggtttcctccaatctccgtggtagttcagcgcgagcgggcggcggggtttgagctcgatggtcacttccggcgaacaatcggctggcggcgggtctgcggcgagggcgtcgaagctgcggtacccgctgcggtcggcgagcaaggggaaggcggcggtcgtttccccggcggctgatgctcctcccaccatctctgctccgcgacgggcaaaaccatcttcagatgtcagcaagagcatgtgtttagacctttctgtgaaggataattctgccaaacccccacggaggcactcaatacaaaccaagccaggagctagcccaaggccaacaccttctggaactgtgactccggtgtctggggttcggtcaaagaggtcggaaagccaggggaggtttgataccccgacatcagaagtgtccatgtccatctcaaggcgcaagttcagcacgctttcttcaatctcgtactggatgacacagatcaggctggcagaggctgcttccaagcactcggtttctctgggcttctttaagcttgctcttgaatcagaatgtgagcctttggaccggatgagggaagaactcaagtcctacgtagcacggcatggcctggcgacagaattggaggacccagttaaggacattctccaggtttatgatattttggatgattttgagaagctgaagatctctgcagagccctcacagcaaccaaaaaagtctgacaaggctgctcgtactgccacaaatgcgtcaccgaatggtaacctgaagccaaggtcactgaactctgatgctactgaaagcaaggaagctgtaaagaaagagagcattcagaaagtaaatcctggtgcaaggatcagaggctcctgtaacaggaatccagtcaaaaacaccaccgcaaaggaagcagttgccaagaacaccgctgatgttgtgaaggagatcacccatgaagataaagagaacatgggcgatattgaaatggcagtggatgttgccgtagcccaagatatctagaacagccggaccaacttcagattcgatccccttttttttctatcgctgaagatgaagtgttagcgtgtggttgcttattttggttttcaattgttaatatgttattagtagagcttgtctgtgtgattgctgtctggctggaccttgaacggtcttcaagagcgtgtcataagttgatgattgctttcattcctctgtcaagtttgcggctttgcatgtgctaatccgtgcaactgaatatagttgaatttatctattctcgtggttcctccgggcacaagatcctcccctgatgtttgtg

SEQ ID NO: 200236 - DNA, 1172 bp, Zea Mays
cgagcacccaaacccatgctgcttgtattcagacctgatctgccaaatacaagtcattgctgagaaggccgagaagagcgacaccctggaaattcacagcaaagtcagttcgtgcccgtttcaagaataattcgattgcatttctaattgtttgggctgatgacgaggacaaacgatgcaagtggtggtgggaagcttccccggaagcgcttctatcgcgccagggcacacagcaacccgctcagcgactcgcacttcccagtcccaatatcgcctgaagaggtcgatctctcacagcactacccgcggtacttccctgctgacaagggcagcgacggtgaggaggctgcagcgccacaacagatccgcttcgccgatgtggggtgcggatttggcgggttgcttgtagggctctcgcctctcttcccagatacgctcatgattggcatggagctcagggacaaggtaacggagtatgtgaaggagaggattttagctctaagaggggcaaacccaggacagtatgataacatatccgttgtccgcacgaactcgatgaaatacattccaaattacttcagaaaggctcagctcaccaagatgttcttcctgttccccgatccccacttcaaggagaagaaccacaggaggagggttatcagcatgcagctgttagacgaatatgcttacgtgatggaagtgggaggaatcatatataccatcactgatgtcgaggagctcggagagtggatgcggtcgtgtctagagaaacacccgttattcgaaaccgttcctgaggaagagattaaggctgaccctgttttcaaactactgtctactgccaccgaagaaagccagaaggtggcaagaaatggaggacagactttctatgccatcttcaggcggatctccttacaagaagaataagtcgcttagagattataagctagatcgtgttacgtgtgtttgtcagttttatacattttttttttaaaaaaatttagcagtaggtgtacttggtactaaatattgcaatgttgctttgcaaggttctgcagacccagttattttgttcagctttaaaagagtttaccaagacgattgtgttgagtttaccaaaataatattccattgtatagagccatgttcctaatggcatagatgccaggatc

SEQ ID NO: 200237 - DNA, 5557 bp, Zea Mays
ctttaaagcctccgcgttagtccttaatgtcttactgagacgcgctagaggggggaaaaaagacatatcaggactggtttggcagcccaaaatccagcgggtttcctggccttttctcctgggagaaagcccaccagaaaattgtcctcggattattcatgtgtgtcatttggcagcccaatctcgtgcagatattcgttccattttcccgtcggaaacaaccctggccttaggaggccaggcgattctccgccgcctcgtctcgtcttcgctatgcaccagcacctccgtcgctccaacgccctgagcgcctccgtcgtttgattccggtttgcttctggtttctgccgcacaagggcatcgacgtcgtgctcttcgcgccggacgacgccaaggccggatctccgtgcagccgtgcagggcatcacccacaagaagaagatcaagctccggcgagtacctctttccatctcctgtcgctgcctctaccatatctatctaaaggaacaaatttgagcgcatcttctgttgacagtgactttagtttgctattggtgctccagtaagaaaaatagatgtattttgttgatggtggcttcacaatctggcacatgactcatgaaaagctttgtttgacaaactattgtgaaggaacaagtatactgtcttttactacttcagtttgcttgacaaactattgtgatgatggataaagtgtgatgtgatgatggataaaccaatttactatgcttcagtttactttgtttgatttttcctgattttttgaagtattatttatagcatcacatagctatggatgaaccattttctgatgatggataaagttctcatccaatatagtagtatagagttgctgctggctatgttttgggactaaaacagctttggactaaatccttggttgccaaagggtggcaggaaattatatcctagtggggaaaatcctccatggaaatcgaggtgccatttaaatctcattggtggattttttttccatgggttttttccctattgctgccaaaccagtcctcatagaaatttttctcatatggaacgaaaatagccaaccattaattgtagtagactcggaccatcattgacaataatacatattttgtatttcaaagatacttgtccacttttgacattctgaaaggaacctcctaaatttatatcgaaattaccaaatctgccattttgaaaataccctaaagtgaaccccctaaatcttccatctaaattactcacctatatcattgtgaaagatgatttgaactattcgctaaattttcatctaagttgccccaattttaatgttattaaaataaccaaaagtaagctaataattctacatctcaatatatatcccaaagtcctcctacatatgcttctaggttacccacttctacattgttgatatagaactaactcaaggtaaacatgcatgatacatacgaccattgcatcatgcggaccacatcatatcaatttccatgtcaaacacagctcaaactaaggtacggaggtgctacgcaaaggggaaagcacgtatggggatggaaaagcatatagaatagatggtacaagtccagaattgaataaagataaaagtatctatgaatatttcgtcataatatgaacgatagagagcagagatacgctattctgaatagcactaggaacaaattttatccacaaacttctaacaattatgtccttttaaaattattagcccgtgtagaagcaacacattgcttgatgggctagttatgataatcacccactcaaccaaaagctgaaggtatcacactgaagcgatcagattgcctcagtcaacactgtcaattcaagtccagttcaattggttcaccattaagcactactatactcaacaatgacatgtagtttaggcatgaaccaatggcacccaatactccaatatgcctacaagcacctcaaaacttaaaaggttctacaagctaattcacatatttacaggagatataaaagttaaatcttcagaagaaatttcgagcagcaagcatccacaagccctaacttacatctgataacatcaaattaacaccacatttcaagtaacaggcagctgtactacttttgtttcttaaacaataaatgtgaaaagtgaccacttcacaagtatagatttgtgaagaagctaaacattaaaattaatggccaactactgtatgttgcttatgatgggtacagtacaaacattacctgactgtagaatttctcaggatttccctcacggagattatgaatgtcaagggcaacttttgcatcacaaccgatacctgtcaccatagtaagctaaggttattcgacaaggagcgccgataaacgaagtttctgtgtacctaccgagatagttgttcatgtactttactagaagcacattctttgatttcttatcttctactgtcaccttccatctatcaaggatagtgactgctgcatgctctatgtcatgtaaaattgtgcaaaggccaccttgcttctcaacagcacctaggccacctccccatgataaaactctcgaaagatcattgccagtgccagctggaagaattgcaatgggtggaggtgattcataattttgcttatctatcgcgtcaagaacccaaccaacagtaccatcaccaccacacacaagtattctgaaatgtggtacctttctgaacaaaaataatcctgtttctggcccttgtgaagaacttaattcaaaaacctagatgaatgatatgaaacattagaaacacagaaatcataaatatctgaagcatttactaaggtgggtgctaaaatacatatgaaaacagaacattttttcccgaaaggccagcaagagttttactgaattatattagaaggatataagacaaaaggattgcaggcaaaccccctttgacagtatctacatgactgtaccccatggccttacaagccaggttggaccaaaaacacatcactagggaaagagccctacccgcagaaagaccacagccccatactccacggccttacaaggcaggttggaccaaaaacacatcactagtgaaagacccctacccgcagaaagaccacaaccccatactccacgcccttacaaggcaggttggaccaaaaacacgtcaactagtgaaccactacccgcagaaagatgatggcctggaggcccaacccagaaccaaaaacagaacactagccttcaaattccaagcacgttgacagcttctgttcagctgtgtgcctacgttttagtaggatggaaaacaagtctcctacacatgatccaacagcagaagatgtaggcaaacggtgttgcttcttcaaagggttcaagtttttacacactgtagatgcagtaaattatactaactgaattacctaacatccaaaaaaaaatctaggcttaccactccctctttaccatgcggttactacttactactgattagcacagagaagatggattttatttttaagtgaagccatcactagaaacatgacagaaggttgattatgatgatttcctcacataatatgaactgatccagcaccaagtggatgattttaagtaattgcatgcacccaactagtgatgcaatgagcatattctacaaaattgaatatattggtagcataccatgttgcctagctgagaagtgactcgacttaaagtaaagttttgtgtgagaagtatcatgacctgcaccggattcaaaagaaaatgtagcttgtgcttgagaagatctccgcgctgagccccacttttcttgttgataaaaattagaaggggtctggaatcagcaggcaattcagacaatgcgtacttaagtttaacttcaccggtctcatcattaccgagccttctggactccgatatgagttctctaccatcactctcactgctatcatgctcattctcaggactcctttgagcactgtcgccaattgtttttaattctccagccctctggtttgagttcaacgtggtatcacttgatgaatcatcgttgctgtcagatgaaaatctgttctgatgcttctcctttttagttcggtttaaacgcccccgcacagtggttgcaaactcatttgctccatgagttatagaactcaagatgctaccaggtttgctaatggcccggacaaaaagtggcgacagaataaggcgcttgaagggaccaaggtcgcaaatttcaccggtttcagtagccatggcagactggcaatcagcatgcaccaatcgttggcaccacatgcagcagtatatgggaggacctcccagaaaagactcactgcataactcctcacagtaactacagtactggccttcttcggattggtcagctatgtctgtccagagtacagtccattgatggaccacatgtttgaacccaaacattgagatgcatttgcagtctttctgagaatttgaagagcatattatgtgcgcagctgcaccgcaaacattgcagcggtgaaccatattttctgatgtcatcatctgcccaaggggctgagcaggtgagatagattccaagcatacacagcacatcattccttttgcacgaatcaatgattctgtgttccaaacatgttcagcagtaggaacctcatggtttctttcaaaattcttcctcttcgatctggcaattattttcatccagcttaaactgatctttcgccgccacactgaaaagaaatgaaaaaatgtccaaagaccgactaggccaacagtgaaccaagcagcaagtggtatccagaactctgatggagtaggggctctactgtaccagtggaacttgtgcatttccagctggtcttgcaaccagaccattatcacaatggatgggccaaacaatattttattcttgaatcgtggacatggaccataagaaactatagcctttcaaccatggcaatcttgatcagaacattagggacaaggtcaatcacatggaagcatgtgaatgtctcctgcaattgaaccacatgaacaaaaaatcacagatatattttttgaacgcaatggcttgaattctggctgtcaactaaaaaggaaagagttcaaatatgagcaaaaaaccacagatatgagtacgacaaagtgtaaaaaacatgatcaacagggcaaacagtcatgctaggcaaaaagcctttatgccataagtggttaaagcttaaaagttgtaacaaacacattagcttgaccatggaattgcttaaaaccatatacagtagtcagtaggtgtgagccaatttcgatcaaggatagactaagctcgcattcaccttaataggcagcctagtgaattaggcattacctgtggttcatagttcataagttgagcagttatagtctttttttcgcgagcaggccgaagctagtatgttaaaaaaaatataacagaagccagtattccattaagaggacagtagggttttaacattacaagcctgacgtcccactaacaccagcccttccctctgtcagagaggcgag

SEQ ID NO: 200238 - DNA, 3016 bp, Zea Mays
ctcacttgcatctaggcttctagctgtactcctcggccggtcggtcccacccatggacagtgacaatgattgcggctccgacgccggcgccgagtgggtctgggtacgccgtccgtcggaggttgaggccgctgccgcggcggccggatggctggcggatgaagaggcgcggccgctcaaggtggtcttcggctccccggctaagtacttcaccgacgcagcgccgatcgggaacggccgcctaggcgccatggtctggggctgcgtcgaatctgagaggctccagcttaaccatgacactctatggacaggtggacctggtaattatacaaatcccaatgcacctgctgttctttctaaagtaaggagccttgttgagaacggaaagtaccctgaagccacatctgctgcatatgatctatctggtgaccaaacacaggtctttcaacctcttggggatattgatctggtctttggtgaggacatcaagtacacaaattacagacgagagctagatcttcacactgcaacagtcaccgtcacatatactgttggggatatagtctacacaagggaacatttctcctcaaacccacatcaagtcattgtgactaagatctctgcaaataaaccaggaaatgtctctttcacagtgtctttaactagtccactagaccacaagattcgtgtaacacatgcaaatgaaataatcatggagggtagctgtccaggccaaaggcctgaagagatcaagactgctgctgatcaacctattggaattaaattttctgcgattctttatctgcagataaatggtgccaatagcacagtggaagtattgaatgataacatgctgaaacttgattgtgccgactctgttgttttacttcttgcagccaccacttcatttcaaagtgcattcatcaaaccttcagaatctaaactggatccaacagtgtctgcttttacgacattaagtattgctaggagaacgtcatattcacaactaaaagcctaccacattgatgattaccagactcttttccagcgtgtttccttgcaactatcacaaggctctaattatgatcttcggaggagtaggctagttcagtcagcagagactagttctcagggtgctaatgtatcggattatggttttcaaatatctggctgcaccagattgacatcccttaatagttttgtgaagcctacggtagaaagaattgtaactttcaaagacaatgaagacccttctcttgtggaacttctgtttcagtttggtcgttatctactcatttcgtgctcaaggcctggaacccaaatttccaatctacaagggatatggagcaatgacacttcaccaccatgggacaccccatccaaatataaatctacaaatgaattattggcctgcgcttccttgtaatcttagcgagtgccaagaaccactgtttgactttattggttccctctcaatcaatggagctaagactgcaaaagtgaattatgaggctagtggttgggtcagtcatcaagtcacagacttatgggcaaaaacatcaccagatgctggtgatcctgtatgggctctatggccaatgggtgggccttggcttgcaactcatctctgggagcattactgttttactttggacaaacattttttagagaaaacagcgtatccactattggaaggatcagctaggtttttgttggattggttaattgaaggacacaggggatatttggagaccaatccttctacatctccagaacattattttattgctccagatggtaaggaggcctgtgtgagctactcaacaactatggacatctcaattataagggaagttttctcagctcttatattgtctgctgacattttaggtaaatccgacactaatgtggtgcagagaataaaaaaagcactgccaaatctcccaccaatgaaagttgctagagatggcacaatcatggagtgggcacaagactttcaggatcctgagattcatcacagacatgtgtctcacttgtttggtctttatcctggacatactatgtcacttgaggaaacacctgacctctgcagagctgttgccaatagtctttataaaagaggtgacgaaggcccaggctggtctacttcatggaaaatggtcctatgggctcgccttcacaacagtgaccatgcatacaaaatgatactgcagctaatcactttggtggatccagaacatgaggtttcaagagaaggaggcctatacagcaatctgttcactgcacatccacctttccaaattgatgcaaattttgggttcccagctgcgttgtcggaaatgctggtacagagcactgggaccgacttgtaccttctccctgctctgccccgcaacaagtggcctcaaggctacgttaaaggtctgaaggcccgaggtggtgttactgtaaacatcagctggaaggaagggagcctccatgaagctctgctatggtctagcggcgggcagaataccctttcaaggctgcactacggggaccagattgccaccgtcagcctatcatcgggtcaagtttacaggttcagcatggatttgaagtgcttgaagacttggcccctgtgatagcacacatttgctgaaatgaaagatacgattgattgtgcaaaaattcatgaaaacttctggctggcaagaaaataatcgatttcatacatcaatcataacacgtatcatatttcttatttactgtgtatgtttagttacatttcactgtatacatgtttactcgttgcccgtgccaagtgctatacagtgcacgactgcatgtgcattctgttaacatttttttagatgggaacatatcgaatgcaaaccacgttttggtgtaaacttcgtcctactaaaaaaagtttcaaaaaattctgaaaaaacatgaatgtacatctcagcttaacttatctatatacaaactttcatggtaaaatttatcttactctagcagttaaaaaaacaaa

SEQ ID NO: 200239 - DNA, 3002 bp, Zea Mays
tcacttgcatctaggcttctagctgtactcctcggccggtcggtcccacccatggacagtgacaatgattgcggctccgacgccggcgccgagtgggtctgggtacgccgtccgtcggaggttgaggccgctgccgcggcggccggatggctggcggatgaagaggcgcggccgctcaaggtggtcttcggctccccggctaagtacttcaccgacgcagcgccgatcgggaacggccgcctaggcgccatggtctggggctgcgtcgaatctgagaggctccagcttaaccgtggacctggtaattatacaaatcccaatgcacctgctgttctttctaaagtaaggagccttgttgagaacggaaagtaccctgaagccacatctgctgcatatgatctatctggtgaccaaacacaggtctttcaacctcttggggatattgatctggtctttggtgaggacatcaagtacacaaattacagacgagagctagatcttcacactgcaacagtcaccgtcacatatactgttggggatatagtctacacaagggaacatttctcctcaaacccacatcaagtcattgtgactaagatctctgcaaataaaccaggaaatgtctctttcacagtgtctttaactagtccactagaccacaagattcgtgtaacacatgcaaatgaaataatcatggagggtagctgtccaggccaaaggcctgaagagatcaagactgctgctgatcaacctattggaattaaattttctgcgattctttatctgcagataaatggtgccaatagcacagtggaagtattgaatgataacatgctgaaacttgattgtgccgactctgttgttttacttcttgcagccaccacttcatttcaaagtgcattcatcaaaccttcagaatctaaactggatccaacagtgtctgcttttacgacattaagtattgctaggagaacgtcatattcacaactaaaagcctaccacattgatgattaccagactcttttccagcgtgtttccttgcaactatcacaaggctctaattatgatcttcggaggagtaggctagttcagtcagcagagactagttctcagggtgctaatgtatcggattatggttttcaaatatctggctgcaccagattgacatcccttaatagttttgtgaagcctacggtagaaagaattgtaactttcaaagacaatgaagacccttctcttgtggaacttctgtttcagtttggtcgttatctactcatttcgtgctcaaggcctggaacccaaatttccaatctacaagggatatggagcaatgacacttcaccaccatgggatgcagcaccccatccaaatataaatctacaaatgaattattggcctgcgcttccttgtaatcttagcgagtgccaagaaccactgtttgactttattggttccctctcaatcaatggagctaagactgcaaaagtgaattatgaggctagtggttgggtcagtcatcaagtcacagacttatgggcaaaaacatcaccagatgctggtgatcctgtatgggctctatggccaatgggtgggccttggcttgcaactcatctctgggagcattactgttttactttggacaaacattttttagagaaaacagcgtatccactattggaaggatcagctaggtttttgttggattggttaattgaaggacacaggggatatttggagaccaatccttctacatctccagaacattattttattgctccagatggtaaggaggcctgtgtgagctactcaacaactatggacatctcaattataagggaagttttctcagctcttatattgtctgctgacattttaggtaaatccgacactaatgtggtgcagagaataaaaaaagcactgccaaatctcccaccaatgaaagttgctagagatggcacaatcatggagtgggcacaagactttcaggatcctgagattcatcacagacatgtgtctcacttgtttggtctttatcctggacatactatgtcacttgaggaaacacctgacctctgcagagctgttgccaatagtctttataaaagaggtgacgaaggcccaggctggtctacttcatggaaaatggtcctatgggctcgccttcacaacagtgaccatgcatacaaaatgatactgcagctaatcactttggtggatccagaacatgaggtttcaagagaaggaggcctatacagcaatctgttcactgcacatccacctttccaaattgatgcaaattttgggttcccagctgcgttgtcggaaatgctggtacagagcactgggaccgacttgtaccttctccctgctctgccccgcaacaagtggcctcaaggctacgttaaaggtctgaaggcccgaggtggtgttactgtaaacatcagctggaaggaagggagcctccatgaagctctgctatggtctagcggcgggcagaataccctttcaaggctgcactacggggaccagattgccaccgtcagcctatcatcgggtcaagtttacaggttcagcatggatttgaagtgcttgaagacttggcccctgtgatagcacacatttgctgaaatgaaagatacgattgattgtgcaaaaattcatgaaaacttctggctggcaagaaaataatcgatttcatacatcaatcataacacgtatcatatttcttatttactgtgtatgtttagttacatttcactgtatacatgtttactcgttgcccgtgccaagtgctatacagtgcacgactgcatgtgcattctgttaacatttttttagatgggaacatatcgaatgcaaaccacgttttggtgtaaacttcgtcctactaaaaaaagtttcaaaaaattctgaaaaaacatgaatgtacatctcagcttaacttatctatatacaaactttcatggtaaaatttatcttactctagcagttaaaaaaacaaa

SEQ ID NO: 200240 - DNA, 932 bp, Zea Mays
tcatcaccgctgcggccgtgcgtggaggcgtgaggccgatcaaatcggcggcgaatccccaaccctagcagcagtgggcggccggaccgggacgggcggtagacggctccagcacgcaacgctgacaggtttggccgtgcgaggcgcgagggctagacaggtgtcgcggcgccaggcatccagttccagggctgcgtgggctcgaccagagcgagtctgcaatccgcccgtccttgtccccgtcggcggccgttcaccagtgtcaggtgcggaggtgacaacatttctgaaagaagtaagcaagcactagttatatggtgagtcatgtcaaaggcacgtaatgctgtagttgccactggattgctgctcttcgctggtgctggcttatcatttccgttccttttcgtgaaatcaaagaacaagcctattattgattcgacaaaacctctgccaccacaggctacttttcgaggaccatacgtgaatacgggttcacgtgatatcggacctgatcctaccaactatcccaagaagtgatttgaatcttccatgacatttcggagtcccatttcactcgactccactgctgtgaaattgttcgttttggggccatcttactgtgcacgtgccttgatattgcaaaaaaataaaataaataacaatacctaaataaagggtggttattgaagctcctccattctccttgctcccaaacaaattccccttgcttccaaataaatcctagtgtaaagtttcccaatattgtatgggaatatctattttttacagatccatatatgattagttgaatttcatataggcgtattttgttttgtagataagactttattacaaaaaaagagttttaggcttgcgaaatttggaagaacaggaacgacatcatttttaagttttaacggctctattccaac

SEQ ID NO: 200241 - DNA, 917 bp, Zea Mays
tcatcaccgctgcggccgtgcgtggaggcgtgaggccgatcaaatcggcggcgaatccccaaccctagcagcagtgggcggccggaccgggacgggcggtagacggctccagcacgcaacgctgacaggtttggccgtgcgaggcgcgagggctagacaggtgtcgcggcgccaggcatccagttccagggctgcgtgggctcgaccagagcgagtctgcaatccgcccgtccttgtccccgtcggcggccgttcaccagtgtcaggtgcggaggtgacaacatttctgaaagaattatatggtgagtcatgtcaaaggcacgtaatgctgtagttgccactggattgctgctcttcgctggtgctggcttatcatttccgttccttttcgtgaaatcaaagaacaagcctattattgattcgacaaaacctctgccaccacaggctacttttcgaggaccatacgtgaatacgggttcacgtgatatcggacctgatcctaccaactatcccaagaagtgatttgaatcttccatgacatttcggagtcccatttcactcgactccactgctgtgaaattgttcgttttggggccatcttactgtgcacgtgccttgatattgcaaaaaaataaaataaataacaatacctaaataaagggtggttattgaagctcctccattctccttgctcccaaacaaattccccttgcttccaaataaatcctagtgtaaagtttcccaatattgtatgggaatatctattttttacagatccatatatgattagttgaatttcatataggcgtattttgttttgtagataagactttattacaaaaaaagagttttaggcttgcgaaatttggaagaacaggaacgacatcatttttaagttttaacggctctattccaac

SEQ ID NO: 200242 - DNA, 894 bp, Zea Mays
ccaccatcatcaccgctgcggccgtgcgtggaggcgtgaggccgatcaaatcggcggcgaatccccaaccctagcagcagtgggcggccggaccgggacgggcggtagacggctccagcacgcaacgctgacaggtttggccgtgcgaggcgcgagggctagacaggtgtcgcggcgccaggcatccagttccagggctgcgtgggctcgaccagagcgagtctgcaatccgcccgtccttgtccccgtcggcggccgttcaccagtgtcagttatatggtgagtcatgtcaaaggcacgtaatgctgtagttgccactggattgctgctcttcgctggtgctggcttatcatttccgttccttttcgtgaaatcaaagaacaagcctattattgattcgacaaaacctctgccaccacaggctacttttcgaggaccatacgtgaatacgggttcacgtgatatcggacctgatcctaccaactatcccaagaagtgatttgaatcttccatgacatttcggagtcccatttcactcgactccactgctgtgaaattgttcgttttggggccatcttactgtgcacgtgccttgatattgcaaaaaaataaaataaataacaatacctaaataaagggtggttattgaagctcctccattctccttgctcccaaacaaattccccttgcttccaaataaatcctagtgtaaagtttcccaatattgtatgggaatatctattttttacagatccatatatgattagttgaatttcatataggcgtattttgttttgtagataagactttattacaaaaaaagagttttaggcttgcgaaatttggaagaacaggaacgacatcatttttaagttttaacggctctattccaac

SEQ ID NO: 200243 - DNA, 686 bp, Zea Mays
tcttgctggtgatggttggacaagggtggtgatcagaatagaaaaagaaacagtcctggaaattttggaggtgggcgtggcttcgggcgaggacgagggagaggtaggggtcgggaatctggagatttcaatggcagaaatgatcaaggaaattgaaagaattcatggggtggtgacaatgctgaaaaatcttcttggaggacgaggaagaggcagagacaatggttggagaaatggtgatggaccaaaatgggatggtggagataattggaacgctacaaatccaccaagtaatcagccttggagtagcagtggaggcaccaagtcatatggtcaaaatcagccttccacttggaataattcagaggataacaaaccatctgtaggtgaaaggctcttcctgcaatgatgggggtaagtgggaaaaatgctggtagcgttgagtgttagactgtgtgtgttagtgtgtgtgggccggcaccactgttgggctgccggcccattagagttagggttgagtctatatattgtacccattctctatgcaatacaacattttcatattcctacatggtatcagaggattaggtttagggtttcctcccatctcccacagcagccaccacaggcttccctgccgccgtccccgggaggctccttcatctctctcaggggcggcccccaac

SEQ ID NO: 200244 - DNA, 1062 bp, Zea Mays
ttcatgcttttgttggttttcaagtttgggcaactgatgttggaataagctgcttattgtttctcttcttgtattgaagaataggtatgggactgcattactgggtcttgcctatatatgccgaagggcgatgatcaaatttcagtgaggcatattcaggtatgggactacattactaggtcttgcctatatacgtcgggtggtgatgatcaaattttagtggggcatattcagttttgcagatactttcaatgagaaaataaatcacaaaggagtgtcagacaattttcaccaaacttagccgcgaagatgaggccacccatatgttgtcgacctcgctggatctttgtcatgttgctttctacagatacatcatgattggcacaaatgtgtgtttctcatcttgtcagcaatccccttttacctgtggtttttatttaaacaattgatgtctgcggttgtattgtgagccaagacctatttgttatcaacttggtaattgttaagaagggtgagaaaatctgcctggtttgactgacactgagaagccaaggatgaggggtcccaagagggcctccaagatgaggaagcttttcaacctttccaaggatgatgtacacaagcaagaaggtgagcaaggcacctaagattcagtggcttatgaccccgtgacccttcagaggaagcgcgctagaatcactgataagaagaagaagatcgctaaggagtctgaggctgccgagtaccaaaatcttcttgccagaggctaaaggaaaaaagagaccgctgcaacgagagcttggcaaagatgaggtctaagccttctgtcgctgccacctctgcttaagaatatttagtgctttgagatgttttcaaggcctatcttgttacagcttaagcaccttatgatgccctagttgtgttgcaactgccctgtaattgacagatttgtatttgatgctcaggatgtagagagtaggttcctaattatgaccatgtactaaattatatatctgtgtctaagttatagtacaaacaaaataaatttagcgcaaccagctt

SEQ ID NO: 200245 - DNA, 788 bp, Zea Mays
cttgatatggttacattctctgaagaatcacagggagaactaatgcaggatacgaggcaacgttgattgtttgctaatgatgatgcttcactggtgaagaatattggaaagagcttccggctttctgctgtggagtcaaagcgcgaagataaaatcagagatgcgcatgatgaggctatatttggtgtacctacaacttcatttgttgatgttgaaattggtggggacgagcttaaaaccaatcatgaagacgggaaagttgaagacacagaatctgatgaacctagcagctccctcatcagcgataaagtactggccatgcaaaaaggttcctggagggatcgggctcagaagttgcggaagaatttgaacacatgaactttgtccttgcaactgctcaagttcgaatttgccagcgtgtgacagagatctggcatcttgtgaagatttgagcctgaagttgaacttagccccacccatcccttagaatagttgcataatgtaagttgtaagatttgcgcctgctttctgtttcctcgagtcagcgcgcaagtgacaccttgtagtgaactgagtttggaaattcatttggttattgtgatttggcaaatggcctgaatctattcatgtttaaaaagatgtatgtgcttcttgctccctccattagcagtgccattttcaagttggccttcaacttctgccttatggtatttgaacattcaggtcctaaaattactgccaatggaatggaattacgatggaagtcagcatctgattgctgatctagt

SEQ ID NO: 200246 - DNA, 1338 bp, Zea Mays
cttgttttttcctttttactttcccactcctctcgctgaatgactagcgttcagtgtcaaccgccgcctcctgtcctgaccaccaggcaccctgcactgcacgcccaagtttcctcttgttcccctgcccagactgcacgcctcctgtcctgaccatgcctctgaggccagttcatggctttgcgtctcttcttgtcatcttcgcctgccactgccatgggggaggaagcgagcagggagcggacgtggcggcagagcggctggagcgcgacgtgacgtcgcccctggccacggtcccggtggtggacccgacggcggcggcggcggcgacgacgacgcagtcgccggccaccggcgggagctggtgcgtggcgagccccagcgcgagcgcgacggcgctgcgggtggcgctggactacgcgtgcgggcagggcggcgcggactgctccgcgatccagcagggcgggagctgcttcagcccggacaccgtccgcgaccacgcgtcctacgccttcaacagctactaccagaagaaccccgtgcagaccagctgcgactttggcggcaccgccgccctcaccaccgcagacccaagcacttcgacgtgccagtatccatcaacgagcaccggcgcttcggtcctgaacacgtcgactccgctgacgccaacgaacgggtctccgcccggccccgggtacgggagctctccgccggccggatacgccaactctcctccgctgtacgggaacatgtcgccgccggactacggcgacaacatcagcgccgcagcgagggcgctgcccggccgcaagacgacggcgacggcggccgtcgcgtcgctggcgacgacgtgcctactgaccgcggcactgtcactgacggtgagcggctgaacctgcacacgcacgcaacaatagctccaagccgccgccgccgcacgttcaggtgccgaccgtgatgtcctggaaggccatgaaggtggagacgagacaaacatgtgccggtgcagcagagactacagaggatacgtgcgtgtacagtacaggcagtggcggatctggagagcaggatggtgatggagaccagtgacgccgtgtcactgtcagtcactctgtcagtagtgttgcctgccctttgtaatgtttagcaaatgtgtacagatagactcgtatacacggcgacggttatgatctttggtatcccctcggcccctccaactctaaactctatctcttaaattaaaaaaaaacaagccatgatttgagagcttttactggtgtaaaaattgcccttttacaagatagggatggacacttattaaatagtggtttgattttt

SEQ ID NO: 200247 - DNA, 4649 bp, Zea Mays
gtcttatatacgtgttcagcatccatcaagaaataactccacgcctcgttttttaagaggcgagcttaacatttatgatgcacaataagtataattacattaagcacgataaacttcctcataataaaatatattctctataataaacatactagagatataaatgttgataacagatgcgcagttattttttgagactggaggaataacctgttgtgtgctcgcaatttcctaatgcggcaggtggctgcggtgcgtgcgtggtccttatctccaagtacaacccggccaccgacgaggcgaccgagttctcagcgagctcctgcctgacactgctccgtagcattgaccgctgctcagtgaccacgagcgagggcattggcaacaccaaggatggctaccacgcggtgcagcagcggctcgcaggcttccacgcttcccagtgcggcttctgcacgccgggcatctgcatgtcaatcttctcagcgctggccaaggccgacaaggtggccagccgccctaccccgcccacaggcttctccaagctcaccacctcggaggctgaaaaggccgtgtccggcaacctgtgccggtgcaccggatacaggcccatcgtcgacgcctgcaagagcttcgcggcggacgtggaccttgaggatctgggtctcaactgcttctggaggaagggcgatgaacctgctaccgtcagcaaactacctggctacagtagtgctgcagtctgcaccttccctgagttcctcaagtctgagatcaagtcctctagggagaatgcagatggtgctgcagtagcagtctccagtgatggctggtaccatcctcaaagcattgaagagctccacaggttgtttgattcctactggtttgatgaaagttctgtgaagattgtggctgcaaacaccgggtctggagtgtacaaggatcaggacctctatgacaagtacattgacatcaaaggaataccagagctatcagtcatcaacagcagcgttaagggaattgagcttggatcggttgtgtccatctctacagccattgaggtgttgtcagatggaaatctgatcttcagaaaaattgccgatcacctaagcaaagtggcttcgccatttgttcggaacacagcaaccataggtggcaacataatcatggcgcagaggttgccattcgagtcagacatagcaactgtgctactggctgcaggtacaacagtcacaattcagacagcttccaaaaggttgtgccttactttggaggagttcttgcagcagtctccatgtgattctaggaccctgctgatgagcatattcatcccaaagtgggattcagatggcatcacctttgagacattccgggcagcgcctcggccatttggcaatgctgcttcatatgtcaatgctgctctcttggcaaggacttcaactgatgcagcttcagggaagaacatcatggaggatatatgcttggtgttcggtgcttatggagctgaccatgccatcagagctagcaaggtagaggattttctaaagggaaaatcactgagctcttctgttatacttaaagcagttcagttgcttaaagagacggtttcaccaccagaaggcacaacacatcctgagtatagggtcagcttggctgtcagcttcttgttcaccttcttatcctccttaaccaacagcatgaatgaaacagcaaaggttaatgttatcaatggatcacttactaatagaactacaaatattagcggtgggtactcactgaaggaaaatcttgaggttgacagaaattatttaccaatacactcaagacaagaaatggttttcggtgatgaatacaagccagttggcaagccgatcaagaaagtcggggcagagctccaagcttctggggaggctgtgtacgttgatgatatccctgttcccaagggttgcttgtatggagcatttatctacagcacacgccctcatgctcatgtgaagggcatcaacttcaaatcatctttggcttcacagaaggtcatcacagtcattactgcaaaggatattcccagaggcggacaaaatataggatccagcttcccgatgttaggagaagaagtgctttttgcagatcaagttgttgaatttgctggtcaaaatattggcatcgtgatttctgaaacacaaaggtatgcttatatggctgcaaagcaagctgttgttgagtatagcacagaaaatttgcagccaccaattctgactatacaagatgccatccaacagagcagctacttccagattcccacatttttatctcctaagccagttggtgattacaaccaaggggtttctaaggctgatcacactttgtcagcagaggtaaagcttgaatcccaatactatttttacatggagacacaggtggcactggctattcctgatgaagacaactgcataaccatctattcctcgacgcaatttgttgagatcacacaagatgtagttgcaaggtgccttggcattccgttgcacaacgtccgtgtgatcacaagaagagtcggcggaggctttggtggaaaggcaatgaaagcaatacacattgcatgtgcatgcgccgttgccgcattcaagctacagcgtcctgttaagatgtaccttgatcgcaagacggacatgataatagcgggtgggcgacaccctatgaagacaaagtattctgttgggttcaaatcagatggcaagatcacagccgtgcacttggaccttggtctcaatgctggaataacaccggatctgagtgcaatattgccaaatactatcattggtagtttcaaaaagtacaattggggggctcttgcatttgacatcaagctctgcaagacgaatgtctcaccaaagtcaacaatgcgggctcctggagaggtgcagggatcatttattgcagaagccatcgttgagcatgttgcatcggtgctctcagtcgataccaacaccattaggaggaagaaccttcatgacttcaagagtcttgcagcgttctacggagagagtgcgggtgaagcacccacatacacgctggccaccatgtttgataagctggccttgtctccagactaccagcacagagctacaatggttgagcacttcaatagcagcaacaagtggaagaaacgtggcatttcttgtgtacccatcacatatgaggtgagtcttcgggctgctccaggcaaggtgtctatcatgaatgacggttcaattgctgttgagattggaggggttgagataggccagggcttgtggacgaaagtgaagcagatgacagcatttgggctgggacaactgtgtgctgatggcggggaatgcctccttgacaaggtgcggattatccaggtcgactcgttgagcatgatccagggagggttcaccggtgggagcaccacttctgaaaatagttgcgaagcggttcggcattcgtgccttcgacttgttgaaaggctcaagcctgtaaaggagagtttggaggctaagggtgccacaatggaatggggtgccttgattgctcaggtgaaaatacccttatgttatgactttatctgttgtcacatataccagttaacctgattgaaacagataccaagaatcacatgcaaatcttttgcctccctcatttccatcatcaatgtactgcgatcagtatgggtagcaaataagtgtgagatacccatcattttactattccaattgtccgtgccatttgttcgtcatttgcaggcaagtatggcgagtgtgaacttatcagcgcatgcatactggaacccaacttccaggagttacttaaactatggagctggcattagtgaggtggaagttgatgtactgacaggagcaaccacgatcctacggagcgacctcattcatgactgcgggcagagcctgaaccctgcagtagaccttggccaggtggaaggcgcattcatccaaggagtgggcttcttcacgaacgaggagtacaaaacgaacaccgacggcatggtcatccatgacggcacatggacgtacaagattccaacggtcgacaccatcccgaagcagttcaacgtcgagttaatcaacagcgctggcgataggaagcgtgtcctttcatccaaagcgtcgggcgagccaccgcttcttctcgcgtcgtcggtgcactgtgcgatgagggaggccatcagggccgccaggaaggagttctctatctgcaccgggcccgcgaactccgccgtcacgttccagatggacgtgccggcgacgatgcccgtcgtcaaggagctctgcggactcgacgtcgtcgaacgttacctccagagcgtgtcagccggcccaaccaccccgagagccattagcaaataatggtgtgtttagcctcgagtggcgtatgttgttgtgatgtatttctagaaggacactgtaaaataacaatggcgagcagcgagcatggcgaatgtttgtaggaaatcatttgattttgactggttcccggagaaattttgcaacgaacccatcgtcggggcgtccgtgcgtacctggatagatgcggatcggcttgaagcctcgaaccagttcggagcctagccagcttccggttaggcgccaggccacgccggcggacagtgg

SEQ ID NO: 200248 - DNA, 4453 bp, Zea Mays
gtccttctgtagtcttatatacgtgttcagcatccatcaagaaataactccacgcctcgttttttaagaggcgagcttaacatttatgatgcacaataagtataattacattaagcacgataaacttcctcataataaaatatattctctataataaacatactagagatataaatgttgataacagatgcgcagttattttttgagactggaggaataacctgttgtgtgctcgcaatttcctaatgcggcaggtggctgcggtgcgtgcgtggtccttatctccaagtacaacccggccaccgacgaggcgaccgagttctcagcgagctcctgcctgacactgctccgtagcattgaccgctgctcagtgaccacgagcgagggcattggcaacaccaaggatggctaccacgcggtgcagcagcggctcgcaggcttccacgcttcccagtgcggcttctgcacgccgggcatctgcatgtcaatcttctcagcgctggccaaggccgacaaggtggccagccgccctaccccgcccacaggcttctccaagctcaccacctcggaggctgaaaaggccgtgtccggcaacctgtgccggtgcaccggatacaggcccatcgtcgacgcctgcaagagcttcgcggcggacgtggaccttgaggatctgggtctcaactgcttctggaggaagggcgatgaacctgctaccgtcagcaaactacctggctacagtagtgctgcagtctgcaccttccctgagttcctcaagtctgagatcaagtcctctagggagaatgcagatggtgctgcagtagcagtctccagtgatggctggtaccatcctcaaagcattgaagagctccacaggttgtttgattcctactggtttgatgaaagttctgtgaagattgtggctgcaaacaccgggtctggagtgtacaaggatcaggacctctatgacaagtacattgacatcaaaggaataccagagctatcagtcatcaacagcagcgttaagggaattgagcttggatcggttgtgtccatctctacagccattgaggtgttgtcagatggaaatctgatcttcagaaaaattgccgatcacctaagcaaagtggcttcgccatttgttcggaacacagcaaccataggtggcaacataatcatggcgcagaggttgccattcgagtcagacatagcaactgtgctactggctgcaggtacaacagtcacaattcagacagcttccaaaaggttgtgccttactttggaggagttcttgcagcagtctccatgtgattctaggaccctgctgatgagcatattcatcccaaagtgggattcagatggcatcacctttgagacattccgggcagcgcctcggccatttggcaatgctgcttcatatgtcaatgctgctctcttggcaaggacttcaactgatgcagcttcagggaagaacatcatggaggatatatgcttggtgttcggtgcttatggagctgaccatgccatcagagctagcaaggtagaggattttctaaagggaaaatcactgagctcttctgttatacttaaagcagttcagttgcttaaagagacggtttcaccaccagaaggcacaacacatcctgagtatagggtcagcttggctgtcagcttcttgttcaccttcttatcctccttaaccaacagcatgaatgaaacagcaaaggttaatgttatcaatggatcacttactaatagaactacaaatattagcggtgggtactcactgaaggaaaatcttgaggttgacagaaattatttaccaatacactcaagacaagaaatggttttcggtgatgaatacaagccagttggcaagccgatcaagaaagtcggggcagagctccaagcttctggggaggctgtgtacgttgatgatatccctgttcccaagggttgcttgtatggagcatttatctacagcacacgccctcatgctcatgtgaagggcatcaacttcaaatcatctttggcttcacagaaggtcatcacagtcattactgcaaaggatattcccagaggcggacaaaatataggatccagcttcccgatgttaggagaagaagtgctttttgcagatcaagttgttgaatttgctggtcaaaatattggcatcgtgatttctgaaacacaaaggtatgcttatatggctgcaaagcaagctgttgttgagtatagcacagaaaatttgcagccaccaattctgactatacaagatgccatccaacagagcagctacttccagattcccacatttttatctcctaagccagttggtgattacaaccaaggggtttctaaggctgatcacactttgtcagcagaggtaaagcttgaatcccaatactatttttacatggagacacaggtggcactggctattcctgatgaagacaactgcataaccatctattcctcgacgcaatttgttgagatcacacaagatgtagttgcaaggtgccttggcattccgttgcacaacgtccgtgtgatcacaagaagagtcggcggaggctttggtggaaaggcaatgaaagcaatacacattgcatgtgcatgcgccgttgccgcattcaagctacagcgtcctgttaagatgtaccttgatcgcaagacggacatgataatagcgggtgggcgacaccctatgaagacaaagtattctgttgggttcaaatcagatggcaagatcacagccgtgcacttggaccttggtctcaatgctggaataacaccggatctgagtgcaatattgccaaatactatcattggtagtttcaaaaagtacaattggggggctcttgcatttgacatcaagctctgcaagacgaatgtctcaccaaagtcaacaatgcgggctcctggagaggtgcagggatcatttattgcagaagccatcgttgagcatgttgcatcggtgctctcagtcgataccaacaccattaggaggaagaaccttcatgacttcaagagtcttgcagcgttctacggagagagtgcgggtgaagcacccacatacacgctggccaccatgtttgataagctggccttgtctccagactaccagcacagagctacaatggttgagcacttcaatagcagcaacaagtggaagaaacgtggcatttcttgtgtacccatcacatatgaggtgagtcttcgggctgctccaggcaaggtgtctatcatgaatgacggttcaattgctgttgagattggaggggttgagataggccagggcttgtggacgaaagtgaagcagatgacagcatttgggctgggacaactgtgtgctgatggcggggaatgcctccttgacaaggtgcggattatccaggtcgactcgttgagcatgatccagggagggttcaccggtgggagcaccacttctgaaaatagttgcgaagcggttcggcattcgtgccttcgacttgttgaaaggctcaagcctgtaaaggagagtttggaggctaagggtgccacaatggaatggggtgccttgattgctcaggcaagtatggcgagtgtgaacttatcagcgcatgcatactggaacccaacttccaggagttacttaaactatggagctggcattagtgaggtggaagttgatgtactgacaggagcaaccacgatcctacggagcgacctcattcatgactgcgggcagagcctgaaccctgcagtagaccttggccaggtggaaggcgcattcatccaaggagtgggcttcttcacgaacgaggagtacaaaacgaacaccgacggcatggtcatccatgacggcacatggacgtacaagattccaacggtcgacaccatcccgaagcagttcaacgtcgagttaatcaacagcgctggcgataggaagcgtgtcctttcatccaaagcgtcgggcgagccaccgcttcttctcgcgtcgtcggtgcactgtgcgatgagggaggccatcagggccgccaggaaggagttctctatctgcaccgggcccgcgaactccgccgtcacgttccagatggacgtgccggcgacgatgcccgtcgtcaaggagctctgcggactcgacgtcgtcgaacgttacctccagagcgtgtcagccggcccaaccaccccgagagccattagcaaataatggtgtgtttagcctcgagtggcgtatgttgttgtgatgtatttctagaaggacactgtaaaataacaatggcgagcagcgagcatggcgaatgtttgtaggaaatcatttgattttgactggttcccggagaaattttgcaacgaacccatcgtcggggcgtccgtgcgtacctggatagatgcggatcggcttgaagcctcgaaccagttcggagcctagccagcttccggttaggcgccaggccacgccggcggacagtgg

SEQ ID NO: 200249 - DNA, 873 bp, Zea Mays
tatatattgtcgtaccaataccagttcaatttgtcaagcaatcggttgctttgatgtgtgatagtaattgtaaagcaagagcgctacaacaagctgcccaagtgacagggacaatcgcagcaggtcagcaccagaatatctgaatgtgctgcgcccatgctgagttcctgaaaacctcacgaactgacctgaccgttaggagacaacacgttcctgggccctgtgttcgcggacggaaacttggcaccacacactcttatccacaacgagagcgtgggtgtgtgtcccaacattctccacgcgttccttccttccctccatctcctctctgttcatagcctcccaagaaacaagagccaaacagcgcttgcgaagctcaagcgccgcagcaatgtctctggccccgtccatcccttccatcaaggtgaaggtgggggccgtctcggtcgctcctccacaccgcgcatgccgatccttcgcggtgatcaggagctccaaggcagagggccccatccggagacctgcggcgcctccgctgtcgccaccgccgccgatgccacccaagacgccggctctgtccactcctcccaccctgtcgcagcctccgacgcccgtgaagcccgctgctccacccacgtcgtcgcagccgatgccaccttctcctgagcccaagccagttgacgccacagcccagatgcggaagccggtggctggggccatgacgctggagtaccagaggaaggtggccaaggacctgcaggagtacttcaagaagaagaagctggaggaggccgaccagggtccgttcttcgggttcttgcccaagaatgagatttccaacggaagggacatttcactgcaaatcgatctagc

SEQ ID NO: 200250 - DNA, 1386 bp, Zea Mays
gtgacttttttcttagcatagtactaatacacttcttgatatgatttatctgagagcactcggctttgctagatctcgacaatgacactgcgttttttggtgtttttgatggacatggaggaaaagtagtcgccaaattctgtgcaaaatatctacacagagaagttctcaggagtgaagcctatgcagctggtgacctgggtgctgctgtccacagagcttacttcagaatggatgaaatgatgcgaggtcaaagaggatggcgggaacttcaagcacttggagataagataaatcagtttagtggcataatagaaggcttaatttggtctcctaaagcaagtgattcaaatgatagacatgatgattgggcttttgaggagggaccacactctgattttactgggccaaattgtgggagtacagcctgtgtagctttgatcagaaataagcaactcgttgtggcaaatgctggtgactcccgctgtgtcatctcaaggaatggtcaggcatacaatttgtctagagaccataaaccagagctcgaggcagagagagagaggatacggagtgcaggcggtttcgttctaatggggcgtgtaaatggaaatctaaacttgtcaagagctatcggagacatgaagttcaaacaaaacaagttcttgccccccgataagcaaatcctgactgcgaaccccgacataaacattgtcgagctatgtgatgacgacgaattcattgttttggcatgcgatggcatctgggactgcatgtcaagccagcagttggtcgatttcatccgcgagcatatagacacatgcaggaggaaagcctctcggcagtatgcgagagagtgctcgatagatgcctggctccgtcgaccatgggcggcgagggatgcgataacatgacgatgatcctggtgcagttcaagaagccgattgctcaggtcgaggacgccagcggtgcagaaccagctggagacgctgggtgctgtgagacccatggggcccacgagaacggctctggtaagcaggtgtagcgaagacgtggcatgcatggctctcggagtcttggactcttggtacatataggcctgacgctggacatgggtaaaacgggagtacgatagatgacaccctctgttcctcaatacaacccgctgttgtgattttttggttacctgaccacctatctgtacatttttgtggaaatgatgttacagtaattattgtccggtcaagcggaccccttttgagttttgtcatctacatgtacttactctcgtagcagaatgactgcatgagctgacaattgcactcctttaccctcttagactctcacgctgtctccggtagggcagggtgatgcggaactatagatata

SEQ ID NO: 200251 - DNA, 1444 bp, Zea Mays
tagaggagaaattttgaatgtgcatgagatatcttgttgagtataactgctaagggagaagctgtgacttttttcttagcatagtactaatacacttcttgatatgatttatctgagagcactcggctttgctagatctcgacaatgacactgcgttttttggtgtttttgatggacatggaggaaaagtagtcgccaaattctgtgcaaaatatctacacagagaagttctcaggagtgaagcctatgcagctggtgacctgggtgctgctgtccacagagcttacttcagaatggatgaaatgatgcgaggtcaaagaggatggcgggaacttcaagcacttggagataagataaatcagtttagtggcataatagaaggcttaatttggtctcctaaagcaagtgattcaaatgatagacatgatgattgggcttttgaggagggaccacactctgattttactgggccaaattgtgggagtacagcctgtgtagctttgatcagaaataagcaactcgttgtggcaaatgctggtgactcccgctgtgtcatctcaaggaatggtcaggcatacaatttgtctagagaccataaaccagagctcgaggcagagagagagaggatacggagtgcaggcggtttcgttctaatggggcgtgtaaatggaaatctaaacttgtcaagagctatcggagacatgaagttcaaacaaaacaagttcttgccccccgataagcaaatcctgactgcgaaccccgacataaacattgtcgagctatgtgatgacgacgaattcattgttttggcatgcgatggcatctgggactgcatgtcaagccagcagttggtcgatttcatccgcgagcatatagacacagaggaaagcctctcggcagtatgcgagagagtgctcgatagatgcctggctccgtcgaccatgggcggcgagggatgcgataacatgacgatgatcctggtgcagttcaagaagccgattgctcaggtcgaggacgccagcggtgcagaaccagctggagacgctgggtgctgtgagacccatggggcccacgagaacggctctggtaagcaggtgtagcgaagacgtggcatgcatggctctcggagtcttggactcttggtacatataggcctgacgctggacatgggtaaaacgggagtacgatagatgacaccctctgttcctcaatacaacccgctgttgtgattttttggttacctgaccacctatctgtacatttttgtggaaatgatgttacagtaattattgtccggtcaagcggaccccttttgagttttgtcatctacatgtacttactctcgtagcagaatgactgcatgagctgacaattgcactcctttaccctcttagactctcacgctgtctccggtagggcagggtgatgcggaactatagatata

SEQ ID NO: 200252 - DNA, 1852 bp, Zea Mays
ccgccggcccctccaccacctcgatctcatccgatgccctagctaggcgagcttcgcatggattcacctgcggctgcgtcgccttcgctgctccgggacgactcgtgccgccgccgctctccgtccaccgcgtgaccgcaccaccgcccgctgatgaccagcgccggcgtcaacgtaccgggcgacgacggggtcgggaacccggccgccgcgtccgggtccgcctccgccccagaatgccggacgatgcagcgcaggcggcggcgcctcgagccacaaggatccggcgacgccgccgcggggccgagctgggtgcgccggctccgcccggccgcctcccggttctcgccgtcgccgtcgcagggctctgcggacaggcccaacgacgaggagcaggaagaggatgacccggacgtgcaggagatggagctcgtcccgctcccgccggcggggccgcaggagctccagcctgccgacgtccccgcgcaggtgtggcccgtggcgttcggctccctgtccatggcggggcggatgcgcatgatggaggacaccatctcgctccacccggacctgtgcacctgggccgacggctcgcccgtgcacttcttcgcggtcttcgacggccacggcggctcccatgtgtccgcgctgtgccgcgaccggatgcacgagttcgtggcggaggagctgggcaaggagggggccgccttccttcggcggcggcaggagtggctggcgtggggcgacggcgccggcgccgagacgagcgccgcggcgttcgtcagggggccccgcggcgcgtggccggagcgcgaggaggaggagcgcgcgtggcgctcggcgctgcggaggagcttccgtcgcgccgacgcgatggcggcgctggcgtgcgcgtgcgggcgcgtggcgcgcccgagctgccgctgcccgctttccagcgtcgtctccggcatcgtcgggtccacggccgtggtggcgctcctcgtccgcggccgcctcgtcgtcgccaactgcggcgactcccgcgccgtgctctgccgcgggcccgccggcacgccgcccgtcccgctctcctccgaccacaaggggacaggctgctgaggcctgaagtgatcgcggagccggagatcaccgtgacggagcggacggcggaggacgagtgcatgatcctggcgaccgacgggatgtgggacgtgatcgccaacgacgtcgcctgcaacgtcgcccgccactgcctggaggacgggaacccgcctccagccgccaccgccgccgccgccaccgccggccgcgaggaggagccgcggtgcgtccgcgccacctcgctcctggccaggctcgccatcggcagggagaccctggataacgtcagcatcatcgtcgttgacctcaagcacagggagtgaatgactgagtgcctgcctgcctcgcttgcttgctctgtcgccgtgcatcagcagcttagtcgatctaggagtgaactggtaccgtgagaggaggtgtgatcgtctagacctggcatttccttcgttctttcgattcgaagataagattctagctgtttccttttttttggagagaaagaaagtggatggaagattgccgtccttaattaaatgaagacaacaacaacaacaaaaaaagagaggaaaaagagagcaattgtacagagtatgatatggtgcgacatttctgtgcattagtgaacttgcttccattttctcaaggacaatagttcggctggtgtctctctgcttgcttggctgtcgttctctatcgtctgctgggtctgtgggatgaatttttactgcagcagctttgggggagcggcagcactgcttgcagggtgctc

SEQ ID NO: 200253 - DNA, 4310 bp, Zea Mays
cgacgccccagttttatccattcgcgccgcagacagtgctcgcgaaacgagcgttcggcggcaacggcagcggccagccgtgagagaagagatgatgctgataaggccgccgcggtttctctccccttcgccctcgccagggacacgcgagccccgccttcgccggcctctcgatgcctccagaatcttctcctcccctcgtcctcccggtcgccgttcccgcccccgcccccggctcgtctctccgtccaccgatctccgccgcctcactgcccgcatcgtcgacctcacccgccgcaggcagctcgcccaaatcatggaggaggtggaagcagcgcggcgtcgtgtgcgtgggggcgggttgctcaacaccatcgtcatgaacgcggttctcgaggcatgtgtgcgctgcggcgacgtcgaccgagcgctccggctcttcgaggaaatgcgcgggcccatggggtgcggagtcgacgatgtttcctacggcatcctgctgaagggcctgggtatagcaagaaggattgatgaagcattcgaaatactggaatcaattgagaaagattcttctattggggggcccaggctctctcctcatctcatttgtggttttctaaatgcccttatcgaagcaggagatatgaggcgtgccaatgctcttgtcgcccgtttccgcatggtcctttacgaggatcactctgtcttactatacaacttactgatgaaggggtatattaagagcaacttccctctcggagctttgactgttaaagacgagatattgcgtcaagggttgaagcctgatagattgacctacaataccatcatttctgcctgtgtaaaatcagcagagaatgataaagctatccaatttcttgaagatatgaaggtgtcacacaagtgttggaaaggaagaagctaatacagaaagtaaccctgaacttcttccagatgctgttacctacacaacattactcaagggtttaggaaatagccgtgacctttattcagtcgtgaagattgttgtggagatgaaatcttcactaatttcaatcgacaggactgcatacactgctatggtagatgctttgctagcttgtgggtccatcgacgtggttcagcatttagcgttccatttgacgctaacaagtgacatatcacattcttatctgtacccttttatgtcccagttgcccaagcagcatatccagtctaaagtatctaaaatggtgaaactgttcttcgtcagttgtgtttgcataattttttataattacatcaccgatgtgtataacctagttgtacttctcaaatcatcacatgcagtgactataagttacaccaaaatcattttctgaggtatagactatagatcacttgttagtatggttcatttaaccttactgttgtgcacaagcaaattgcttgacaaatgacgatacttgatgcctctcgcaacctattaggatcatgcctggttttaaatattatggtccatgcaggcgaatgtttttcatattttaagttatcatttcctcacttgcatagtaaatgagaatgtcaactttagcactatttgcttagcatgaccctctgttttgtatcctagatatctgcctctgggtctattctaatgttttgacaatttatcgcatgtcttgattactctctagcaattcagcattatccataattcttaatctagttggtcctgagatgataatgttaccagtttacctaaatttagtttcttcattacatttgttcaaaatatcttcaaataatttacacatatccttcattgtaatgtaatatgtgtgcccctagccccaacaaatatttgtgacaacaaatgtgttcacatttggactttgtagaagaaataaaaatggataataactatgcatatgttaacatgagtattgtgttaaatttgagaatctttcagtgttcatgaatatacagaactacagactaacttatttttactttccatcttagtgtataaactctttgtccttgtttaagtgaatataaatgtggatgaggcaatcaaattaccttgttgcgagaatggcaatgctgtttcatgtgttcttgagatcatgggttatgagagtgaaagctgttattcagacaaaaaaaaacctcttgtttatgatgtgtactagatttctgtactgatatgctttgaaccttattggtgcttatcgtaggggccctttgcatttttggtgatataataaagcatgctggcaagaacaatgatttgagacctaaacctcatctttatctttcaatcatgagagcttttgctaccagaggtgatgttgatatggtcatgagatttaacaagcgcatgtggctggattcagttggatcaattagccgtgccgccaaagaagagacacatgagctattaatggaagctgccataaataataatcagatagatttggctagagggcttctaagaagaatagtaaatgagaaagaatgtttctcttggacaagtagagtaggcctggtcgcagttaaagttgaaagcttatctggattcaccaactctcttctaaggccccacgtatttccacagattatcttgaatgatccagttgagaagtatatggttccatttcaagaatctcgaccattacccgccgacttaatattgcggaaggttgtgatgcgtttgttgaaagagcgtgcagttcctcttgtggatgattggggaggatgcattggcatagttcaccgcgatgattgtaccaagctggacgcacctcttatttcaatgtctagagggccacctctgtgcgtacctacttcaaccaccgtggagcacgtcattgacctcctcctgagaaacaagtccgagatggtgatcgtggtgaagagtggtaacatgtacgaaggcagctacacatccagctcaagacccttgggcgttttctccctcgccatactatggagcttcaccggcgactactcgtcaggatcagatgatgtccccgacgcaggcatctcccgggcagcaaaacccaaaccagacgccgaggcctgcaaccacagctagtttggtgtttcttttgctcagcttatagcaactccgcgtcgtgttgccgggcaaactagtcatgtaatggtcctccagttggacaaggggtgcatgcgaaaaaaggttttgatcctgacctgctgtggctgcgtgctgcgtacgatgtcttctgatgcacagagcgaaagtgacagtggactggagatttcctcccagccttcggttgaggcgccccaccgcgcagtgatggtcctgagtcctgaccggtttggtggcatgtggcatccctgctctcactcacggtgccgttttccgatcagtaattggtaatccccttggtaactaatttgggtctatgctaagatgttcaccgatcagtagtactgtgcgcagtgtattgctgctgcctgatgctgggactgggatacagaatcctcctgttgccgtgcacagttgctcttatcttctgtgaaccttcagtatggactggcaggacagtggatatgtgtcgatgaacggcccgagcactccgttggggccccgcttggacgcctcatgccataggccacaggccatagctagcattatctgccttctgggaggtgcatgtgcagtgcatctacccatctgggaagcggtaggtttccattggagggctctttgcctctttggtagtttggtccctgttgtgtcatgccagggtgtggcactgttacgctcgaaagtcgagagatttctgggtgggtagcttgggtaggcctgggtgcttctgcccccttgtccaggagtgtctcggtccagctttgcatcatccgtgttagttggaccggtgtcactacccggcagtgacggctggcgcctggcgctcgtactcggggtggcccgccagcggccgggtgattattgctgcctgaaagcatggaataataagggccttaatttcaatccacgtggatcgaggatcgaaggggttaagggtttgtaagtattgagaaggattgaagggattaaatgtcttccaattcaaaattaaatagaagatgatttaatctctataaatcaccttcgatctctgtgtggccaagtaggtttaaattcgtagcatgtcaaaacctttgttcattccttctcatctatgtaagggcacgtacaatggtatttaatgtagagatttttgatgtgtctaaagagggtttttgcaaaaaaaaaatgtgaagatgtctctgtctttgtaacccaagtattaaca

SEQ ID NO: 200254 - DNA, 4219 bp, Zea Mays
cgaaccaccctcccgagatgtttgtcgtccatcgcgcgatgcttcgccaagcaagagggccatcgctgcatcgcctcctcgggcagcagcatcgccatctgtcgtcatcctcgtcgaccctcccgagacgtttgtcgtccatcgcgcgatgcttcgccaagcaagagggccgtcgctgcgttgcctcctcgggcagcaacatcgtcgtagagttgtccactttatgtccctacaacgtttcaatttttctcttaaggcctgggtatagcaagaaggattgatgaagcattcgaaatactggaatcaattgagaaagattcttctattggggggcccaggctctctcctcatctcatttgtggttttctaaatgcccttatcgaagcaggagatatgaggcgtgccaatgctcttgtcgcccgtttccgcatggtcctttacgaggatcactctgtcttactatacaacttactgatgaaggggtatattaagagcaacttccctctcggagctttgactgttaaagacgagatattgcgtcaagggttgaagcctgatagattgacctacaataccatcatttctgcctgtgtaaaatcagcagagaatgataaagctatccaatttcttgaagatatgaaggaagaagctaatacagaaagtaaccctgaacttcttccagatgctgttacctacacaacattactcaagggtttaggaaatagccgtgacctttattcagtcgtgaagattgttgtggagatgaaatcttcactaatttcaatcgacaggactgcatacactgctatggtagatgctttgctagcttgtgggtccatcgacggtaagttctataccatctttttagtcactacagtgaattttcctaaaaaacaatacaatgaatttgcaagttggaaaacaacgttggtgtttgactaagaactaacaagtggcctagcacccacttttcatcctcacatttgatttattttcaaactgacacttctcttttcactttacagtggttcagcatttagcgttccatttgacgctaacaagtgacatatcacattcttatctgtacccttttatgtcccagttgcccaagcagcatatccagtctaaagtatctaaaatggtgaaactgttcttcgtcagttgtgtttgcataattttttataattacatcaccgatgtgtataacctagttgtacttctcaaatcatcacatgcagtgactataagttacaccaaaatcattttctgaggtatagactatagatcacttgttagtatggttcatttaaccttactgttgtgcacaagcaaattgcttgacaaatgacgatacttgatgcctctcgcaacctattaggatcatgcctggttttaaatattatggtccatgcaggcgaatgtttttcatattttaagttatcatttcctcacttgcatagtaaatgagaatgtcaactttagcactatttgcttagcatgaccctctgttttgtatcctagatatctgcctctgggtctattctaatgttttgacaatttatcgcatgtcttgattactctctagcaattcagcattatccataattcttaatctagttggtcctgagatgataatgttaccagtttacctaaatttagtttcttcattacatttgttcaaaatatcttcaaataatttacacatatccttcattgtaatgtaatatgtgtgcccctagccccaacaaatatttgtgacaacaaatgtgttcacatttggactttgtagaagaaataaaaatggataataactatgcatatgttaacatgagtattgtgttaaatttgagaatctttcagtgttcatgaatatacagaactacagactaacttatttttactttccatcttagtgtataaactctttgtccttgtttaagtgaatataaatgtggatgaggcaatcaaattaccttgttgcgagaatggcaatgctgtttcatgtgttcttgagatcatgggttatgagagtgaaagctgttattcagacaaaaaaaaacctcttgtttatgatgtgtactagatttctgtactgatatgctttgaaccttattggtgcttatcgtaggggccctttgcatttttggtgatataataaagcatgctggcaagaacaatgatttgagacctaaacctcatctttatctttcaatcatgagagcttttgctaccagaggtgatgttgatatggtcatgagatttaacaagcgcatgtggctggattcagttggatcaattagccgtgccgccaaagaagagacacatgagctattaatggaagctgccataaataataatcagatagatttggctagagggcttctaagaagaatagtaaatgagaaagaatgtttctcttggacaagtagagtaggcctggtcgcagttaaagttgaaagcttatctggattcaccaactctcttctaaggccccacgtatttccacagattatcttgaatgatccagttgagaagtatatggttccatttcaagaatctcgaccattacccgccgacttaatattgcggaaggttgtgatgcgtttgttgaaagagcgtgcagttcctcttgtggatgattggggaggatgcattggcatagttcaccgcgatgattgtaccaagctggacgcacctcttatttcaatgtctagagggccacctctgtgcgtacctacttcaaccaccgtggagcacgtcattgacctcctcctgagaaacaagtccgagatggtgatcgtggtgaagagtggtaacatgtacgaaggcagctacacatccagctcaagacccttgggcgttttctccctcgccatactatggagcttcaccggcgactactcgtcaggatcagatgatgtccccgacgcaggcatctcccgggcagcaaaacccaaaccagacgccgaggcctgcaaccacagctagtttggtgtttcttttgctcagcttatagcaactccgcgtcgtgttgccgggcaaactagtcatgtaatggtcctccagttggacaaggggtgcatgcgaaaaaaggttttgatcctgacctgctgtggctgcgtgctgcgtacgatgtcttctgatgcacagagcgaaagtgacagtggactggagatttcctcccagccttcggttgaggcgccccaccgcgcagtgatggtcctgagtcctgaccggtttggtggcatgtggcatccctgctctcactcacggtgccgttttccgatcagtaattggtaatccccttggtaactaatttgggtctatgctaagatgttcaccgatcagtagtactgtgcgcagtgtattgctgctgcctgatgctgggactgggatacagaatcctcctgttgccgtgcacagttgctcttatcttctgtgaaccttcagtatggactggcaggacagtggatatgtgtcgatgaacggcccgagcactccgttggggccccgcttggacgcctcatgccataggccacaggccatagctagcattatctgccttctgggaggtgcatgtgcagtgcatctacccatctgggaagcggtaggtttccattggagggctctttgcctctttggtagtttggtccctgttgtgtcatgccagggtgtggcactgttacgctcgaaagtcgagagatttctgggtgggtagcttgggtaggcctgggtgcttctgcccccttgtccaggagtgtctcggtccagctttgcatcatccgtgttagttggaccggtgtcactacccggcagtgacggctggcgcctggcgctcgtactcggggtggcccgccagcggccgggtgattattgctgcctgaaagcatggaataataagggccttaatttcaatccacgtggatcgaggatcgaaggggttaagggtttgtaagtattgagaaggattgaagggattaaatgtcttccaattcaaaattaaatagaagatgatttaatctctataaatcaccttcgatctctgtgtggccaagtaggtttaaattcgtagcatgtcaaaacctttgttcattccttctcatctatgtaagggcacgtacaatggtatttaatgtagagatttttgatgtgtctaaagagggtttttgcaaaaaaaaaatgtgaagatgtctctgtctttgtaacccaagtattaaca

SEQ ID NO: 200255 - DNA, 3881 bp, Zea Mays
aaaaaaggagtcaaagagactcgtaaagacaaataggactgggtttacatgagatatgaggcgtgccaatgctcttgtcgcccgtttccgcatggtcctttacgaggatcactctgtcttactatacaacttactgatgaaggggtatattaagagcaacttccctctcggagctttgactgttaaagacgagatattgcgtcaagggttgaagcctgatagattgacctacaataccatcatttctgcctgtgtaaaatcagcagagaatgataaagctatccaatttcttgaagatatgaaggaagaagctaatacagaaagtaaccctgaacttcttccagatgctgttacctacacaacattactcaagggtttaggaaatagccgtgacctttattcagtcgtgaagattgttgtggagatgaaatcttcactaatttcaatcgacaggactgcatacactgctatggtagatgctttgctagcttgtgggtccatcgacggtaagttctataccatctttttagtcactacagtgaattttcctaaaaaacaatacaatgaatttgcaagttggaaaacaacgttggtgtttgactaagaactaacaagtggcctagcacccacttttcatcctcacatttgatttattttcaaactgacacttctcttttcactttacagtggttcagcatttagcgttccatttgacgctaacaagtgacatatcacattcttatctgtacccttttatgtcccagttgcccaagcagcatatccagtctaaagtatctaaaatggtgaaactgttcttcgtcagttgtgtttgcataattttttataattacatcaccgatgtgtataacctagttgtacttctcaaatcatcacatgcagtgactataagttacaccaaaatcattttctgaggtatagactatagatcacttgttagtatggttcatttaaccttactgttgtgcacaagcaaattgcttgacaaatgacgatacttgatgcctctcgcaacctattaggatcatgcctggttttaaatattatggtccatgcaggcgaatgtttttcatattttaagttatcatttcctcacttgcatagtaaatgagaatgtcaactttagcactatttgcttagcatgaccctctgttttgtatcctagatatctgcctctgggtctattctaatgttttgacaatttatcgcatgtcttgattactctctagcaattcagcattatccataattcttaatctagttggtcctgagatgataatgttaccagtttacctaaatttagtttcttcattacatttgttcaaaatatcttcaaataatttacacatatccttcattgtaatgtaatatgtgtgcccctagccccaacaaatatttgtgacaacaaatgtgttcacatttggactttgtagaagaaataaaaatggataataactatgcatatgttaacatgagtattgtgttaaatttgagaatctttcagtgttcatgaatatacagaactacagactaacttatttttactttccatcttagtgtataaactctttgtccttgtttaagtgaatataaatgtggatgaggcaatcaaattaccttgttgcgagaatggcaatgctgtttcatgtgttcttgagatcatgggttatgagagtgaaagctgttattcagacaaaaaaaaacctcttgtttatgatgtgtactagatttctgtactgatatgctttgaaccttattggtgcttatcgtaggggccctttgcatttttggtgatataataaagcatgctggcaagaacaatgatttgagacctaaacctcatctttatctttcaatcatgagagcttttgctaccagaggtgatgttgatatggtcatgagatttaacaagcgcatgtggctggattcagttggatcaattagccgtgccgccaaagaagagacacatgagctattaatggaagctgccataaataataatcagatagatttggctagagggcttctaagaagaatagtaaatgagaaagaatgtttctcttggacaagtagagtaggcctggtcgcagttaaagttgaaagcttatctggattcaccaactctcttctaaggccccacgtatttccacagattatcttgaatgatccagttgagaagtatatggttccatttcaagaatctcgaccattacccgccgacttaatattgcggaaggttgtgatgcgtttgttgaaagagcgtgcagttcctcttgtggatgattggggaggatgcattggcatagttcaccgcgatgattgtaccaagctggacgcacctcttatttcaatgtctagagggccacctctgtgcgtacctacttcaaccaccgtggagcacgtcattgacctcctcctgagaaacaagtccgagatggtgatcgtggtgaagagtggtaacatgtacgaaggcagctacacatccagctcaagacccttgggcgttttctccctcgccatactatggagcttcaccggcgactactcgtcaggatcagatgatgtccccgacgcaggcatctcccgggcagcaaaacccaaaccagacgccgaggcctgcaaccacagctagtttggtgtttcttttgctcagcttatagcaactccgcgtcgtgttgccgggcaaactagtcatgtaatggtcctccagttggacaaggggtgcatgcgaaaaaaggttttgatcctgacctgctgtggctgcgtgctgcgtacgatgtcttctgatgcacagagcgaaagtgacagtggactggagatttcctcccagccttcggttgaggcgccccaccgcgcagtgatggtcctgagtcctgaccggtttggtggcatgtggcatccctgctctcactcacggtgccgttttccgatcagtaattggtaatccccttggtaactaatttgggtctatgctaagatgttcaccgatcagtagtactgtgcgcagtgtattgctgctgcctgatgctgggactgggatacagaatcctcctgttgccgtgcacagttgctcttatcttctgtgaaccttcagtatggactggcaggacagtggatatgtgtcgatgaacggcccgagcactccgttggggccccgcttggacgcctcatgccataggccacaggccatagctagcattatctgccttctgggaggtgcatgtgcagtgcatctacccatctgggaagcggtaggtttccattggagggctctttgcctctttggtagtttggtccctgttgtgtcatgccagggtgtggcactgttacgctcgaaagtcgagagatttctgggtgggtagcttgggtaggcctgggtgcttctgcccccttgtccaggagtgtctcggtccagctttgcatcatccgtgttagttggaccggtgtcactacccggcagtgacggctggcgcctggcgctcgtactcggggtggcccgccagcggccgggtgattattgctgcctgaaagcatggaataataagggccttaatttcaatccacgtggatcgaggatcgaaggggttaagggtttgtaagtattgagaaggattgaagggattaaatgtcttccaattcaaaattaaatagaagatgatttaatctctataaatcaccttcgatctctgtgtggccaagtaggtttaaattcgtagcatgtcaaaacctttgttcattccttctcatctatgtaagggcacgtacaatggtatttaatgtagagatttttgatgtgtctaaagagggtttttgcaaaaaaaaaatgtgaagatgtctctgtctttgtaacccaagtattaaca

SEQ ID NO: 200256 - DNA, 2152 bp, Zea Mays
gggagttaatccccgctggggaattccccattgacatctctagttccatccatgtcaggagttgacacagatttgttttcctatttgtagcctatttcccctcatataaatactacagaagcagcaacagctgcaacaagaattgaccctcagtcgctagaacagcaaacgggagcacagccaaatatggtggcattaccaactggtaacatcgagaactggggagagtcagctatggctggtagccctatgactgacacatctacagatccagacactgatgagaggaaccagatggtagtgaccattctcagttcactcctttcttgttctgttctattagatgaataagatatatgcttgacttatgcagaatattcatactaaggtttgctgttttggaggtctgttgtgcctgtgaagaatgtttgatttcacaacgtgcatgtttattatttgatttcattcatacgcataaataccttgaacgaagtgtaggcattaaggttctcttgcacgaataatatggttgcgcattggataaaaccattgcatatacaagtatggtttgctcctaatctttgacgaactatgcatgactgttggtcaatgtctagctgctggcaggattcttttatatttggaagcctggtgtatgttcataatcatcatccttaacaaagtgattgtttgaattactcttgccatttaacacactaaatggatttcttgtttgaaataatgcttcagtgtttatatgcttatctttttgtaacattgatcagcatatagtaaggctatgtttggaagcaacccagtttttaagaaaccattttttatcttttagctaggagagatcaagattcttggtttttaagaaactgataatctaatttctataaactgagtcataaactggtatgtttggaaccatcacaatttctataaaccagtttcttaaaaaccggatgcttccaaacagggcctaaagtatcccagtttactaattatatgcctatcagtttgaacaaggacttgttgctgtccccacagcttctgattctagtgacaaatcaagggacaaactagatcagaagacacttcggcgtcttgcccaaaatcgtgaagctgcccggaaaagccgtttacgaaagaaggcatacatccaaaaccttgagagtagcagattgaaacttactcagttagagcaagagcttcaccagactcgtcaacagggtatttttatttctacatcaggagatcaacctcaatcaacaagcggaaatggagctttggcatttgacatggagtatgcacgctggttggaagagcacaacaaacatgctcaagggtgtggcagctagatcagatgtttttcatgtgctgtctgggatgtggaagacccctgctgagagatgtttcatgtggttaggtggcttccgatcatctgaggttcttaagcagtcctcccaacaagctgaagatgctctttctcaagggatggaagcattacaacagtcgcttgcagaaactctagcatctggatccctgggccctgctggaccttctggcaatgttgcaaattacatgggacaaatggcgatggctatgggaaaacttggcaccctagagaactttctacgacaggctgataatctacggctgcaaacacttcaacaaatgcaacgcatctttaaccacccgacaatccgcacgagccctacttgcaataagcgactacttctctcggctgcgtgctttgagttctctttggcttgcccgtccagggaataaattcaatttaactcataaataggatttttttttgtactgtctctagtatgtcaattagtttcttcacattgctcatgtgttgatgggatatttggatctaagatcttatgaatggatgacatgtatgtgttcaagtgaacgctcagttcatattttaggccatcatgggttaattttggagaaaaaacgagttgtaaatacatctggaataatctaagatcttatgaagggatgatattggaggataagatcgatgaacaaataatgcaacatcactgttgggtgatacgacacgatttatatctgaactaaacagctggatatctgtttgcaaagttatgttcttccaaagaatcac

SEQ ID NO: 200257 - DNA, 5377 bp, Zea Mays
cgccagatctccaagtctccgtgtcaggtcaccgcaatccaagccacacagctttcgcctccggcgctagggtttcgcctccctccttgttcggtccgcgagtgtaccaggaccaggtgatttcttcccctttgatctgctgtgacgtgggagatgccgccgaagtctaagaggggtggcgctgccgccgcgaggaaggcgccggtgacgaggggccggatggggagggcgcaggctgcggcggaagcggcgccggttgtggaggagatggaggcgcctgctgaggaggtgaaggccgccgaggaggtcccgaaggtggtggaggcaccgaaggtggtggaggactcgaaggtggtggaggagccgaaaccctcgcctctgctgccgcaacagccggtggtggtggtggagaaagactccgatatcgcagccaacggtgccaaccagggtgaagatgacagagctgcaaaagaaatatatgaagaagaggacaaaggtgaacggctggagtttgaggatgaaccagaatatgaagaggaggctgctgtagactatgatgagaaagatttggagcagtatgaagagcaatatgaggatggtgatgaagaggtggagtatactgaagacgtggttgaagtggagacagatatggtggatgaggaacttgatgaaggtggtgatgatgtggagggggagggatacgaaaatgctgacgaagaccatcatgtggatggagatgatgaggagcataatgaaatggttaaagagcaccgtaagcggaaggagtttgaaatttttgttggtggactagataaagatgcaacagaaaatgaccttatgaaggtttttggtgaagttggtgagatcactgaagttcgtctgatgatgaaccctgtcacaaagaagaataaaggctttgccttcctgcgatatgcaactgtagagcaagcaaggcgtgctgtttcagagctaaagaatccactggtgcggggtaaacaatgtggcgttgctccaagtcatgacaatgatacactctttgttggcaatatctgtaaaacatggacaaaagaacatgtaagacacttgagatttgttttcgtgatttccagttgcttctttgctgaagaaataacttgttttggcttttgcagttgaaggataaactgaagagttatggtgtcgaaagttttgacgacttactacttgctgaggacactaacaatcctgggatgaatcgtggctatgccttgcttgagttttctactcgacctgaggcaatggatgctttcaggacattacaaaagagggatgtagtatttggagttgatcgtagcgcaaaggtttcctttgctgattcctaccctcaagtcgatgatgaaataatggcacaggtcagaactgtatttcttgatggccttcctccctcatgggatgaagaccgtgttaagaaatatctcaaaaagtatggagctattgagaaagtcgaacttgcacgaaacatgccagctgccaagagaaaggattttgggtttgttacatttgatacacatgataatgctgttgcatgtactgaagggatgagtaactctgagatcggtgaaggtgaacacaaggcaaaagtaagggctagactgtcgagaccattgcagagaccacctagaatgaaacatggattgagaggaaattttagagttgggcatggtgccccgcgaggtggccgtttaccatattctcgtgctcctccacctcgcaggcctccgccacgtcttattcggcctgctgttagccgcttaccatccatcaggagtcatccgttgaagcggcccatagatattagagataggcgtcctgctatgtcaatgccagatagagctaggcgtttccctccagagagatcttatgacaggaggcccccagctccagtttacctgaagagaagtccaaggagagaatacgggaggcgtgatgaacttcctcctccaaggagcagagctacaactgattacattaccagagttccggttgatagacgtccctctttgagggatgattattcaccccggggatcaggttattcagacctcggtcctcgtagtgctccccgtctttctgataggcgagcttatgctgatgatagttatggggagaagtttgaccggcctttagtggcctatagggagggtcgcggccgtgattatgacaccatttctggatcaaagcgtccgtatgcagatatggatgatgtgcctcggtaccaagaaatcggtgtccgtcagtctaaggcacgtttagactacgacattggtggcagcagtgctcggtatggagatacatatagtgagaggtctggacgaccacatgcgggatatagtagcagccgatctatccctgttcatgattcagcatatggcagcagccgtcatggaatgagttatggaggttctgctagcagtgctgatgctggtggtatgtacccaccgagttacagtggtagctatgggtctcgtggatctgatgttggtgggagttcatattcttcactttactcgggtcgcaatttgggtaccagcagtggtggctactatggaggtagcggttccagttcatattactaaggtgcaaaatcttatctcttcctcctttccccaagtttatttcattgtgcttaattatttgcccgtccctcatctctatcacacatgcacatcatggtgcattgttggggatgataaatgtttccccttgtgtatcgaaaatgcgggaagtccagaaccataagttactttaagtacacagatttggcatcacctcgtctttgtggaacagatttggcatcataggactttggtgtaggccctgcattttatggagctcctcgatttaagccacacagatctgtaaaagaagtgccaagcacccaagtgaggcaatgttttccaataagacatttcaacgaagccagaccatcgatttggttcgagcagtagttctgaggacgttctggcttgtttatgtaatgtaaggatttgctttatctggtcaagagttctgaacataacaaccagatatggtgttttaagtgtttcgacatgtttacttccagtgtttctataacattattgagacagatatggagtgtactttgaggtagtttctgcaattcaagttatttggggattacatcttgtgatgtgccggcaaaggccaggcttacaaaagaagttttggaatgagtgcttcttgtaaggctgttagtttctgaaaccctcccttcccttctgtcttctagaggatcaataatcaccaagacagaatgttgattggtcagacttaaattctggacttctatgttgcattccgggtacaaatggtttaatgggttgccaaattttgagagaaactgcttgtgtcaaaaaatttcccaagcagttactttggtttctccaaagtttaagataacagaacttgaagcaaaaggacatttgaaacattgagtatagccttgcaatactatgactatatagagcacaaggcatcatgtaaatctaacaagcagtgccagtattttacagaagggtaggcctagtgcagtggtgagaggctgagagctgactcactgagttaccaggttgcgggtttgaaacagcctctccgcatttgcaggggaaggcttgccttggctcatcctttttctagaccccattcaagttcggtttatcctttccccaggccccactcatgtgcgagccttcgacactgggtctggcctttagtgctagtattgaacaccaccctggtttgatactttgatcacccactatttacgatttttttggagtgttttgtggagtatggattactaacaattttgagcttaatgggcattggatgattgcaagctttcaagaatcttgctggaggtgtaacacactaactgatcaagctacagaaaaaagtatgatttgtctgacaccattaacttctaaccataatttcacaacatagtttgggaccaaacctttagctcaatattgtcacacttagccacttaggctttaaagccaccatatgtgtgatatatcttatcagtctagtatatgataccatgcttgtttgtgtggataatttttactaaatgataacttggccaagaatttacctttatataaaaaaaaactcggccggggagggaaaagaccaccctcccggtattccatataagaagagaccgaaacaatggtcccggccgagaaaatccccgaaccctggcccctcatcactaacgggccgacgtcaactgtccactctgcaacggcccaaccggagggtggcgcacaagacatcgtatcccgagagcggatggggcacagcgaggggttttttttttaaccaagcctgaaaattcgctcccgataggaatcgagcccaggacttggagttgctactcggaagtcctcaacctctaggctagaggccctttcgcaatttacctttatataagttgaagaaacagggtgtgctgtgttgctgtggtttgacagtgactaattctgtatggtgacctgcaaagtagctgaaagatgactagtaatatcaatgcccagctatgcaggccgcagagagcttaaatgcaagcttaacttataactgctggtgtcatcttttgagttttagcaaggaaaactcatgcactaactttggatttacttgagctagggataataacactattggatcctgagttcagactgagagacagttttgtccttgaaattgttttttggagataacctagtgatgccactgagtaggatgaaggatcaatatgtagtttcatgaagagaggctgctctgagatgtcttgcagtatgcagaaacacattttgtgtgcttattaatgtacttgagggccattatttgttacttatgtgttataataattattggagtaggacttcatgagggaaattgatgatggtattagatctagtagaactgttgattgccaattgtgcacagaagtaatgctatatgcaatgacaccaatgagtttggttactgggagccagtatatgtgggaatcagcacctggtggtgcccatttgaaaaaacaagttgaaggggattatttttcttttgcgtggcaacgatgatagatctgaaagcagaaataatttcttgaaaaacagtagccatagaattaagtacaagaatgctctattcaaattctgagttgaaggctgttgaatttttctccccagttgctggagcaaactcaaggatctagcacatttaagtttaactatctagtcaagtattcaacataaagatacttcagaatcacaatgaaaagtctacaatctgcatattaattgta

SEQ ID NO: 200258 - DNA, 3089 bp, Zea Mays
ccccgtccccgtccccgcgaacccgacggggattaaatttcccccatttagatccccgcggggactaaatttgtcccatacccgtcccctaataggggaattcccgcggggaatcggggatcgggtccccattgccatctctacctgagatgctcatccgcccttccttctcggcacgctcgcgcaggaaggctggagagctacggacggccgacgggaacaaggagagacgtcgcggactcgtctgaccagtcaccgcccttatccagcgggaccaacccaggcccacactgacgacgccccccatctcgcatctcgcgtactatttccacaattccaccgacccgtcgtcgcgccactccgtcttgctcaacaccagtcaccactgctctccaagcctccaccagcgtccagccgaaccatcgccaccgcaggatggcctcccgcctcctcctccacctccacccgcgctacccctccacgccgcgcggctcctctcctcctccccaccaaccgcagctgcggcctcgtcgtcggcggcgggcggcgggggcatcgagaaggtgctggtggcgaaccggggcgagatcgcgtgccgggtcatgcgcaccgcgcgccgcctcggggtcgccaccgtggccgtgtacagcgacgccgaccgcggggcgctgcacgtgcgcgccgccgacgaggccgtcaggatcggcccgccgcccgcgcgggagagctacctcaacgccagggccatcatcgaggccgccctccgcaccggcgcccaggctatccacccgggatacggtttcctttcagagagtgctgatttcgcgcagctctgtgaagccgaggggctcaaattcattggaccaccagcatctgcaatccgagacatgggcgataagagtgcatccaagaggatcatgggtgctgctggcgtgccgctggttccagggtaccatggggctgaccaggacgttgagctgttgaaactcgaagcggataaaatcggttatcctgttttaatcaaacccacccatggtggagggggcaaggggatgagaatagtcgaaaggcctgatgaatttgtggattctgtactgagcgctcaacgggaagctgcagcatcgtttggtgtaaacacactattgattgagaagtatattactcaaccaagacacgtagaagtccaggtatttggcgaccaacatggaaatgcgatatacctttatgagagagactgcagtctacagagaaggcatcagaagatcatcgaggaagctccagctccaaatgtgccagctgagtttcggtctcatattggtggagctgctgtatctgcagcaaagttggttactacaatgctggaacagtggagtttattgtggacactctttctggagagttctacttcatggagatgaatactcgactccaggttgaacacccagtgacagagatgattgttggtcaagatcttgtggagtggcaaatacgtgttgcgaatggagaacgactaccattatctcaggagcaggttccattaaatggacatgcatttgaagcacggatatatgctgaaaatgttccaagagggtttctccctgcaacaggaaccttacatcactaccgaccagtcccttctgacccaactgtaagagttgaaactggagtcgaagaaggagataccgtcagcatgcattatgatccaatgatagccaaacttgtagtatggggtgaaagtcgcacggctgcactagtcaagctaaagaagtgtttatcaacctttcaggtttgccaaccaatgttgatttcctccaagaactcgcaagccacagtgcctttgaaaaaggcctagttgacactcacttcattgaacgttataaagatgaccttttgagtatttctacaaagtcctcaaaagaatctcatggtgtagctgagcttggtgcaattttggctgctgcatgcatttgcaagaaggaacacattacatctaaagaatcactacgagccaacaagtcactatctgtatggtacaataatccacctttcaggatgcatcactttgctaggcatcccctggatcttgagttggaagagaatgatggattcagtgagaaacttcttaaactgttcattactcataagtttgatggaagctacttcatcgagacagaagatggcacttctggtttagatgtcaaagttgatcacaagggtgaccacgattttcgtgtggatgtttctggtctgcaaactgatgtgactctagcatcttattcaaagggaaacagcaaacacatacatgtctggcatgggaatcatcaccaccattacagacagactgtaagagctgagcatgcagttgaagatagctcccaacctagtcatgcttctgaagggaagtcgcatccaaaagggagtgttctggcaccgatggctggcttggttgtgaaagttttgcttgaagacggggctcaggtggacgcagggcagcctgtcatggttatggaagcaatgaagatggagcatgttgtgaaggcgcctcgtgccggatacgtgagtggcctgaaggttactgcaggccaacaagtttttgactccagtgtccttttcacaatcaaggacagctctgcaaactgagatggagcgatcactgccctagagtagttgcactgcaactgcatcaagcacccagcggatgctcgtccagatagagaagcgaaggaaataaactgctgggttcgtctgcgggcaatccaatccggcagggcaagcagacggcgcatggtgtttcccggcttgatgcgaatccatcatccgccgcaacaattccattgcgtagtgtacacgaacatgaaactgtaccacgctgagcaagaggaattcttgtttgatttgtgcaatgaaataagttgattccatcaccgttccatttctcataattagtaataataatgaataattagtaataatataatgaggaatgtgtttattttaccaattttatggaatggactcgtgatgtatcacctcatctagaatcaattgattctttaaaccaaacactctctaagcaaatgagatcagtt

SEQ ID NO: 200259 - DNA, 2832 bp, Zea Mays
cccccatctcgcatctcgcgtactatttccacaattccaccgacccgtcgtcgcgccactccgtcttgctcaacaccagtcaccactgctctccaagcctccaccagcgtccagccgaaccatcgccaccgcaggatggcctcccgcctcctcctccacctccacctgcgccgccgcgggcgcgggatcccgggctgccccgtgcccgcgctacccctccacgccgcgcggctcctctcctcctccccaccaaccgcagctgcggcctcgtcgtcggcggcgggcggcgggggcatcgagaaggtgctggtggcgaaccggggcgagatcgcgtgccgggtcatgcgcaccgcgcgccgcctcggggtcgccaccgtggccgtgtacagcgacgccgaccgcggggcgctgcacgtgcgcgccgccgacgaggccgtcaggatcggcccgccgcccgcgcgggagagctacctcaacgccagggccatcatcgaggccgccctccgcaccggcgcccaggctatccacccgggatacggtttcctttcagagagtgctgatttcgcgcagctctgtgaagccgaggggctcaaattcattggaccaccagcatctgcaatccgagacatgggcgataagagtgcatccaagaggatcatgggtgctgctggcgtgccgctggttccagggtaccatggggctgaccaggacgttgagctgttgaaactcgaagcggataaaatcggttatcctgttttaatcaaacccacccatggtggagggggcaaggggatgagaatagtcgaaaggcctgatgaatttgtggattctgtactgagcgctcaacgggaagctgcagcatcgtttggtgtaaacacactattgattgagaagtatattactcaaccaagacacgtagaagtccaggtatttggcgaccaacatggaaatgcgatatacctttatgagagagactgcagtctacagagaaggcatcagaagatcatcgaggaagctccagctccaaatgtgccagctgagtttcggtctcatattggtggagctgctgtatctgcagcaaagttggttactacaatgctggaacagtggagtttattgtggacactctttctggagagttctacttcatggagatgaatactcgactccaggttgaacacccagtgacagagatgattgttggtcaagatcttgtggagtggcaaatacgtgttgcgaatggagaacgactaccattatctcaggagcaggttccattaaatggacatgcatttgaagcacggatatatgctgaaaatgttccaagagggtttctccctgcaacaggaaccttacatcactaccgaccagtcccttctgacccaactgagttgaaactggagtcgaagaaggagataccgtcagcatgcattatgatccaatgatagccaaacttgtagtatggggtgaaagtcgcacggctgcactagtcaagctaaagaagtgtttatcaacctttcagattgcaggtttgccaaccaatgttgatttcctccaagaactcgcaagccacagtgcctttgaaaaaggcctagttgacactcacttcattgaacgttataaagatgaccttttgagtatttctacaaagtcctcaaaagaatctcatggtgtagctgagcttggtgcaattttggctgctgcatgcatttgcaagaaggaacacattacatctaaagaatcactacgagccaacaagtcactatctgtatggtacaataatccacctttcaggatgcatcactttgctaggcatcccctggatcttgagttggaagagaatgatggattcagtgagaaacttcttaaactgttcattactcataagtttgatggaagctacttcatcgagacagaagatggcacttctggtttagatgtcaaagttgatcacaagggtgaccacgattttcgtgtggatgtttctggtctgcaaactgatgtgactctagcatcttattcaaagggaaacagcaaacacatacatgtctggcatgggaatcatcaccaccattacagacagactgtaagagctgagcatgcagttgaagatagctcccaacctagtcatgcttctgaagggaagtcgcatccaaaagggagtgttctggcaccgatggctggcttggttgtgaaagttttgcttgaagacggggctcaggtggacgcagggcagcctgtcatggttatggaagcaatgaagatggagcatgttgtgaaggcgcctcgtgccggatacgtgagtggcctgaaggttactgcaggccaacaagtttttgactccagtgtccttttcacaatcaaggacagctctgcaaactgagatggagcgatcactgccctagagtagttgcactgcaactgcatcaagcacccagcggatgctcgtccagatagagaagcgaaggaaataaactgctgggttcgtctgcgggcaatccaatccggcagggcaagcagacggcgcatggtgtttcccggcttgatgcgaatccatcatccgccgcaacaattccattgcgtagtgtacacgaacatgaaactgtaccacgctgagcaagaggaattcttgtttgatttgtgcaatgaaataagttgattccatcaccgttccatttctcataattagtaataataatgaataattagtaataatataatgaggaatgtgtttattttaccaattttatggaatggactcgtgatgtatcacctcatctagaatcaattgattctttaaaccaaacactctctaagcaaatgagatcagtt

SEQ ID NO: 200260 - DNA, 2875 bp, Zea Mays
cccccatctcgcatctcgcgtactatttccacaattccaccgacccgtcgtcgcgccactccgtcttgctcaacaccagtcaccactgctctccaagcctccaccagcgtccagccgaaccatcgccaccgcaggatggcctcccgcctcctcctccacctccacccgcgctacccctccacgccgcgcggctcctctcctcctccccaccaaccgcagctgcggcctcgtcgtcggcggcgggcggcgggggcatcgagaaggtgctggtggcgaaccggggcgagatcgcgtgccgggtcatgcgcaccgcgcgccgcctcggggtcgccaccgtggccgtgtacagcgacgccgaccgcggggcgctgcacgtgcgcgccgccgacgaggccgtcaggatcggcccgccgcccgcgcgggagagctacctcaacgccagggccatcatcgaggccgccctccgcaccggcgcccaggctatccacccgggatacggtttcctttcagagagtgctgatttcgcgcagctctgtgaagccgaggggctcaaattcattggaccaccagcatctgcaatccgagacatgggcgataagagtgcatccaagaggatcatgggtgctgctggcgtgccgctggttccagggtaccatggggctgaccaggacgttgagctgttgaaactcgaagcggataaaatcggttatcctgttttaatcaaacccacccatggtggagggggcaaggggatgagaatagtcgaaaggcctgatgaatttgtggattctgtactgagcgctcaacgggaagctgcagcatcgtttggtgtaaacacactattgattgagaagtatattactcaaccaagacacgtagaagtccaggtatttggcgaccaacatggaaatgcgatatacctttatgagagagactgcagtctacagagaaggcatcagaagatcatcgaggaagctccagctccaaatgtgccagctgagtttcggtctcatattggtggagctgctgtatctgcagcaaagttggttactacaatgctggaacagtggagtttattgtggacactctttctggagagttctacttcatggagatgaatactcgactccaggttgaacacccagtgacagagatgattgttggtcaagatcttgtggagtggcaaatacgtgttgcgaatggagaacgactaccattatctcaggagcaggttccattaaatggacatgcatttgaagcacggatatatgctgaaaatgttccaagagggtttctccctgcaacaggaaccttacatcactaccgaccagtcccttctgacccaactggtgaaatatggacataccctatgaccaattatattactagttacatttcagtgttgcacaattaacatattcttcctcagtaagagttgaaactggagtcgaagaaggagataccgtcagcatgcattatgatccaatgatagccaaacttgtagtatggggtgaaagtcgcacggctgcactagtcaagctaaagaagtgtttatcaacctttcagattgcaggtttgccaaccaatgttgatttcctccaagaactcgcaagccacagtgcctttgaaaaaggcctagttgacactcacttcattgaacgttataaagatgaccttttgagtatttctacaaagtcctcaaaagaatctcatggtgtagctgagcttggtgcaattttggctgctgcatgcatttgcaagaaggaacacattacatctaaagaatcactacgagccaacaagtcactatctgtatggtacaataatccacctttcaggatgcatcactttgctaggcatcccctggatcttgagttggaagagaatgatggattcagtgagaaacttcttaaactgttcattactcataagtttgatggaagctacttcatcgagacagaagatggcacttctggtttagatgtcaaagttgatcacaagggtgaccacgattttcgtgtggatgtttctggtctgcaaactgatgtgactctagcatcttattcaaagggaaacagcaaacacatacatgtctggcatgggaatcatcaccaccattacagacagactgtaagagctgagcatgcagttgaagatagctcccaacctagtcatgcttctgaagggaagtcgcatccaaaagggagtgttctggcaccgatggctggcttggttgtgaaagttttgcttgaagacggggctcaggtggacgcagggcagcctgtcatggttatggaagcaatgaagatggagatgttgtgaaggcgcctcgtgccggatacgtgagtggcctgaaggttactgcaggccaacaagtttttgactccagtgtccttttcacaatcaaggacagctctgcaaactgagatggagcgatcactgccctagagtagttgcactgcaactgcatcaagcacccagcggatgctcgtccagatagagaagcgaaggaaataaactgctgggttcgtctgcgggcaatccaatccggcagggcaagcagacggcgcatggtgtttcccggcttgatgcgaatccatcatccgccgcaacaattccattgcgtagtgtacacgaacatgaaactgtaccacgctgagcaagaggaattcttgtttgatttgtgcaatgaaataagttgattccatcaccgttccatttctcataattagtaataataatgaataattagtaataatataatgaggaatgtgtttattttaccaattttatggaatggactcgtgatgtatcacctcatctagaatcaattgattctttaaaccaaacactctctaagcaaatgagatcagtt

SEQ ID NO: 200261 - DNA, 2909 bp, Zea Mays
cccccatctcgcatctcgcgtactatttccacaattccaccgacccgtcgtcgcgccactccgtcttgctcaacaccagtcaccactgctctccaagcctccaccagcgtccagccgaaccatcgccaccgcaggatggcctcccgcctcctcctccacctccacccgcgctacccctccacgccgcgcggctcctctcctcctccccaccaaccgcagctgcggcctcgtcgtcggcggcgggcggcgggggcatcgagaaggtgctggtggcgaaccggggcgagatcgcgtgccgggtcatgcgcaccgcgcgccgcctcggggtcgccaccgtggccgtgtacagcgacgccgaccgcggggcgctgcacgtgcgcgccgccgacgaggccgtcaggatcggcccgccgcccgcgcgggagagctacctcaacgccagggccatcatcgaggccgccctccgcaccggcgcccaggctatccacccgggatacggtttcctttcagagagtgctgatttcgcgcagctctgtgaagccgaggggctcaaattcattggaccaccagcatctgcaatccgagacatgggcgataagagtgcatccaagaggatcatgggtgctgctggcgtgccgctggttccagggtaccatggggctgaccaggacgttgagctgttgaaactcgaagcggataaaatcggttatcctgttttaatcaaacccacccatggtggagggggcaaggggatgagaatagtcgaaaggcctgatgaatttgtggattctgtactgagcgctcaacgggaagctgcagcatcgtttggtgtaaacacactattgattgagaagtatattactcaaccaagacacgtagaagtccaggtatttggcgaccaacatggaaatgcgatatacctttatgagagagactgcagtctacagagaaggcatcagaagatcatcgaggaagctccagctccaaatgtgccagctgagtttcggtctcatattggtggagctgctgtatctgcagcaaagggtcatttattggattgtttgtgttgaaggcagttggttactacaatgctggaacagtggagtttattgtggacactctttctggagagttctacttcatggagatgaatactcgactccaggttgaacacccagtgacagagatgattgttggtcaagatcttgtggagtggcaaatacgtgttgcgaatggagaacgactaccattatctcaggagcaggttccattaaatggacatgcatttgaagcacggatatatgctgaaaatgttccaagagggtttctccctgcaacaggaaccttacatcactaccgaccagtcccttctgacccaactggtgaaatatggacataccctatgaccaattatattactagttacatttcagtgttgcacaattaacatattcttcctcagtaagagttgaaactggagtcgaagaaggagataccgtcagcatgcattatgatccaatgatagccaaacttgtagtatggggtgaaagtcgcacggctgcactagtcaagctaaagaagtgtttatcaacctttcagattgcaggtttgccaaccaatgttgatttcctccaagaactcgcaagccacagtgcctttgaaaaaggcctagttgacactcacttcattgaacgttataaagatgaccttttgagtatttctacaaagtcctcaaaagaatctcatggtgtagctgagcttggtgcaattttggctgctgcatgcatttgcaagaaggaacacattacatctaaagaatcactacgagccaacaagtcactatctgtatggtacaataatccacctttcaggatgcatcactttgctaggcatcccctggatcttgagttggaagagaatgatggattcagtgagaaacttcttaaactgttcattactcataagtttgatggaagctacttcatcgagacagaagatggcacttctggtttagatgtcaaagttgatcacaagggtgaccacgattttcgtgtggatgtttctggtctgcaaactgatgtgactctagcatcttattcaaagggaaacagcaaacacatacatgtctggcatgggaatcatcaccaccattacagacagactgtaagagctgagcatgcagttgaagatagctcccaacctagtcatgcttctgaagggaagtcgcatccaaaagggagtgttctggcaccgatggctggcttggttgtgaaagttttgcttgaagacggggctcaggtggacgcagggcagcctgtcatggttatggaagcaatgaagatggagcatgttgtgaaggcgcctcgtgccggatacgtgagtggcctgaaggttactgcaggccaacaagtttttgactccagtgtccttttcacaatcaaggacagctctgcaaactgagatggagcgatcactgccctagagtagttgcactgcaactgcatcaagcacccagcggatgctcgtccagatagagaagcgaaggaaataaactgctgggttcgtctgcgggcaatccaatccggcagggcaagcagacggcgcatggtgtttcccggcttgatgcgaatccatcatccgccgcaacaattccattgcgtagtgtacacgaacatgaaactgtaccacgctgagcaagaggaattcttgtttgatttgtgcaatgaaataagttgattccatcaccgttccatttctcataattagtaataataatgaataattagtaataatataatgaggaatgtgtttattttaccaattttatggaatggactcgtgatgtatcacctcatctagaatcaattgattctttaaaccaaacactctctaagcaaatgagatcagtt

SEQ ID NO: 200262 - DNA, 2872 bp, Zea Mays
cccccatctcgcatctcgcgtactatttccacaattccaccgacccgtcgtcgcgccactccgtcttgctcaacaccagtcaccactgctctccaagcctccaccagcgtccagccgaaccatcgccaccgcaggatggcctcccgcctcctcctccacctccacccgcgctacccctccacgccgcgcggctcctctcctcctccccaccaaccgcagctgcggcctcgtcgtcggcggcgggcggcgggggcatcgagaaggtgctggtggcgaaccggggcgagatcgcgtgccgggtcatgcgcaccgcgcgccgcctcggggtcgccaccgtggccgtgtacagcgacgccgaccgcggggcgctgcacgtgcgcgccgccgacgaggccgtcaggatcggcccgccgcccgcgcgggagagctacctcaacgccagggccatcatcgaggccgccctccgcaccggcgcccaggctatccacccgggatacggtttcctttcagagagtgctgatttcgcgcagctctgtgaagccgaggggctcaaattcattggaccaccagcatctgcaatccgagacatgggcgataagagtgcatccaagaggatcatgggtgctgctggcgtgccgctggttccagggtaccatggggctgaccaggacgttgagctgttgaaactcgaagcggataaaatcggttatcctgttttaatcaaacccacccatggtggagggggcaaggggatgagaatagtcgaaaggcctgatgaatttgtggattctgtactgagcgctcaacgggaagctgcagcatcgtttggtgtaaacacactattgattgagaagtatattactcaaccaagacacgtagaagtccaggtatttggcgaccaacatggaaatgcgatatacctttatgagagagactgcagtctacagagaaggcatcagaagatcatcgaggaagctccagctccaaatgtgccagctgagtttcggtctcatattggtggagctgctgtatctgcagcaaagttggttactacaatgctggaacagtggagtttattgtggacactctttctggagagttctacttcatggagatgaatactcgactccaggttgaacacccagtgacagagatgattgttggtcaagatcttgtggagtggcaaatacgtgttgcgaatggagaacgactaccattatctcaggagcaggttccattaaatggacatgcatttgaagcacggatatatgctgaaaatgttccaagagggtttctccctgcaacaggaaccttacatcactaccgaccagtcccttctgacccaactggtgaaatatggacataccctatgaccaattatattactagttacatttcagtgttgcacaattaacatattcttcctcagtaagagttgaaactggagtcgaagaaggagataccgtcagcatgcattatgatccaatgatagccaaacttgtagtatggggtgaaagtcgcacggctgcactagtcaagctaaagaagtgtttatcaacctttcagattgcaggtttgccaaccaatgttgatttcctccaagaactcgcaagccacagtgcctttgaaaaaggcctagttgacactcacttcattgaacgttataaagatgaccttttgagtatttctacaaagtcctcaaaagaatctcatggtgtagctgagcttggtgcaattttggctgctgcatgcatttgcaagaaggaacacattacatctaaagaatcactacgagccaacaagtcactatctgtatggtacaataatccacctttcaggatgcatcactttgctaggcatcccctggatcttgagttggaagagaatgatggattcagtgagaaacttcttaaactgttcattactcataagtttgatggaagctacttcatcgagaagatggcacttctggtttagatgtcaaagttgatcacaagggtgaccacgattttcgtgtggatgtttctggtctgcaaactgatgtgactctagcatcttattcaaagggaaacagcaaacacatacatgtctggcatgggaatcatcaccaccattacagacagactgtaagagctgagcatgcagttgaagatagctcccaacctagtcatgcttctgaagggaagtcgcatccaaaagggagtgttctggcaccgatggctggcttggttgtgaaagttttgcttgaagacggggctcaggtggacgcagggcagcctgtcatggttatggaagcaatgaagatggagcatgttgtgaaggcgcctcgtgccggatacgtgagtggcctgaaggttactgcaggccaacaagtttttgactccagtgtccttttcacaatcaaggacagctctgcaaactgagatggagcgatcactgccctagagtagttgcactgcaactgcatcaagcacccagcggatgctcgtccagatagagaagcgaaggaaataaactgctgggttcgtctgcgggcaatccaatccggcagggcaagcagacggcgcatggtgtttcccggcttgatgcgaatccatcatccgccgcaacaattccattgcgtagtgtacacgaacatgaaactgtaccacgctgagcaagaggaattcttgtttgatttgtgcaatgaaataagttgattccatcaccgttccatttctcataattagtaataataatgaataattagtaataatataatgaggaatgtgtttattttaccaattttatggaatggactcgtgatgtatcacctcatctagaatcaattgattctttaaaccaaacactctctaagcaaatgagatcagtt

SEQ ID NO: 200263 - DNA, 1830 bp, Zea Mays
gccgcagctcctccgccctggtcctggcctatatattcctcccgttcgttccgttcgttaagcccttgcacaagcgcgggcggccctccgaccggccgaaactcaaactccggcggattacgggactgggatcggtctgagctgcgcaggtggtttccggccggtgacagtatgaacactgtgtgcgaagtctgtggagatattggttacagacaacttctgctgcgttgcagagactgcaagcattatgctgtgcaccaatactgtctggacaaagttgtcttcaatgcgtcatcaatagaatggttctgttacgaatgcctacataggcgtggcgacgacgttacttgcgccagatctccagagcaggtctcaagtgaagggccatcaagtcatgcccattgtggttctccagaacatcagctaactactaccaagagcgtggagtcaataataagggatgtggggccatattgttcacccaatagtgatggctgtgccgactcattttccagcccccctggcgtagaaagcatcccaagcgttcgaggaacaagtgcagatcccattgatgtttcaagcacttcttcgtctcgacatgataccagcatagaagcgtctgcaagcagtgaaaggtccacggggtgtcagacggctagctcctgtcgtcgtgtgaaaactgtggagatggctacggtgtcctcatcgtctgatgaggagtcaggagaagacattgtctctgaaaacgtcgttttgggatatgttttggcatatagatgctatctatctaaagcacagaagaagagagtgatggggcttgttcaggaaattcaacctcaattcacagcctttgtatcaataatgcggaggggcaatgtgcaacccccgggtcctaacctgggaatcaccaaggaatatgcaactgcacatttcccagatagaagcacacacatcactcttgggacccctggcaagagcaagaagtggcatcccagattctacaggagagatgtaagcagaaactacatggttacgggagagtggttagactttgtccgtgacaatcatgtccaggagggagacatctgcctgcttttaccaacaagggatgatgtgatgagacgcacgtttacggtctacgttctgcacgaaacatctcattattccgcaggtgggcctggcgcgtctagtgttgcgaagatggcttcagaaatccgtactgaggaagaaccagctgctgctgcaggagagagtgtttcctcgggaactagtggtgcgcaagagtttcctcatggatctgctgtggagagcggcggagactctggtgactcattcgagcctccatacttcgtaccatgcaagagtcctctatccgaatcccagaagaggatcgtcgaggagcgagtgcgagctatccgatctgaaatccctatttgcgtggcagtgatgaagaacaacaacgttggtttcgctcaacgttggatgctagttcgcgatacggttcggtgtatctcccaaccaaagggcaaaccatattgctctgttgcgcggggaagacgtggaaggccaagatgatgtttcataatggtcggcggtggtttctcaatggaggatggcccaattttgctcgtggcaatggcctgcgcgtcggtgacatctgcctattccaactggagaagaacgagagcacgcttaccatggctgtccatatcattcgcagggagcagttttagtttgccgtatatgaaagtgtgtcgcccgcccctgttctttcggggcttattgcgcttgcgctatgtactccgtttcaaatatgttttgacttttcag

SEQ ID NO: 200264 - DNA, 1396 bp, Zea Mays
aaaacaaatttagctgttttttctttcgacgttttcgtccctacctcgcggttggggctcgcggctctcgcggcccgcctgtgctactgctgcacccgcacggccgcgcgcacctccaccgcaacggtcacttctagctctcgtgcagtcgtgcgtcctccatcgtcgcctctcctcccgcggtcagggtaacgccgcgtgtctcccgtcgcatactcgctcacacccatggccgcaccgccggccgcctcgctagtggcacgcgccgccctcccgccgcgccttcgcccaaccaccgcttctccccttggccccgccgtcctcggtcccagcagccgccgccggtacctccgtctccgccgctcgccatcgctggcggggactgccgcggcggcggcgagctccccatccgtgccttcctcgtttccggggcccgggccaggtatcggcgatgccctcggcgacgtcgaaatctactccgcggccaccggcgagcccgtcctgttcagagacctgtgggaccaggacgagttgccctttccgttggaatacctctatgctgatcctgatcggaaggcgtataatctcttgggtctatattttggtgttggtcgcacgttcttcaatccggccagtgcgaaagtgttttcacggtttgactcccttaaggaggcggtgaagaattatacaatcgaagccaccccagatgacagggcaggtgtcctacaacaggggggaatgtttgtgttcaaaggtaaagaactgttgtacgcaaggaaagacgagggcacaggcgaccatgcacctttggacgatgtgctcaatatctgctgcaaagttcctgtaacctaacccgacggcttgtcccacagctcagtaggcacattgtctttcatccattctcttttggcaattggcgttagcagatcccttatcttgttcacaagctggacaaggtacttggaaagcactttcggcgtccttgattcctgaacttccaggatcgcctgctgcaagagtgtcttctccaccaatgtgccgatattttcttttgagatgcttggtttactttgatatctttttggtgatggatcgtgagttgttggcttgttgcattatgaattgcgtactgtaagtatccagtttgctgtttagcacttatacaattcgaaagcaaagttcgaagtcctggctgcctggctcttccttggagatggaagtttttgcacttccagaaatatcgggaacataaagtccatgtgatcttttgtgcctttaaaattttggatcgtttcctaatggaaatctgttccagttttattgacatcagaaatcctatctcctgtagtcctgttattcagcgtctgagtggagctataaaattgatcttatcatt

SEQ ID NO: 200265 - DNA, 1708 bp, Zea Mays
ctgcatttaacatattcagttgtgctgatcaaacactcggttcatcaaaatggagctgaaaatatattcttttgtctgtattcatcaatacaaggttttgttgaaggtctgagctgtgcaaagagagatggattccaaaaagaagaggaacaagaagaagaagggaaaccaagggaagaatgccgctgatgtcacatccattgctggggaagctgcttctcagaatcacaatcatgagttagccccaatagatcatcataaaggttctgatgcagatgatgtcatgtccagtgttggagaggaacttcctcagtacaagaatcatcagccaaatatacaggcagattataatggcacaagtgcttacgacactacatcctccattggagagtgtattgcatgctatcaaaacaacgaacctatgatgacacaggagaatcacaaggctagcaatgcagtccctgcagatcagaggagtgttggactgtcagagtctagtgtggagcttgacatgcatagacttcatgaagccaaactcgataaattacatgagacaataaagcagttggagaatgaaaagagtttgtggcttcaaaaagtgatcaccatggagggtgaacttgaaaagttgcataacgaagtgggttgtcatgctcaaaatgaggtccttttggaggaaaaactgaatagtctacagagtggttatgatgtgctgattaagaaggaggaagttgtggataacaaagtcaggtgcatagacaacatcaatgataccttaactcatcaagagtctttgcttaaagaaagattaagtgggctggaggaaacaaacaaatccctgctggtacaggtgaaggtgttggaggaagcttcaaacaatacttctgaggaaaatcagatgttggtaaaaaaaatatatgaacttgattcaagactacaagcacttgaagcaaaggctgctcctagtgaagccttaatgattgaaaagttccctgataataaggtgatggatcaagtgcattttgccaactcgccacttcagcaacagacaattgatttttcagagggtaacaaactgtttgctgagagaggtctgagcagtccagtgaaacttaatcctgacaacagctatcgtcaaatctacgacattcccagcaatgactatgctagtaattatacagaggaaacatcaatacaacttccagaaataggcaccagcaatactattgttcaaggtcatgttgatgtcaatgaacaccgatttgatggaccaagaacaatcgaagaaatcgttcctgttccattggatgagatacagatccatgaggatgtcccagggcaaccgggagcagccgatgagatagatgaggttccattttctgacgctccgatcattggtgctccattcagactgatctcatttgttgctaggcgccggagaaattcttgttcctttatactacctgttcttgaatatttgtcatccgctacttcatttttaaattaaaacacgataaataaaaaaagaacggagaagtacaatataagaagctatgtaccatgggcctctttacgggtctaaccatgcgaaaaagttgttctggaaattctattattaatgactgaattttggtgtgctgacactataacctgtgacagacacctatatgcttgatttattgcatcgtcttgttaatcttaatctttt

SEQ ID NO: 200266 - DNA, 1168 bp, Zea Mays
caaaccggtgcggactgtggagggactcggccacggaccacccgtctcgccctcatctaattacgccccgctcgctgtccctctcagatctcttccttgttctcgcctcgtcgtccccaatcgtcgccgggagtctcccgatccttcttccaccacctcaccggtggtgtcagggccggctcgcggacggtgcttggactgcccccgtcccgtcatggatcgcgccgagctcaccaccgaacaggttctgaagcgagatattccatgggagcattacatgtcaactaagcttatctccggaacgtgccttcagcttttacggcgatatgaccacaaaccggagagccagcgagctcctttgcttgaggaggatgggccagcatatatccgagttttcctgaatatcctgcggagcatctccaaggaagagactgtggaatacgtgcttgcactcattgatgaaatgcttgcaacaaatcctaagcgtgcagcactgttttatgatcaatctttgtcgggtgaagatatttatgaaccgttcttaagttgttatggaaaggcaactggtttgtacaagaaaaaagttgtaagatattgactgttataattagtgcacgaccaaagcttcagaatggcacacttccaaatggagatgcttcgaattcgaagagcaagcttacttcaacacacgatgtattgagaggtttggttgattggctctgttcacagctgaggaatcctacacacccgagctgctctattcctacttctatccattgcctctccactttgctaagagaaccatatgttaggacattatttgttcaagctgatggcatcaagctgctcattcccttaatttccccagcttccacacaacagtcaattcagctcctttatgaaacttgcctctgcatctggcttttatccttttatgatgctgcagttgattatttgtccaccacaagggttatgccaagacttgtagaggttgtcaagggctctactaaagagaaggtggtcagagttgttgtgttgtccttccgcaatttgctggcaaagggtgcatttgctgcccagatgatcgatcttggattgccacaaatggtacaaaacttgaaagctcaagcatggactgatgaggaaatgtaaccatctccagcaaggc

SEQ ID NO: 200267 - DNA, 1852 bp, Zea Mays
caaaccggtgcggactgtggagggactcggccacggaccacccgtctcgccctcatctaattacgccccgctcgctgtccctctcagatctcttccttgttctcgcctcgtcgtccccaatcgtcgccgggagtctcccgatccttcttccaccacctcaccggtggtgtcagggccggctcgcggacggtgcttggactgcccccgtcccgtcatggatcgcgccgagctcaccaccgaacaggttctgaagcgagatattccatgggagcattacatgtcaactaagcttatctccggaacgtgccttcagcttttacggcgatatgaccacaaaccggagagccagcgagctcctttgcttgaggaggatgggccagcatatatccgagttttcctgaatatcctgcggagcatctccaaggaagagactgtggaatacgtgcttgcactcattgatgaaatgcttgcaacaaatcctaagcgtgcagcactgttttatgatcaatctttgtcgggtgaagatatttatgaaccgttcttaagttgttatggaaaggcaactggtttgtacaagaaaaaagttgtaagatattgactgttataattagtgcacgaccaaagcttcagaatggcacacttccaaatggagatgcttcgaattcgaagagcaagcttacttcaacacacgatgtattgagaggtttggttgattggctctgttcacagctgaggaatcctacacacccgagctgctctattcctacttctatccattgcctctccactttgctaagagaaccatatgttaggacattatttgttcaagctgatggcatcaagctgctcattcccttaatttccccagcttccacacaacagtcaattcagctcctttatgaaacttgcctctgcatctggcttttatccttttatgatgctgcagttgattatttgtccaccacaagggttatgccaagacttgtagaggttgtcaagggctctactaaagagaaggtggtcagagttgttgtgttgtccttccgcaatttgctggcaaagggtgcatttgctgcccagatgatcgatcttggattgccacaaatggtacaaaacttgaaagctcaagcatggactgatgaggatctgttagatgctctgaatcaactagaggtgggactcaaagaaaacctcaagaagttgagttcctttgataagtacaaacagcaagttcttcttggtcatctggactggtctccaatgcacaaagatccaagtttctggcgtgagaacattaacaattttgaagaaaatgatttccagattctgcgagttctcatgacaatcattgacacatcaagtgacaccaccgctcttgccgtggcctgctacgacctctcacaattccttcagtaccatccatctggccgaatcgtggtggcagacctcaaggctaaggaccgagtcatgaaactcatgaatcatgagaacactgaagtgaggaaaaatgcattgatctgtgtgcagaggctcttccttggcgcaaagtatgccagtttcctgcaggcttgagaaaagctgagtcttgtatttagatccagagaacccctggtcatttttcagaatggctgttgagaaagaaaaaccttgaaaattcttgttcagtgtatcctattgttatttgatttctgaagccgatgtataataaataatcagagtcatagaatgctcgatgtaataaagtgtccatgggcttgttgattcatttatgtaaattttgacttgtaacattagcaaacctcttttttgttattcttctgcctgacaacattgcctgattcgtgtgcattac

SEQ ID NO: 200268 - DNA, 2253 bp, Zea Mays
gctggctctgcattctcccctccggccctcccctcgtcttctcttctcttctccccgcggagcgagcgagagaagcaaggccgctccgtgcccccaaccccgctcactgagcaaagcggaaaaagcgaggaaaatatcctgctccagcgaagcaccgcaggccgcagccgcagccgcagcagagaagagcagacgccatcgcccgcagccgccgcccccggagaatggtgcgggccggaccgcgacgggcgaaggagggcgccgcggcccccggcggcccccgccgccgctgatagtagtctacctgctgctaaccagccatctgaaggcacagtggtcgcacgcgaggggcccggattgattgggtgataggcggcgggcgcagatccaccgaccccctcgtcgtgcgcctgtgtctctggttccggtccgtgtccccttggccgcttggtggaggccggaggcgtggtcggtgcgtttggagtttgggtatggcgggtggcggcgagggggatcgcgtgggtgtcgggggagcccagcagttcgtggaccggagcaagtgacctgcgccaagtctccgcggcaggtgatcaatatcctcaactacgagggcggcgagatcgacatcatcctggctgaggtcgatcttccggtctccaagtgcttcaagatgctcaagtacattgcccggaacaaggacctgcgtcacatccccatcataatgatgtccaacagagacgaggtgtctgttgttgtcaagtgcttgcggcttggcgccgccgagtacctggtgaagccgctgcgcacgaatgagttgctgaacctttggacccatgtgtggcggcggagacggatgcttggtttgcccgagaaaaacttcttcaatgacaacttcgagttggtgctctcagaacctagcgatgccaataccaatagcaccaccctcctctcagacgagaccgacgataggcctaaaggaaacacgaatcaagaaacaggcacctcaaagcaacttgaatacgagtctaatccttcggttgctgagcccgaccagagagaaaagatggagggtgttccaggctctgccctagatgccagtaaaaaatcctctccaagaagagcgttttcacgccctataaaaactaacctgagggttgccgagtcgtctgcatttctagcatatgtcaagccaagcaccccagccaccagctcatttgacagcgaattacaaaggggtggcagccgattagattccttggataaccagggtaattgctctagcgcaaccgatagaagtgacactggtactgatgtaaatattcggagtaaagaagcttttgagatgcctgcgcagtaccctatggtatggttttcttcctctaacatgcatatggagcgaagcagcgaaggccataatgatacttcaggaactccacctgcataccatttcccattttattacccagggatggtagagcacaacatggcactttcgtcggcgcaagattttcaagcaaacataaacaatgctcaagcacatacaccgccagcgatgcttcctcagtacaatgtttatcctcagtgccatggtttacctgtgataccatcatttcagtttaatccttctggcatgagtacgcactcaagtcatttaccaacgcaaaatgtgtggtcatcggcatcgagcacaccaccagtgcctgaggaaacatgcagtcgctctgaaaggagggctgcagcacttgccaagttcaggctgaagaggaaagagcgctgctttgacaagaaggtgaggtatgtgaaccggaagaaactcgctgaaacgaggccaagggtgcgaggtcagtttgttagacagccaaccaatacggatgtcatcagcattggagatgatatatctgaagacgaagatgacgatccatcgtccagggaggtagatatggtttcttctccagagtagtagtggagaggtcctccatgtgaaaaaatagactgcagatggttactgctcatcttgttacaactcagtagacctaggcaatacaccctttttgctcacacacagtattacatttttgtccctaaaacatgtggctgttaccctggttgctttaatgaagaaatcatctttgataaagtgtagctgaagttttgctagttattgttgcacagaccagtctaatcaatatgatcttatggcaggataatcttttgagaaaaacagggctattattgtacattcctcctattatt

SEQ ID NO: 200269 - DNA, 2465 bp, Zea Mays
ccgagtcccaccactaaaaaagtgcaccccactttttttttggatccactaaaaaagtgcccacaatccgcagggcagccgcgcccacacgtcagagacgaagacgccggcggccgcacctccctcctcgccgccgccccggcggcttctagcttctgctgccgatgccgatggcgctattgtctcgcggattgatgggtgccacgcgcacttcaacgcgccgtgctcacacggcgctggcgcccgggccccacagcaccgctttataagtaaccagcacgcgctgccccctcccctcctcccccggtctcactcacactccttcatcgggctcggcccgcgcggtcgtgagttcgtgactgcggaggaagtagcgcaggcgaaaaggctgcagcagtggacggcggcgaaccctagcctagctccgcgagtgcgttggcggtttgattcgatggccgtggcgtcgcggctcgcggtcacgcgtgtgtcgccggcggacggcgcgcgccccgcggcggcggcggggaggaggagtgggctcgcggtggttcggctcccgccgaccgacagcagggggagaaggaggaggcgcggcggggccgtcgcggccagccccccgacggaggaggtcgtgcagatgacggagccgctcaccaaggaggacctcgtcgcctacctcgtctccgggtgcaagcccaaggagaactggagaattggcacggagcatgaaaagtttggttttgaagtcgacacattacgccctataaaatatgatcagattcgtgacatactgaacgggctcgctgagagatttgattgggagaagataatggaaggaaacattgttatcggcctcaagcagggaaagcaaagcatctcactagaacctggaggccaatttgaacttagtggcgctcctctcgaaacgttacatcaaacttgtgctgaggtcaactcacatctatatcaggtcaaagcagttggagaagaaatgggaataggatttcttgggcttggctttcagccaaaatgggcactgagtgatataccaataatgccaaagggaagatacaaaataatgaggaattacatgcctaaagttggtacccttggccttgatatgatgttccggacatgtactgtgcaggttaatcttgacttcagttcagaacaggatatgataaggaaatttcgtgctggcctcgcattgcagcctattgcaactgcaatatttgccaattctccctttaaagaaggaaaaccaaatggatttctcagcctaaggagccatatctggacagataccgataacaaccgtgcagggatgctcccttttgtctttgacaactcatttgggattttatgcaaggaaagctccgacaagctcctggggagttgcctactcttaatgattgggagaaccatctaacaacaatttttcctgaggttaggttaaagagataccttgagatgagaggtgctgatggtggcccatggaggagattgtgtgcgctgcctgcattttgggttgggctgctgtacgatgaggaatcattacaaagcattttagacatgacttttgactggacacaggaggaaagagagatgctaagacataaggtaccgttgactggtctgaagacaccatttcgcgatggatatgttagagatttagccgaggaagttctaaaactggccaagaatggattggaaagaagaggatacaaggaggtcggtttccttagagaggttgacgaagtggtgaggacaggagtgacacctgccgagagacttctgcatctgtacgagacgaagtggcaacgcaacgtagaccatgttttcgagcacttgctatactgatgttgtagatgtaccctagtacaaaaatctcatctttgattcattcaacgccttgagtgggagggcacaggaacacagcttttggttaagttgctgaccgggggaacagctacccggtgctgcgtgcggtgcctacaaataacttcgctcgggacggatcactactctctagggagatggaacaaatcactgtttgtaccggccctttttgtttctgttttccttcagagatggagatgccgtattgaaaataagtccatcttctgtacgatgggaactgtctgttttccccccttctttcctttcagcattgttgggatgtttgtcccgtgttaacatgcaaaatcaattacgtgtacgataaataagctgatggtttgatccggaatctgcaattgcgcgtgccttttcccaccttgtttttagccaaaaatcactatggatgagactacagtaatcgagtcctctggctgcctcaatttaattaggaagggggacggggaccgggggcattggttttcgtcgaagatgagtgttgctctgtggttctagctagcactgtcagaacatgaaatccaaccatagtatgaaccggcagaacatgt

SEQ ID NO: 200270 - DNA, 881 bp, Zea Mays
cgatgctagaaaatacaagcagtgtgtgtgttgcaggtaccgttgactggtctgaagacaccatttcgcgatggatatgttagagatttagccgaggaagttctaaaactggccaagaatggattggaaagaagaggatacaaggaggtcggtttccttagagaggttgacgaagtggtgaggacaggagtgacacctgccgagagacttctgcatctgtacgagacgaagtggcaacgcaacgtagaccatgttttcgagcacttgctatactgatgttgtagatgtaccctagtacaaaaatctcatctttgattcattcaacgccttgagtgggagggcacaggaacacagcttttggttaagttgctgaccgggggaacagctacccggtgctgcgtgcggtgcctacaaataacttcgctcgggacggatcactactctctagggagatggaacaaatcactgtttgtaccggccctttttgtttctgttttccttcagagatggagatgccgtattgaaaataagtccatcttctgtacgatgggaactgtctgttttccccccttctttcctttcagcattgttgggatgtttgtcccgtgttaacatgcaaaatcaattacgtgtacgataaataagctgatggtttgatccggaatctgcaattgcgcgtgccttttcccaccttgtttttagccaaaaatcactatggatgagactacagtaatcgagtcctctggctgcctcaatttaattaggaagggggacggggaccgggggcattggttttcgtcgaagatgagtgttgctctgtggttctagctagcactgtcagaacatgaaatccaaccatagtatgaaccggcagaacatgt

SEQ ID NO: 200271 - DNA, 1610 bp, Zea Mays
cgcaattgcccccaccccccgttgcgttaagttctcgccttcgatgttctttctgctttctggccgggtcttgccatggtctccgttgatctgcggcgtcctgggagttcccgacgaatggacgtttgccagccgatgcttggcaccacgctgagatggacagcgtcgagtacttcaatctttccgacctctgggaacagtactacgagtggagcgcgtacggcgccggagctacggtgcagctcccaggaggggagagagtagttcagtactatgttccatacctgtccgggatgcagctattcaccaacaaggtcctgacggcatccaggagttttggtgaagataatggcatggatttctggagtgatgatgaggacaacgagaagatgtcaagatcgtggagttcgacttctgatgaatcattgttcaactgtgatgtggtatggcccaacaggaagcgtccagggcacttgtcctttgagttctttgaagtaggttcaccttacggaagggtcccgttcattgacaaggtctatgaactatcccagggctttcctggattgacattactgaagagtgctgacctatcgcctgttagctggatgtcagttgcctggtaccctatataccacattccttaccagcgtagcgtgaaggatttatctgcatgcttcttgacttaccatactatttcctcctcgttccaagattacgggctcgagaccatgaccaatgattgttgccatccagttgccgacggcaagcagaatggccacatggataaaaagagtaacaccgtgtcactgcctccattcggcctcgcagcacacaaggtacatggttccctctggaccaaccccatgacaggagatcacagaaagatggacttcctcttcagtgcagcggactcctggttgaagcagcttggagtccagcaccatgacttcaacttcttcatcactcaccccatgtgaaccgctgctctggaacagcttccgaagaaccacatggacgcagtgtgaagctactaatgttacttacaccaccaacgacggtagcaaaacgttcacagtacagtccgttggtaaagtaagtctaacaatcgcagggtagatttatacttgagtttactgcagcgaataccaaacatgtcggcagtcggcactcaaaaggttttctgtttcttgtttcttggcagaaagatgtaacagatctgtacagaagttttgcaactaatttggtatccattgtggggttgggtatttggatccatattgtagctgttgcttgtgaacattagggctagtttgggagccagaaaaccgtagaggattggtgcggctaaaatcctcttttattcaattttaaataacaaggggattttagaccctataatcctgatttctgtctgccattgtcaacttcattttcctaatagatttatattttttaaaggaaaatgaactaatttttcttcgggaaattgaaatcactcgaggaaaggttgccaaactagcccttagtgtcctagagaatgttagtcctgctttacgcagctgaatctgttgacgacaatttcattctcttctgcagtaaggcagttgtac

SEQ ID NO: 200272 - DNA, 2936 bp, Zea Mays
gtgagttaaactgatcaccagatgagatgggtcagacatccagccagcctcgtgccctggagctgatggagaggcatgtggtggccgtggtgggcccccagtcctcgggcatcgcgcacgtcgtctcccacgtcgccaaccagctgcgcgtcccgctgctgtccttcgccgccaccgacccggcgctcgcctcctcgcagtacccctacttcgtccgcgccacgcacgacgaccgcttccagatggccgctgtcgccgacgtcgtcgcgcaccacggctggcgggaggtcacggcggtctacgtcgacaacgactacggccgcggcggcgtcgtcgcgctcggagacgcgctcgaggccctgcgcgccagggtctcctacagggccgcgttcccgccgggcgccgaccgcgccgcgctcgccgacctcctcgtgcgggccaacatgatggagtcgcgcgtcttcgtcgtccacgccagccctgactcgggactcgacgtcttcgccgccgcgaggtcgctcgacatgatggccaccggctacgtctggatcgccaccgactggctcgccgccgccatcgatgctgctggtgctggtgctgctgctgctgctggtaatatacagggtgtcctcatgctgcgccagtacaccccggactcggacgccaaggcgtcgctcgtctccaggttcgcggccaaacagtacatcaacgcgtacggcctcttcgcctacgattccgtctggatggcggcgcgcgccatcgaccagttcctcgacgacaacgccagcggcggtaacgtctccttctccgccgaccgcaacatccgcgacgccaacggcagcgcgctgggcctcagcgcgctcagggtgttcgaccagggcgagcagctgcttcggaaggtcatgctcgccaacttcactggcgtcacgggcagcgtccggttccagttggacgccgatgggagcgggggcgcgaccctcatcaaccccgcctacgagatcctcaacgtcggtggcacgggcgtccgccgggtcgcctactggtccaactacacgcgcctgtcggtggaggcgcccaggctgctcgccgacggagggccgccgcccaactccaataacacgaccacccagcagcagcagcagatgtacagcgtcatctggcccggtgacaccacggctaagccgcgcggatgggtattccccaacaacggcaagccgctgcggatcggcgtgccgtaccggacgacgtacaagcagttcgtgtccaaggaccggtccagccccgacggcgtcagcggctactgcgtggacgtgttcaatgcggcggtggcgctgctcccgtacccggtgccggcgtcgttcgtcctgttcggcgacggcgtcaagaaccccagctacaacgatctggtgcagagggtggctgacggcttcttcgacgcggcggtgggcgacatctccatcgtcacgaaccggacgcgggtggtggacttcacgcagccgtacgtggagtccggccttgtcatcgtgtccacggtgaaggccaagaactccaacgagtgggccttcctcaagcccttcacgccggggatgtgggccatcatcggcgccttcttcctcttcgtcggcgccgtggtgtggatcctggagcacaggttcaacccagagttccgggggtcaccgaggaggcagatggtcaccatcttctggttcagcttctctacgatgttcttcgcgcacagagagaacaccgtgagcactcttggccgcttcgtcctcatcatctggctcttcgtggtgctcatcatcaactccagctacacggccagcctgacgtccatcctgacggtgcagcagctgtccacgggcatccagggcctggacagcctcctctccagcaacgaccccatcggctaccaggtcggctccttcgcccggagctacatgatggacgagctgggcgtcccagcgtcgcgcctccgggagctggccatcgacggctacgccggcagcctgcagcgcgggcccagcaacggcggcgtggcggccatcgtcgacgagctgccgtacgtggagctcttcctctccaccaactgccagttcaggacggtgggccaggagttcaccaagagcggatggggattcgcgttccagcgagactcccccctggcggtggacctgtcgacggccatcctgacgctgtcagagaacggcgacctgcagcggatccacgacaagtggctcagcccagggacgtgcgcgtcgcagagcaccgacggcgtgggcgccgacaggctcaatctgggcagcttctggggcctcttcctcatctgcggcgtcgcctgcttcgtcgccctcctcatctacttcgccaggatactctgccagttctgcaagtaccacggccacgggaccaccgacggtgccggcccgttccccgtcccggagaggagcctgcggcggcccgccaggctcaccagcatccgggacctcatgtcctttgtcgacatgaaggaggccgaggtgaagagggccatccggagcaggtccgacaggcgactcgacgggtccatgggcggcaggagctacacctccgaagggccgtccttgtcacggccgtcctccatgtcgccggtgtaagacgggccggcggcgttcttcttcaagacacgttttttgtttgtgctgatctgacttaggtagttggagcctggaggcgacgatctgaaatcgatgaaaccgtgcgtatgcacaaattgctattcaacgaacatacacacacacacgatctttcggaagatagaatctgtaggtgctagtatgcaacgtagttctcccctagaattgcaggggtattatgtacaaaagtttcaggtttttatggacagctaaagttgaaatgagaatttcttttctatacatatactatgactattgagc

SEQ ID NO: 200273 - DNA, 597 bp, Zea Mays
agagatgaggaaaagaagatgggtacacttgtcaaagaggaatttggtcgtccaaatagggaaaatactatgggaatgcgccatggttcatatgataaactagatgatgatggccttgcaccacctggaacaagggtctcgggtgaagatgtcattattgggaagacatctcctattccacaggatgacgctcaagggcaagcttctaggtactcgaagcgtgatcatagtacttctctgcgtcacagtgaaagtggcatggtggatcaggttctgttgacaacaaatgcggatggtctaagatttgtcaaggttaggatgcgatctgttcgaataccacaaattggagacaagtttagcagtaggcatggacaaaaaggaactgttgggatgacttacactcaagaggatatgccatggacaatcgaaggcatcacacctgatattattgtgaatccacatgctattccatcccgtatgactattgggcagctgattgagtgtatcatgggtaaagttgcggctcagatggggaaggaaggagatgccactccattcacggatgtgactggcctatgttgtgcaaaacatgctatg

SEQ ID NO: 200274 - DNA, 3229 bp, Zea Mays
gtctgggcgcaggtcacatcatcagcacaaggactaggccaacaatacatcgcaatgaagtacatgaagctcggttcaaaacctgatacgttctataccgaagaagcagtcaggtcagtcgtatcagacatacccgccgatctcattatccatgtaaataacaccaagtatcagctacacaaggtacatagtgatgtttttcttccatttaaatgcaaaaaaaaggtgatcatcgtcttctttcacgaaacactctcatacattctctcgtgtagtgctaatcaattacttcatggtttcgagacagatatgcatttttcttcttaccggtgaccaaaaagtagcttttaggatcttgtaagtcaactgaaatacccatatatcaatccgatgctctacgctgaaagcacaaagttgattgagaaaaacatattcctgtcaatcaacagcagttgcagccacttgtaaaggcttagagatttaactttacaaaaaacaactccagataattatctaatagttcatcgcttcacatgttaccaatttctttccatgcgcattgtcacggatctcatgatgctatgaacagaggcacctttactactaagtcgccgctcgcaatgattagcgcgtatcaaagcctaatgatggcatcagactatataattctatctttgtttatgctagtaactaataaaaatggtcaatgaagaaggaatctgggtttggttcataggcctaaggatctgctttggcaggattgtcatagttcacatgctgaaccagacacgcagccggctttttcagatacacgcttcaaaagcttgttctgaataataacatggcaacaacctagcgagtcggaattgattgtgcagctctttaatagcttttcatcaggtggttagtttattggcaaatttgtaaagtgatcaagtggtgaaatctatgcatggtgtgcttctgctaggctagtttcaagggttggtatttttttatattttttctactaagcaaagagttctggtgaactcgatttgaaactattttgacagatctgcttatgtatcacttttacatttgaaatggcggttaacctgtgtcaagagttatgaagttgttttcattttgttggttctacattatttgcagctgaaattctctgtctctgacgacattatttacaaacaaagtatatgcgaacgttacttcgtcctagtatagtagggtggtgacgacaaagaagcgagttttccatttccaatgtccagcctcttgatttcaggtgttgtttacctgtagttcccactgctcctcaagtgcggcctcctgcagcgcctctgctccgacaccgacgacggcgatgaggagccggtgcccgtggcgctgcacgacatccctggcggcgagcaggcctttgagctgtgcgccaagttctgctacggcatctccatcagcatcagcgccgggaacctggtgcccgcgatgctggcggcgcgcttcctccggatgacggaggccgtcgccaagggcaacctggtggccaagctcgagaccttcttcgactcctgcgtcctgcagggctggaaggactcggtcgccgcgctgcaggccgcgtggcggatctccggctggaacgagagccgcatcgtacagccctgcatcgactccatcgtcgagaagatcctcctgccaccgtccaaggtcacgtggtcctacacgtacacgaggccagggtacaacagcacgaggaaaccccaccagtccgtccccaaggactggtggacggaggacatctccgacctggacatcgaggtcttccgctccgtcatctccaccgtgcgcgcgtcgcggctgctcccaccgccgctcatcggcgaggcgctgcacgtctacgcgtgcaagcacctcgtcgacccgctccacgttgccagcgacgcaggactgaccgccaacggcgtcctccaccagccgccgcagagctcagacgacggcgaggagaagctggtggccatgcagcgccgcgtgctcgagtccatcgtcaccatggtcccgggcgagccggggtcggtcaccggccgcttcctactaaggctgctgcgggtggccaactacgtcagcgcgtcgtcgtccacgcgcgcgcagctgatccggcaggccggctcccagctcgacgaggccagggcggcggacctgctcatcccgctgccatcggacccgcacgcgtacgacgtcggcacggcggaggccgtgctcgagcacttcctggcccagttccagcggcccgcgccgaccgacgagcggcgtcggatgagcgccgccatggagaaggtcgccaggatcttcgacgagtacctgcggaccatcgcgctggaccgcagcttccctgtcggcaagttcgttgacctcgtcgaatgcttgccggacatcgcccgcagtgaccacgacggcctctactacgccatcgacatctatctcaaggagcacccggagctgagcaaggcggataagaagcggttgtgccggctgatagactgcaggaagctgtcgccagacgtgcgggcgcaggcgatagccaacgaccggatgccactgcgcaccattgtacagcttctcttcgtcgagcaggagcggaccatcggtgcagccgccggcagccatgctgcttccggtggcgccgcagatcgggcctccgtcggtgttatctcccagctcgcggcgggaaccaaagatgaagaaccagcctcgtctgctggccacaagtcagacgtgcacagaccacgccgggaccatgcccgggtagccgatggagcctctgccatggcgaggtcgctgtcggcgtcaaccaagactccaccggcagcgaggaaggagaggacgccggaggagacggggagcaggatgaggaacaagcagtgaagcccagtgcacaatttgttcatacttgtgattcttgattatattttttttatttcagtgcatcccatttttggtgggagatgtaagaggtagatttttgtaattaaaatggataaggagttaataagtggctacgtgcagtcatgctcatataatctagggtagctcaccgatgaacaaaggttcgtgttcatcacattcttcctccggcagaacttatgtttgcccatgcatcggcagcctacgaaaaatcagccaatttaacgaactttgaacaaataagtgtatttttagatccattagctgctag

SEQ ID NO: 200275 - DNA, 2183 bp, Zea Mays
ggagccttgtgggctgtgaggcctgctgcttgaggactaggccaacaatacatcgcaatgaagtacatgaagctcggttcaaaacctgatacgttctataccgaagaagcagtcaggtcagtcgtatcagacatacccgccgatctcattatccatgtaaataacaccaagtatcagctacacaagttcccactgctcctcaagtgcggcctcctgcagcgcctctgctccgacaccgacgacggcgatgaggagccggtgcccgtggcgctgcacgacatccctggcggcgagcaggcctttgagctgtgcgccaagttctgctacggcatctccatcagcatcagcgccgggaacctggtgcccgcgatgctggcggcgcgcttcctccggatgacggaggccgtcgccaagggcaacctggtggccaagctcgagaccttcttcgactcctgcgtcctgcagggctggaaggactcggtcgccgcgctgcaggccgcgtggcggatctccggctggaacgagagccgcatcgtacagccctgcatcgactccatcgtcgagaagatcctcctgccaccgtccaaggtcacgtggtcctacacgtacacgaggccagggtacaacagcacgaggaaaccccaccagtccgtccccaaggactggtggacggaggacatctccgacctggacatcgaggtcttccgctccgtcatctccaccgtgcgcgcgtcgcggctgctcccaccgccgctcatcggcgaggcgctgcacgtctacgcgtgcaagcacctcgtcgacccgctccacgttgccagcgacgcaggactgaccgccaacggcgtcctccaccagccgccgcagagctcagacgacggcgaggagaagctggtggccatgcagcgccgcgtgctcgagtccatcgtcaccatggtcccgggcgagccggggtcggtcaccggccgcttcctactaaggctgctgcgggtggccaactacgtcagcgcgtcgtcgtccacgcgcgcgcagctgatccggcaggccggctcccagctcgacgaggccagggcggcggacctgctcatcccgctgccatcggacccgcacgcgtacgacgtcggcacggcggaggccgtgctcgagcacttcctggcccagttccagcggcccgcgccgaccgacgagcggcgtcggatgagcgccgccatggagaaggtcgccaggatcttcgacgagtacctgcggaccatcgcgctggaccgcagcttccctgtcggcaagttcgttgacctcgtcgaatgcttgccggacatcgcccgcagtgaccacgacggcctctactacgccatcgacatctatctcaaggtcagaaagctccaagatcggaacatctgtcatggatttgagttgatggatatattacgatggcgagcaggagcacccggagctgagcaaggcggataagaagcggttgtgccggctgatagactgcaggaagctgtcgccagacgtgcgggcgcaggcgatagccaacgaccggatgccactgcgcaccattgtacagcttctcttcgtcgagcaggagcggaccatcggtgcagccgccggcagccatgctgcttccggtggcgccgcagatcgggcctccgtcggtgttatctcccagctcgcggcgggaaccaaagatgaagaaccagcctcgtctgctggccacaagtcagacgtgcacagaccacgccgggaccatgcccgggtagccgatggagcctctgccatggcgaggtcgctgtcggcgtcaaccaagactccaccggcagcgaggaaggagaggacgccggaggagacggggagcaggatgaggaacaagcagtgaagcccagtgcacaatttgttcatacttgtgattcttgattatattttttttatttcagtgcatcccatttttggtgggagatgtaagaggtagatttttgtaattaaaatggataaggagttaataagtggctacgtgcagtcatgctcatataatctagggtagctcaccgatgaacaaaggttcgtgttcatcacattcttcctccggcagaacttatgtttgcccatgcatcggcagcctacgaaaaatcagccaatttaacgaactttgaacaaataagtgtatttttagatccattagctgctag

SEQ ID NO: 200276 - DNA, 2243 bp, Zea Mays
ctctcatctttctctctcaagacacacaaaaggaagaagggagcctccaagcagacccctgctgtatagctgctgcagcatgcgcgaatcctaactgaggactaggccaacaatacatcgcaatgaagtacatgaagctcggttcaaaacctgatacgttctataccgaagaagcagtcagtcgtatcagacatacccgccgatctcattatccatgtaaataacaccaagtatcagctacacaagttcccactgctcctcaagtgcggcctcctgcagcgcctctgctccgacaccgacgacggcgatgaggagccggtgcccgtggcgctgcacgacatccctggcggcgagcaggcctttgagctgtgcgccaagttctgctacggcatctccatcagcatcagcgccgggaacctggtgcccgcgatgctggcggcgcgcttcctccggatgacggaggccgtcgccaagggcaacctggtggccaagctcgagaccttcttcgactcctgcgtcctgcagggctggaaggactcggtcgccgcgctgcaggccgcgtggcggatctccggctggaacgagagccgcatcgtacagccctgcatcgactccatcgtcgagaagatcctcctgccaccgtccaaggtcacgtggtcctacacgtacacgaggccagggtacaacagcacgaggaaaccccaccagtccgtccccaaggactggtggacggaggacatctccgacctggacatcgaggtcttccgctccgtcatctccaccgtgcgcgcgtcgcggctgctcccaccgccgctcatcggcgaggcgctgcacgtctacgcgtgcaagcacctcgtcgacccgctccacgttgccagcgacgcaggactgaccgccaacggcgtcctccaccagccgccgcagagctcagacgacggcgaggagaagctggtggccatgcagcgccgcgtgctcgagtccatcgtcaccatggtcccgggcgagccggggtcggtcaccggccgcttcctactaaggctgctgcgggtggccaactacgtcagcgcgtcgtcgtccacgcgcgcgcagctgatccggcaggccggctcccagctcgacgaggccagggcggcggacctgctcatcccgctgccatcggacccgcacgcgtacgacgtcggcacggcggaggccgtgctcgagcacttcctggcccagttccagcggcccgcgccgaccgacgagcggcgtcggatgagcgccgccatggagaaggtcgccaggatcttcgacgagtacctgcggaccatcgcgctggaccgcagcttccctgtcggcaagttcgttgacctcgtcgaatgcttgccggacatcgcccgcagtgaccacgacggcctctactacgccatcgacatctatctcaaggtcagaaagctccaagatcggaacatctgtcatggatttgagttgatggatatattacgatggcgagcaggagcacccggagctgagcaaggcggataagaagcggttgtgccggctgatagactgcaggaagctgtcgccagacgtgcgggcgcaggcgatagccaacgaccggatgccactgcgcaccattgtacagcttctcttcgtcgagcaggagcggaccatcggtgcagccgccggcagccatgctgcttccggtggcgccgcagatcgggcctccgtcggtgttatctcccagctcgcggcgggaaccaaagatgaagaaccagcctcgtctgctggccacaagtcagacgtgcacagaccacgccgggaccatgcccgggtagccgatggagcctctgccatggcgaggtcgctgtcggcgtcaaccaagactccaccggcagcgaggaaggagaggacgccggaggagacggggagcaggatgaggaacaagcagtgaagcccagtgcacaatttgttcatacttgtgattcttgattatattttttttatttcagtgcatcccatttttggtgggagatgtaagaggtagatttttgtaattaaaatggataaggagttaataagtggctacgtgcagtcatgctcatataatctagggtagctcaccgatgaacaaaggttcgtgttcatcacattcttcctccggcagaacttatgtttgcccatgcatcggcagcctacgaaaaatcagccaatttaacgaactttgaacaaataagtgtatttttagatccattagctgctag

SEQ ID NO: 200277 - DNA, 2220 bp, Zea Mays
tctctctctctctctctctctctctctctcatctttctctctcaagacacacaaaaggaagaagggagcctccaagcagacccctgctgtatagctgctgcagcatgcgcgaatcctaactgaggactaggccaacaatacatcgcaatgaagtacatgaagctcggttcaaaacctgatacgttctataccgaagaagcagtcaggtcagtcgtatcagacatacccgccgatctcattatccatgtaaataacaccaagtatcagctacacaaggtgttgtttacctgtagttcccactgctcctcaagtgcggcctcctgcagcgcctctgctccgacaccgacgacggcgatgaggagccggtgcccgtggcgctgcacgacatccctggcggcgagcaggcctttgagctgtgcgccaagttctgctacggcatctccatcagcatcagcgccgggaacctggtgcccgcgatgctggcggcgcgcttcctccggatgacggaggccgtcgccaagggcaacctggtggccaagctcgagaccttcttcgactcctgcgtcctgcagggctggaaggactcggtcgccgcgctgcaggccgcgtggcggatctccggctggaacgagagccgcatcgtacagccctgcatcgactccatcgtcgagaagatcctcctgccaccgtccaaggtcacgtggtcctacacgtacacgaggccagggtacaacagcacgaggaaaccccaccagtccgtccccaaggactggtggacggaggacatctccgacctggacatcgaggtcttccgctccgtcatctccaccgtgcgcgcgtcgcggctgctcccaccgccgctcatcggcgaggcgctgcacgtctacgcgtgcaagcacctcgtcgacccgctccacgttgccagcgacgcaggactgaccgccaacggcgtcctccaccagccgccgcagagctcagacgacggcgaggagaagctggtggccatgcagcgccgcgtgctcgagtccatcgtcaccatggtcccgggcgagccggggtcggtcaccggccgcttcctactaaggctgctgcgggtggccaactacgtcagcgcgtcgtcgtccacgcgcgcgcagctgatccggcaggccggctcccagctcgacgaggccagggcggcggacctgctcatcccgctgccatcggacccgcacgcgtacgacgtcggcacggcggaggccgtgctcgagcacttcctggcccagttccagcggcccgcgccgaccgacgagcggcgtcggatgagcgccgccatggagaaggtcgccaggatcttcgacgagtacctgcggaccatcgcgctggaccgcagcttccctgtcggcaagttcgttgacctcgtcgaatgcttgccggacatcgcccgcagtgaccacgacggcctctactacgccatcgacatctatctcaaggagcacccggagctgagcaaggcggataagaagcggttgtgccggctgatagactgcaggaagctgtcgccagacgtgcgggcgcaggcgatagccaacgaccggatgccactgcgcaccattgtacagcttctcttcgtcgagcaggagcggaccatcggtgcagccgccggcagccatgctgcttccggtggcgccgcagatcgggcctccgtcggtgttatctcccagctcgcggcgggaaccaaagatgaagaaccagcctcgtctgctggccacaagtcagacgtgcacagaccacgccgggaccatgcccgggtagccgatggagcctctgccatggcgaggtcgctgtcggcgtcaaccaagactccaccggcagcgaggaaggagaggacgccggaggagacggggagcaggatgaggaacaagcagtgaagcccagtgcacaatttgttcatacttgtgattcttgattatattttttttatttcagtgcatcccatttttggtgggagatgtaagaggtagatttttgtaattaaaatggataaggagttaataagtggctacgtgcagtcatgctcatataatctagggtagctcaccgatgaacaaaggttcgtgttcatcacattcttcctccggcagaacttatgtttgcccatgcatcggcagcctacgaaaaatcagccaatttaacgaactttgaacaaataagtgtatttttagatccattagctgctag

SEQ ID NO: 200278 - DNA, 2421 bp, Zea Mays
gaagatcctggccttctctctttctcatgatacatttcgcccaacaacatgtgagagcgagcgagaggtattattttgagggagggagttccctttctctgctctggcctccatgcatataacttgctcagcaggcctagttctcgcagtcggatcctcatactgcaagaaccctctctctctctctctctctctctctctctctctctctctctctctctctctctctctctctctctctctctctcatctttctctctcaagacacacaaaaggaagaagggagcctccaagcagacccctgctgtatagctgctgcagcatgcgcgaatcctaactgaggactaggccaacaatacatcgcaatgaagtacatgaagctcggttcaaaacctgatacgttctataccgaagaagcagtcaggtcagtcgtatcagacatacccgccgatctcattatccatgtaaataacaccaagtatcagctacacaagttcccactgctcctcaagtgcggcctcctgcagcgcctctgctccgacaccgacgacggcgatgaggagccggtgcccgtggcgctgcacgacatccctggcggcgagcaggcctttgagctgtgcgccaagttctgctacggcatctccatcagcatcagcgccgggaacctggtgcccgcgatgctggcggcgcgcttcctccggatgacggaggccgtcgccaagggcaacctggtggccaagctcgagaccttcttcgactcctgcgtcctgcagggctggaaggactcggtcgccgcgctgcaggccgcgtggcggatctccggctggaacgagagccgcatcgtacagccctgcatcgactccatcgtcgagaagatcctcctgccaccgtccaaggtcacgtggtcctacacgtacacgaggccagggtacaacagcacgaggaaaccccaccagtccgtccccaaggactggtggacggaggacatctccgacctggacatcgaggtcttccgctccgtcatctccaccgtgcgcgcgtcgcggctgctcccaccgccgctcatcggcgaggcgctgcacgtctacgcgtgcaagcacctcgtcgacccgctccacgttgccagcgacgcaggactgaccgccaacggcgtcctccaccagccgccgcagagctcagacgacggcgaggagaagctggtggccatgcagcgccgcgtgctcgagtccatcgtcaccatggtcccgggcgagccggggtcggtcaccggccgcttcctactaaggctgctgcgggtggccaactacgtcagcgcgtcgtcgtccacgcgcgcgcagctgatccggcaggccggctcccagctcgacgaggccagggcggcggacctgctcatcccgctgccatcggacccgcacgcgtacgacgtcggcacggcggaggccgtgctcgagcacttcctggcccagttccagcggcccgcgccgaccgacgagcggcgtcggatgagcgccgccatggagaaggtcgccaggatcttcgacgagtacctgcggaccatcgcgctggaccgcagcttccctgtcggcaagttcgttgacctcgtcgaatgcttgccggacatcgcccgcagtgaccacgacggcctctactacgccatcgacatctatctcaaggagcacccggagctgagcaaggcggataagaagcggttgtgccggctgatagactgcaggaagctgtcgccagacgtgcgggcgcaggcgatagccaacgaccggatgccactgcgcaccattgtacagcttctcttcgtcgagcaggagcggaccatcggtgcagccgccggcagccatgctgcttccggtggcgccgcagatcgggcctccgtcggtgttatctcccagctcgcggcgggaaccaaagatgaagaaccagcctcgtctgctggccacaagtcagacgtgcacagaccacgccgggaccatgcccgggtagccgatggagcctctgccatggcgaggtcgctgtcggcgtcaaccaagactccaccggcagcgaggaaggagaggacgccggaggagacggggagcaggatgaggaacaagcagtgaagcccagtgcacaatttgttcatacttgtgattcttgattatattttttttatttcagtgcatcccatttttggtgggagatgtaagaggtagatttttgtaattaaaatggataaggagttaataagtggctacgtgcagtcatgctcatataatctagggtagctcaccgatgaacaaaggttcgtgttcatcacattcttcctccggcagaacttatgtttgcccatgcatcggcagcctacgaaaaatcagccaatttaacgaactttgaacaaataagtgtatttttagatccattagctgctag

SEQ ID NO: 200279 - DNA, 360 bp, Zea Mays
tctcgctcctaggcagcataaatacgaccgtcgttttctcctgggtcattccagtatttgctcgccatcgctgctatgaggggtgatcgtgggaaagccgtcgcggggagaaggcacgagctctgggtctgcgcctcgctacggatccgcgctccatcatcggccgacctcctccattggcggtcaagaacaggtaccgcatgatgaggcgcttggaggatgctgcgatgagttcgtaagaggtctaggccgtcgtctcccagtcaacttcgggttgctggaccgttgtctccatataatgtaattatttatttattttgtacaaaactccgattatatagtaaagatgtgacattcgat

SEQ ID NO: 200280 - DNA, 1159 bp, Zea Mays
aatagacattaaatgctcatattaaataaggaataaaatatggtctcctatgtcataggagataggagatatttcctatatattaaacccggttcaaaacgtggacggacacgatatccacgtctgcgcaaatgattctaatcactcgattgccaatcaacggcccacgttggtcgactttcatcgcctcttccctcaaattctctggaataggaatcgtctcgactcgctccctcgtttctttcgcctccgaacacttctgctcgaaccttgtctcccgtcgcctctcttcgttcccgtcgtagcgtccctcttccacctcttctctccccgcttccttgtctaaatcgattcatcacccattgctttcgtccttactgcagtgtccattttggttgtttggtgaaatttgtcgctatcttcgtcgactctagttcgtcgtccatttcttaaagttcaaataggcctgctttgtccccttttttctcccgtcccgaggtacgcgattgcagcagatccggcttcctccgcttcagatctccttcaatcgtcgtcttccacttcgcgtttccctctccgtactcatatggctttgtctgcatgaatgctttactggtcgcgaagccctttgttttctctagtttgcagttcgcatagctgcctcctttggatctaagtttgccagatctaaagcatcagttgaacggtcataatagtgaatcaacaaggaactcggcggagcatctctaaaaggttcagcttggttgtaatctataaactggaggaatgtagataccaatgacgtcttactccatcagaagctactagctcctaatgaagaaccaaatttctgaaaaatacggactacaacattatccgccattttagtaatttatgaaactataaacacggtttttgtgacatgtaaatggtattatcttccaaaaaatttgctattttgtcacttctgttttgggctctctgctattatgtcaccccgtgtctatgacttatgggatcatttatcatctgtgtctataatttatgggcctaatggtaaattagtgaagtccacaacttagagtgacaaaatagcaaatggctctcttcttctacatgcgcctgagaaatgcaatacacccttatctacattccatgt

SEQ ID NO: 200281 - DNA, 2151 bp, Zea Mays
atccagtcgaaacccactcacttgatggcaaagtagcgaatcccacgtttcataatggctcggttccaaatttctcccttcccaagcatggcgtccctgccgcagcccccgcgatccccttctcaagcctggcgtccctgccccccgcgatcgcgcctgccaagcatggcgtcgtcgcggccgttgcccccgcgatccccttccatcgacctgccaagcatggcatcgccccggccgttgccacgcccgccgcacacgccgcgatgagatcctggaccccccgcgacatcctcctccaccgcgccatggccgcccccgacgtcctcgcgcgccgctccccgaggtgggcatggtgcgcacgaccatcgcgggggtcacgacggcggcgcggttccaggagctggtggactggatggaggagtggaaggcggcgttcagggacaacagcaagtggacggagacggtgaacctggggctcgggagcctcgcgctcatcatgtccgggctgcttccgttcgccatcgacggggacctcgggttcgggaagcccagcctcgtgctaccctgggtgcgccatggccggctgggatccgcgtccgtgatggtggtgccctgccccagcggcgacatgtcgtggttcttcggcggcaccaggatgtggctgcggctcatggaggtggtcgaatccgaccctttgatgaagcagacaacgaacctgggaatggcgacagaggcgggatcccgtctgtgactgtgagctcgcgctggcggtacctgccattacggtgtacgggtatcatcgccatcatcatccagatccaggacatttccggatagatgacataatctgttcatctcaaatgccacaacattcgtgggcacatgttgccttgttggcttcatttagctcgcccgacatcatattttagcaactatctgtcatatataatctactaaaatggtttattttttcatttactcttatactctcatttttccaaccaggacttctgagcacatggaagatgaaggagacgttgcaactcctttacactttccaaatttttattaaatataccaatatcacgaggtgaaccttcgagtttagtgatttttcatatccatggtttgcaggcaagtaaacttattacatataatccattgaacttcatgtcttggtttgtccaattcgacatcgaagggctcgccatgtggggtgacgtcgacggggcttcacctgtcctattctatcattattgtgattactgactatgccattgtttgtgctactgctgcttatgcttgcagtgccacaaaggcaagcgaacctttgatttggtccatgttctggtctaaccttgttgggtccacactccatgggtcactttcacattactactaccatatctgtgaggtaaccattgttacatgacctactcatatatcttttgcttgtacattcaagtaaagattgtctatttcaaccacaccaaaagtaaagaaaattattaagttggtgaattgacaaaagaaatgaagcaagtttttaggtgttgaagtataagtgattcgcccaacttttcccatcagcttgacttttagtttgggggtaaactaacctacacatagcaggcatcagatatagcatattacaataagctaggtatgtgtttgtattcttagttcttttagtatattacataagctacatccctcgtgatgccttaatctaggttatatctcaatgatgatttctttataacatgctgatcataaagcatttgtagacagtgcattcaagtaacggtacaatacaaagggtggcaaatgataatagcctgaagaatgatggcacaaaatgatctagagtattctttatcttacttagattttgtcaacattccatcatcatataatctcgaatattttcataaactggttgtgtaaaatggggggatctttctccatgaatctcaatggatctgttgtgcactgcatagctgcggagaagaaaaaggtatcaaatatcaagcagctttacggcagcgaaggatcattcactatgagtggatattaaactgttgcaaggaaaacatcttcattttcatcctagacttttagtccttttttgtcacccctcaagggactaga

SEQ ID NO: 200282 - DNA, 1748 bp, Zea Mays
atccagtcgaaacccactcacttgatggcaaagtagcgaatcccacgtttcataatggctcggttccaaatttctcccttcccaagcatggcgtccctgccgcagcccccgcgatccccttctcaagcctggcgtccctgccccccgcgatcgcgcctgccaagcatggcgtcgtcgcggccgttgcccccgcgatccccttccatcgacctgccaagcatggcatcgccccggccgttgccacgcccgccgcacacgccgcgatgagatcctggaccccccgcgacatcctcctccaccgcgccatggccgcccccgacgtcctcgcgcgccgctccccgaggtgggcatggtgcgcacgaccatcgcgggggtcacgacggcggcgcggttccaggagctggtggactggatggaggagtggaaggcggcgttcagggacaacagcaagtggacggagacggtgaacctggggctcgggagcctcgcgctcatcatgtccgggctgcttccgttcgccatcgacggggacctcgggttcgggaagcccagcctcgtgctaccctgggtgcgccatggccggctgggatccgcgtccgtgatggtggtgccctgccccagcggcgacatgtcgtggttcttcggcggcaccaggatgtggctgcggctcatggaggtggtcgaatccgaccctttgatgaagcagacaacgaacctgggaatggcgacagaggcgggatcccgtctgtgactgtgagctcgcgctggcggtacctgccattacggtgtacgggtatcatcgccatcatcatccagatccaggacatttccggatagatgacataatctgttcatctcaaatgccacaacattcgtgggcacatgttgccttgttggcttcatttagctcgcccgacatcatattttagcaactatctgtcatatataatctactaaaatggtttattttttcatttactcttatactctcatttttccaaccaggacttctgagcacatggaagatgaaggagacgttgcaactcctttacactttccaaatttttattaaatataccaatatcacgaggtgaaccttcgagtttagtgatttttcatatccatggtttgcaggcaagtaaacttattacatataatccattgaacttcatgtcttggtttgtccaattcgacatcgaagggctcgccatgtggggtgacgtcgacggggcttcacctgtcctattctatcattattgtgattactgactatgccattgtttgtgctactgctgcttatgcttgcagtgccacaaaggcaagcgaacctttgatttggtccatgttctggtctaaccttgttgggtccacactccatgggtcactttcacattactactaccatatctgtgagacagtgcattcaagtaacggtacaatacaaagggtggcaaatgataatagcctgaagaatgatggcacaaaatgatctagagtattctttatcttacttagattttgtcaacattccatcatcatataatctcgaatattttcataaactggttgtgtaaaatggggggatctttctccatgaatctcaatggatctgttgtgcactgcatagctgcggagaagaaaaaggtatcaaatatcaagcagctttacggcagcgaaggatcattcactatgagtggatattaaactgttgcaaggaaaacatcttcattttcatcctagtctcatca

SEQ ID NO: 200283 - DNA, 2533 bp, Zea Mays
atccagtcgaaacccactcacttgatggcaaagtagcgaatcccacgtttcataatggctcggttccaaatttctcccttcccaagcatggcgtccctgccgcagcccccgcgatccccttctcaagcctggcgtccctgccccccgcgatcgcgcctgccaagcatggcgtcgtcgcggccgttgcccccgcgatccccttccatcgacctgccaagcatggcatcgccccggccgttgccacgcccgccgcacacgccgcgatgagatcctggaccccccgcgacatcctcctccaccgcgccatggccgcccccgacgtcctcgcgcgccgctccccgaggtgggcatggtgcgcacgaccatcgcgggggtcacgacggcggcgcggttccaggagctggtggactggatggaggagtggaaggcggcgttcagggacaacagcaagtggacggagacggtgaacctggggctcgggagcctcgcgctcatcatgtccgggctgcttccgttcgccatcgacggggacctcgggttcgggaagcccagcctcgtgctaccctgggtgcgccatggccggctgggatccgcgtccgtgatggtggtgccctgccccagcggcgacatgtcgtggttcttcggcggcaccaggatgtggctgcggctcatggaggtggtcgaatccgaccctttgatgaagcagacaacgaacctgggaatggcgacagaggcgggatcccgtctgtgactgtgagctcgcgctggcggtacctgccattacggtgtacgggtatcatcgccatcatcatccagatccaggacttctgagcacatggaagatgaaggagacgttgcaactcctttacactttccaaatttttattaaatataccaatatcacgaggtgaaccttcgagtttagtgatttttcatatccatggtttgcagtgccacaaaggcaagcgaacctttgatttggtccatgttctggtctaaccttgttgggtccacactccatgggtcactttcacattactactaccatatctgtgaggtaaccattgttacatgacctactcatatatcttttgcttgtacattcaagtaaagattgtctatttcaaccacaccaaaagtaaagaaaattattaagttggtgaattgacaaaagaaatgaagcaagtttttaggtgttgaagtataagtgattcgcccaacttttcccatcagcttgacttttagtttgggggtaaactaacctacacatagcaggcatcagatatagcatattacaataagctaggtatgtgtttgtattcttagttcttttagtatattacataagctacatccctcgtgatgccttaatctaggttatatctcaatgatgatttctttataacatgctgatcataaagcatttgtagacagtgcattcaagtaacggtacaatacaaagggtggcaaatgataatagcctgaagaatgatggcacaaaatgatctagagtattctttatcttacttagattttgtcaacattccatcatcatataatctcgaatattttcataaactggttgtgtaaaatggggggatctttctccatgaatctcaatggatctgttgtgcactgcatagctgcggagaagaaaaaggtatcaaatatcaagcagctttacggcagcgaaggatcattcactatgagtggatattaaactgttgcaaggaaaacatcttcattttcatcctaggaagttgaacgatcattctctttttgggcactgctgaaggtgatgttgttcacccaactgagtgtatgccccagctgcttgagcaagttcggcatcacaaagcgaatatcgattgcaatgattatattgtcatggtgactacattggttcttgaggttgaggatttgtctacacaacaagtgaatgataagctcctagaagctgtacaaccttaagcactcgagcaatggagcaatgtggtatgatgagagcataggaggtttgtcgagatgaggtcgaaacatggccccaatgtaactagaccagagcaattgacaatctaggcaatatccgctatctggtccattgtttctctcgtgggtccattgtttctgtcgtgggtcagacgtcttcgacgtgaagagaggttgttttgtcatttccacattctgaagcgtaatgtagtgcagtggacgcatatagctactacgtatgttaaagttgtattttttatatctcatattagatgtatttactattttacaagccttatgaaaatagcaatatgagtggtactaaattattgatatgtattaaagcagcttcttaaaaaaactacatatcaatcaccacagttggttcgtgcgtcgtagtattggatggcttagcatagatagtggttgataaaacaccttaatataagcatgttgaagctctataatgtcgtcgtagtctgcagtgtacgccgttgcaacgcacgggcattaaactagtatacaatcaagcataaaatcaaac

SEQ ID NO: 200284 - DNA, 2596 bp, Zea Mays
atccagtcgaaacccactcacttgatggcaaagtagcgaatcccacgtttcataatggctcggttccaaatttctcccttcccaagcatggcgtccctgccgcagcccccgcgatccccttctcaagcctggcgtccctgccccccgcgatcgcgcctgccaagcatggcgtcgtcgcggccgttgcccccgcgatccccttccatcgacctgccaagcatggcatcgccccggccgttgccacgcccgccgcacacgccgcgatgagatcctggaccccccgcgacatcctcctccaccgcgccatggccgcccccgacgtcctcgcgcgccgctccccgaggtgggcatggtgcgcacgaccatcgcgggggtcacgacggcggcgcggttccaggagctggtggactggatggaggagtggaaggcggcgttcagggacaacagcaagtggacggagacggtgaacctggggctcgggagcctcgcgctcatcatgtccgggctgcttccgttcgccatcgacggggacctcgggttcgggaagcccagcctcgtgctaccctgggtgcgccatggccggctgggatccgcgtccgtgatggtggtgccctgccccagcggcgacatgtcgtggttcttcggcggcaccaggatgtggctgcggctcatggaggtggtcgaatccgaccctttgatgaagcagacaacgaacctgggaatggcgacagaggcgggatcccgtctgtgactgtgagctcgcgctggcggtacctgccattacggtgtacgggtatcatcgccatcatcatccagatccaggacttctgagcacatggaagatgaaggagacgttgcaactcctttacactttccaaatttttattaaatataccaatatcacgagggctcgccatgtggggtgacgtcgacggggcttcacctgtcctattctatcattattgtgattactgactatgccattgtttgtgctactgctgcttatgcttgcagtgccacaaaggcaagcgaacctttgatttggtccatgttctggtctaaccttgttgggtccacactccatgggtcactttcacattactactaccatatctgtgaggtaaccattgttacatgacctactcatatatcttttgcttgtacattcaagtaaagattgtctatttcaaccacaccaaaagtaaagaaaattattaagttggtgaattgacaaaagaaatgaagcaagtttttaggtgttgaagtataagtgattcgcccaacttttcccatcagcttgacttttagtttgggggtaaactaacctacacatagcaggcatcagatatagcatattacaataagctaggtatgtgtttgtattcttagttcttttagtatattacataagctacatccctcgtgatgccttaatctaggttatatctcaatgatgatttctttataacatgctgatcataaagcatttgtagacagtgcattcaagtaacggtacaatacaaagggtggcaaatgataatagcctgaagaatgatggcacaaaatgatctagagtattctttatcttacttagattttgtcaacattccatcatcatataatctcgaatattttcataaactggttgtgtaaaatggggggatctttctccatgaatctcaatggatctgttgtgcactgcatagctgcggagaagaaaaaggtatcaaatatcaagcagctttacggcagcgaaggatcattcactatgagtggatattaaactgttgcaaggaaaacatcttcattttcatcctaggaagttgaacgatcattctctttttgggcactgctgaaggtgatgttgttcacccaactgagtgtatgccccagctgcttgagcaagttcggcatcacaaagcgaatatcgattgcaatgattatattgtcatggtgactacattggttcttgaggttgaggatttgtctacacaacaagtgaatgataagctcctagaagctgtacaaccttaagcactcgagcaatggagcaatgtggtatgatgagagcataggaggtttgtcgagatgaggtcgaaacatggccccaatgtaactagaccagagcaattgacaatctaggcaatatccgctatctggtccattgtttctctcgtgggtccattgtttctgtcgtgggtcagacgtcttcgacgtgaagagaggttgttttgtcatttccacattctgaagcgtaatgtagtgcagtggacgcatatagctactacgtatgttaaagttgtattttttatatctcatattagatgtatttactattttacaagccttatgaaaatagcaatatgagtggtactaaattattgatatgtattaaagcagcttcttaaaaaaactacatatcaatcaccacagttggttcgtgcgtcgtagtattggatggcttagcatagatagtggttgataaaacaccttaatataagcatgttgaagctctataatgtcgtcgtagtctgcagtgtacgccgttgcaacgcacgggcattaaactagtatacaatcaagcataaaatcaaac

SEQ ID NO: 200285 - DNA, 3159 bp, Zea Mays
cgcccctacacgccgatcgtttggttggtcttattgcttcgtcgtcgtcaataataactatcagatcagcatcgccgtacgtaccaatcgaagcacacacgaccatggcacaggcacagccacaggcgcaggcgaccagtgaagtcgtcgtcaagtgtgccaccaaggccatgacgaatgacaaagacagggccgccatcgccagcgccagcgcggcggcgtctcaggggtcggtaggcagcggtgccgccacgcccttcaagttcaacgtccacgcgccggagttcgtgcctatgtcgcctgccgccgccagccccatggccagccccatgtcggcaccggcaggtggctactactcgcccttcatgcagatgcaaccgggcttggcgcccgccgattggagctttttccacgagcacgagcccgtcttcttcatgcccgacttagcgcacgctaagttcggcgcggccaccgccaccgccgctggcgctgctgggagcaacagcgcccaggccaagggggccgccaccaccaccgatgttgcacagaagattgttaagcaggttgagtatcagttcagcgacatcaacctggtggcaaacgagttcttgctcaagattatgaacaaggacacagaaggctatgttccgttgtcagtcattgcatcctggaagaagatcaagtctcttggggcaaccaaccagatgctggtgaaggctcttcgcacctccacaaagctcaatgtgagtgacgacggcaagaaagtccggcggaggcaggcattcacggagaagcacaaggaagagcttcagtcccgcatgatcatagcggagaatttgccagaggactcgtctcggaacagcctcgagaagatctttggcgtcgtgggaagtgtgaagaacatcaagatatgccatccacaagagcctaacaccgcaagggcttccaagtccgacacgcttgtcagcaacaagatgcacgcacttgtggagtacgagacgtcgcagcaagccgagaaagcagtggagaagctgaatgatgaacggaactggaggaaagggctccgtgtccgcacagtgctcaggcgctcgcccaagtcagtgacgaggctgaagcgtgcagacttggaccactttgtggcctccgacgacgactcgccgcactcctcatcagactccccgacggcggactgctcttcacctgccgaggcagcggcggctcacgctcacgtctatcaccagcagcagcaagaggagcagcagaatgggggcaattgcaagcacaaaggcagctgggctcgaggacgagctggcacggcgaccaagctgcacatcacggcgccgcagagcccccagtcggctcccgcgggcatggccggcggccacttcgacccgaccagcccccgcccgtcgtcgtcgtcccagaagcagtgcccctccagccccggcagcaggcagctccctgcttctgcctctgcctcctcccacaagtgccccttcagccccaggcaggctcagcatcatcctccccagggccccaggatgcccgacggcacgcgcggcttcaccatgggccggggcaagccaacgtcgccaccagcagcggcagcggtcctcgtttagtttcaccttccgggctggctaatcctgcctgtctctgtttgctcttcatgcgcatcaaccctttcttttctgggtttattaaggttcaaataaagttgcctgcctgccctgactgctgctggcaatacggattatgtatagaatagaatataatggtattgaggacttacaaaaatatacttactatttttaataacaatataataaagaaccaccgttccagtgtttcactttcaacaagatacagtgctcgcacatgaacaaggcagaaaagcattgtatttgtatctccctgccaagtggaccccgccctacccggtgacggtgagaggcaggcaggtaggcaagcagaacgggagttgagttgagacagtctgaacacgtggagtcgacgtgtgcccgcgccggcgccggccaaacgcaatccgctgacgcagagcgctaaacaaaagaagggtccctgttgccggggcccagccgccgcgcacgcccaaaacacacactgacgcgtggggccaccgcctttttttcccctttgctgcgtgtcttgttgttcctcctctcctccctcgcggacacacaaacccaaagcagagaggtgagagggagaggaccgagggagagaggagagagagcgatcgagagatgaggagggagcttgcctcccccttagctactgccgccgctgccacggccggtgcctcctcctcggctgccgcctcgctccggggctggtgggacgatgtcaacgagtcgccccagtggcaggacggggccttcttctccctcgccgccgcctacgccctcgtctccgccgtcgcactggttgggaccgtgacagcaatttgtgttacctgctttctgataagatgtgttgtggtcgcgctatctgcatttgatgctgatgtatctctcgaggttttggaccatccagtcctggatttcttctattatatgtttgcggagatactcccttctgcgctggttctcttcgtccttcggaagcttcctcccaagcgggtatcggcgcaataccaccctattaactagggagttctttgtttttatgatgttacatgctaagaactccggataagctggaactgctgaaaacctacatccggttgtattgctgtaatattttatggaagcatcccagggttggcaagatgcatcatcaccatcatgctctatgagaaaagagttttgagtggtgctaatgagtttgtgctactgctagccagagcatcacatgacatctccagcagagtaccataccattatttgaattgcatgtgcattcttgacgcggacaaggccaatgatttatcgccttgttggtcccagtgacttttatggagtacttgtgtggtaattgttggtattcctgaggactagatctgaaactgaaaatgcgttatatcagctatcggtcgtcctaatatcaatttttgttaggcttttatctgtttcagcgttccagagtagagcctttagcctaatgttgtcaggatctgtaattcgaggagcagtgttg

SEQ ID NO: 200286 - DNA, 3651 bp, Zea Mays
cgcccctacacgccgatcgtttggttggtcttattgcttcgtcgtcgtcaataataactatcagatcagcatcgccgtacgtaccaatcgaagcacacacgaccatggcacaggcacagccacaggcgcaggcgaccagtgaagtcgtcgtcaagtgtgccaccaaggccatgacgaatgacaaagacagggccgccatcgccagcgccagcgcggcggcgtctcaggggtcggtaggcagcggtgccgccacgcccttcaagttcaacgtccacgcgccggagttcgtgcctatgtcgcctgccgccgccagccccatggccagccccatgtcggcaccggcaggtggctactactcgcccttcatgcagatgcaaccgggcttggcgcccgccgattggagctttttccacgagcacgagcccgtcttcttcatgcccgacttagcgcacgctaagttcggcgcggccaccgccaccgccgctggcgctgctgggagcaacagcgcccaggccaagggggccgccaccaccaccgatgttgcacagaagattgttaagcaggttgagtatcagttcagcgacatcaacctggtggcaaacgagttcttgctcaagattatgaacaaggacacagaaggctatgttccgttgtcagtcattgcatcctggaagaagatcaagtctcttggggcaaccaaccagatgctggtgaaggctcttcgcacctccacaaagctcaatgtgagtgacgacggcaagaaagtccggcggaggcaggcattcacggagaagcacaaggaagagcttcagtcccgcatgatcatagcggagaatttgccagaggactcgtctcggaacagcctcgagaagatctttggcgtcgtgggaagtgtgaagaacatcaagatatgccatccacaagagcctaacaccgcaagggcttccaagtccgacacgcttgtcagcaacaagatgcacgcacttgtggagtacgagacgtcgcagcaagccgagaaagcagtggagaagctgaatgatgaacggaactggaggaaagggctccgtgtccgcacagtgctcaggcgctcgcccaagtcagtgacgaggctgaagcgtgcagacttggaccactttgtggcctccgacgacgactcgccgcactcctcatcagactccccgacggcggactgctcttcacctgccgaggcagcggcggctcacgctcacgtctatcaccagcagcagcaagaggagcagcagaatgggggcaattgcaagcacaaaggcagctgggctcgaggacgagctggcacggcgaccaagctgcacatcacggcgccgcagagcccccagtcggctcccgcgggcatggccggcggccacttcgacccgaccagcccccgcccgtcgtcgtcgtcccagaagcagtgcccctccagccccggcagcaggcagctccctgcttctgcctctgcctcctcccacaagtgccccttcagccccaggcaggctcagcatcatcctccccagggccccaggatgcccgacggcacgcgcggcttcaccatgggccggggcaagccaacgtcgccaccagcagcggcagcggtcctcgtttagtttcaccttccgggctggctaatcctgcctgtctctgtttgctcttcatgcgcatcaaccctttcttttctgggtttattaaggttcaaataaagttgcctgcctgccctgactgctgctggcaatacggattatgtatagaatagaatataatggtattgaggacttacaaaaatatacttactatttttaataacaatataataaagaaccaccgttccagtgtttcactttcaacaagatacagtgctcgcacatgaacaaggcagaaaagcattgtatttgtatctccctgccaagtggaccccgccctacccggtgacggtgagaggcaggcaggtaggcaagcagaacgggagttgagttgagacagtctgaacacgtggagtcgacgtgtgcccgcgccggcgccggccaaacgcaatccgctgacgcagagcgctaaacaaaagaagggtccctgttgccggggcccagccgccgcgcacgcccaaaacacacactgacgcgtggggccaccgcctttttttcccctttgctgcgtgtcttgttgttcctcctctcctccctcgcggacacacaaacccaaagcagagaggtgagagggagaggaccgagggagagaggagagagagcgatcgagagatgaggagggagcttgcctcccccttagctactgccgccgctgccacggccggtgcctcctcctcggctgccgcctcgctccggggctggtgggacgatgtcaacgagtcgccccagtggcaggacggggccttcttctccctcgccgccgcctacgccctcgtctccgccgtcgcactgattcagctcgtcaggatccagcgccgggtgcccgagttcggatggaccacgcagaaagtcttccacctcatgaacttccttgtcaatggggtccgtgctctggtgttcggcttccatgtccatgtcttcctccttcgcacaaaagtatacaagttggtgttgctagatctccccggcttgttgtttttctccacctacaccttgctcgtgctcttctgggcagaaatataccatcaggctaggagtctcccaacggacaagctaaggcctgcatacattgccgttaacgccatcatatacgttgttcagctttgcatatggatatacctcggaataaatgataatgccgcggttgagctggccagcaaaatattcattgtagctgtctcctttgttgcgcttcttgggttttcagtatatggtggaaggttgtttgtcttgctgagacgtttccctattgaatctaaggggcggcaaaagaagctgtatgaggttgggaccgtgacagcaatttgtgttacctgctttctgataagatgtgttgtggtcgcgctatctgcatttgatgctgatgtatctctcgaggttttggaccatccagtcctggatttcttctattatatgtttgcggagatactcccttctgcgctggttctcttcgtccttcggaagcttcctcccaagcgggtatcggcgcaataccaccctattaactagggagttctttgtttttatgatgttacatgctaagaactccggataagctggaactgctgaaaacctacatccggttgtattgctgtaatattttatggaagcatcccagggttggcaagatgcatcatcaccatcatgctctatgagaaaagagttttgagtggtgctaatgagtttgtgctactgctagccagagcatcacatgacatctccagcagagtaccataccattatttgaattgcatgtgcattcttgacgcggacaaggccaatgatttatcgccttgttggtcccagtgacttttatggagtacttgtgtggtaattgttggtattcctgaggactagatctgaaactgaaaatgcgttatatcagctatcggtcgtcctaatatcaatttttgttaggcttttatctgtttcagcgttccagagtagagcctttagcctaatgttgtcaggatctgtaattcgaggagcagtgttg

SEQ ID NO: 200287 - DNA, 2005 bp, Zea Mays
caagcattccggctctgcatctggcccagctctgggttgcgcgaacagtcggaaccctaattccctccccggcgccggcgccggcgccccctagctgcgcccccacgaccagcagaatccagatcgaagttttgctcttgccgcggccccgcctaaactccaaaagtgcgaaccccctaactcatcgatcccagcctgcctccgcctacgcgcctcgtgacggcgtggacccctcccctatctgcgtgctgcgcgcatccgcctgcggcctgtcccgtgcagccgtgcctcctccgcgcacatctccagggtctagccgagagcagaccgccgtgacgccaccactcgcgctcgcgctcctgacatcgttgtctgccttctctgtctaagatcagagcagagctccatcgaaagcgtcgcccgcctgcttgagttcctcggcggtatcataatattctcaggcgtgtctcaaggagatggagagctctgttatgcagtgaagaatggcacttgtgccgcaagaggaataacttggacgagccgtggatctatgtaatctgtagggaagcaggcatcaaatgctatgtgttggctccagatcctccaagccggtgctttcgaatcatgcatgtcattgaacccccatgctcagggaggaaaggtgttaccattgaagctttagacaaaaagctatttcttctgggtggctgcagttccgtgtatgatgctacggatgaagtatattgttatgacgcatcctcaaatcgctggagctcagctgctccaatgcctacagcaagttccttatgctccgccgccttcctttcaggtgctattttgtgtctgcatcccttaaggagaagttgtacataactgatggatacggcttgacggacaagtcaccaaattcatgggacatctatgacccggccacggactcgtggtgcacccacaagaacccgttgctcacccctgacatagtgaaattcgtcgcattgggggaggagctggtgaccattcaccgagcggcgtggcacaggatgtactttgccggcgtatacgacccgctggaacgcacctggaggggcagagggaacgagatcgctctctgctactcgagcccgacggtggtcgtggacgggacgctgtacatgctggagcagtccatgggcacgaagctgatggtgtggcgggaggacgccaaggagtgggccatgctcggcaggctctccgacaaggtcactagacccccctgcgcgctcgtggccatcggcaggaagattcatgtggtcggaagagggctgagcatggtcaccgtggatgtggacacggcggcaagggtggacgggttcctggttaccacctctgtaggcccgttggtggaggaagacctgaccccggagaggtgcgtggtgatcaccatctgaaggggtgggcgtgtccaagcttccttgacgccgggtgtattgtggtaactgtgactgactatcgtcgctggcgccgaacatttggctagctagcgtggatgatatatactgcgatgtgagtgaattcaataagaggcttggctctccatacagccaataactatagttagcatttgtatctcgtgttgtttgggctgcttttgtcgactgctggctgtaagaacaatatttgagcttcgtttgttgagtactgtgcgtcccagatggatgggattaatacaagctaatgtgatcctcgtcctggcacttttgttattgtctatttgattgatcgatcaagcgttcgatttctgcagacatggatggcgatgtgcatcgacatttgagggtttcggttttttcttttactgtcggtgtaatggttttggatgctgtgcgtcggtagctttacgatttgtgttcgctacatgcgtaatgatctgattgagatgtgtggtgtactggtgtgtgtaaaataaagcaaaaagaaaaatatatattatcagaggcaggtttcgatcctgcgacctgtgggttat

SEQ ID NO: 200288 - DNA, 1394 bp, Zea Mays
ctctcacttcccaaccaaatcccctttatatgaacgctgttttgatcgaatccatcttggctgggcgtcccgctgagggcgctggtcagtccgcctctgctgagccagaggtgccggcgactgacggagccgaagtggtgaatccagagaatggggaagtaaacgaaccccccgtcacggaggatggtgtgaaaaatgttgagaaaggagacggggatgccctggaggttgtgcagcctgcaagaaagccagctgaaggagagcttcatctatacgctgttcctgtcaggacacaatcaggtgaaaagcttgagctgcagctaagcccaggagattctgttattgatgttaaacaattccttttggatgctcctgaaacatgcttctatacatgctacaatttgatattgcatactgaagatgggtcagctcatcagttggaagactacaatgaaatatctgaaatagcagatataacttctagtggatgttcactggagatggttgctgcaatatacgatgagaggtctattaggtcacatctccgacgtgtgagggagctactatctctgtctagtctttatgtttccctatcaacatccttagctctgcatcaggagtctgctcaaggaaaatctgcaggtcctgaaaaaggccctattcaggagcttgatggtttaaatttcatggaggatagtgctggcgctctcactaatttattggcttctgcaccagcagagataaaatgtgttggaagcattgttttttcgtctttcaatcctccgcctagttatcggaggttacatggagatctcatttatattgatgttacaacactagaaggaaataaatactgcattaccggaagctccaaatttttttatgttaacagtagcaaaggaagtatatttgactcgaaacctacaaaacaaggactggaggccagcactctcataggcctactacagaagatcagtaccaaatttaagaaaggttttcgtgaactcttggatcgcagggcatcggctcatccatttgagaatgttcagtctttgcttccagtgacttcttggttaggagcttttcctgtgccagagcatagaagggatgaagccagggctgaggactcggttgtgttgtcgtatggcaccgaattaattggcatgcagagagactggaatgaagaattgcagtcctgccaggagtttcctcatggcaatcctcaagaaaggatattgcgtggcagagcacgctataaagtaacatgtgattttgtggatgctgcagtaaaaggtgcagttggtgtcattaatagatgcatacccccaataaatccaactgacccagaatgttttcatatagtaaacaatgtcaacaggttctatgttgcatga

SEQ ID NO: 200289 - DNA, 1592 bp, Zea Mays
  misc_feature (1591)..(1592): n is a, c, g, or t
agacgtcccctctagggcttgttcggttattttcaatccatatggattggaggggattgatacggattggaggggattttgacttattgtggattgaaaccccttcaatccccctcaatccatatggattggggtaaaaccgaacaagcccctagcgggaatcgcaatctcaggatccagccgagcactcgacagtcctaaactcctaatccggtaatgccctccgccagattcccattcccaatcctgcccttgttctcccttctctctcttttttttatgtatgttcatgatggcgtatcaggctatcagctaacagatcggtgacggagttgcaccggtcataccagcataccactgcttgtgctagtttagattgctgcttgcttggatcggaagatactttgtggtttgtacgcttctagtaagcgtcaggcgtacgcagggttgatcctttgcttaccagaagatgcagttgaaggggggattttggatgcaacggagtttggaaacttcttgcgtggatacgcatggactgctcgagagctcattcgtcttgcagtagcgggcaggtgcccaagtgctgaccttgtctgcatcttgtgacgcttggcgtgtcaaccaactttggtcttcacagatcaggtctgctttatcactctctccagtttgtaatgcatttgctttgcttggttcagtcagcatagtattttgtagcggggcattgttatagtaggaagcgattcagtagtgtcatgttgcactacgaagcatagtagtgccatgttgtgctacaaagcattaggcacacagactaatttgtatacattttttttgcattttgtgttctagagatgaaccacagtcaaggttctagaattattcgtggcaggggtagaaataaaaggatgtggacatcagatgaagatgacgagcttgtcaaagctttgtgtgagatatctgctgatcctagatataaggttgaaggaggggcctttaagaactgttactctcaaggcatagagaacattctttcacaaaagctacctggtcgtggtattaaagccagccctcatgttgattctcggctgaaagtgatgaagcggaagtattattcgatcaaggatatgatagcatcgacaggcttctcttgggatgacacaagaaagatgatccagtgtgaaaaacaacgatatgatgaatattgcagagaccatcctagagccaagggtctgtatggtgtcccatttgtatatttcgatacatttgatgcaatatatggcaaggacagctctgctggggaagggttggaagggtctgaagctgcaattgctaacatggagaatgaaaatataaatgaagttggagatgacgaagtggaagaggacaggatgtccacaggaatatctggtcgctccccggccgcaacgttaagctctaagagtcagaagaaagacaattatgacgggaaaaggaataggaccgaatcaaattgcccatctctggacaagttcaaggatgtacatgttcagtttcagaatgccattcagcatgccagcacaatggctgctgcaatggagctgttcaaggnn

SEQ ID NO: 200290 - DNA, 2372 bp, Zea Mays
ctcgcccgcaatctacgccgccgcggtgcccacgcccgcgacatccaccacctcgacctcacccccgcccgcggaaatctcgcccgcgagatccctctgcccacacaccgccccctctgctctccgtcgatggaagggcgccattaacacaccgcgatcctcgctaccgcccccacgaggccataccatgccctcgccccctcccagatcttcgaagaggccgccaccccgcccctgttcttggcccctcgtcggcgtcggcctcatcgcggcacgggctgcactccttcgccccgctcacggccgcggtgcttggccacctctgggcctccggggtggcggtgctcccgggcctgacagagctagagttggtgcgcaccaaggctgagatgtggtttgcgttcccgcccgacctccgtgccgtcctcgccgcgggcctgccgtcggggcccgggttcccggactggcagtcgcgcgtggggctgcggtccgcattcgacctgcccatcgcggcggcgtcgctacagatcgcgcggggcgagctgtggccgcgctgctagggcgtgcgccccgccgaccccaaccacgcgctatggtctgcttcatctatggcgtggttcctgttttgcctgcctcttgctcctatttgaccaccatgcgcgccgcgaggaccaccactaggtggagcgtgtctccgtggtcttcttcaccgaccacgaggctgctgagaccctaggggggctcgacctggacatcatcgcagtgctccccaccgtcaggtgccatcgtcggtcgaggtccgtgactaagtgtgacgtgtacctgggcgagttcgcgcacagggagcggctcaagcagttgtctctcttccagatcccctacctcctctttgttccctcggcttagccaccaccttggccggtgctccttgcacgtcgggataggaggatgccgaccaagttctagatgaagagcaactgatttgcttcccttggatggattccactgttgagccattcaaaatttgagatgcggattaatttttacaattcatgttttcagatttaccttccaattttcttagtaataataataatgtataggtagtgcaccatgttttgattctaatctatcttgggtcacctgttttataccgaggttacagaatgtctctcgagtgtgctagagatgctttgctgcaaaagaccatggacaacaaagaaaatacaagtgaattattttcccgatctcgtgataagctcagagttgatctcatgaatatttctatgactactcttagttgaaaaatactttcccaagacaaggagtactttactaaacttgtgattgatgttgtcttgaggcttaaggtgtacaaatggtttaatgaaagttggttatcatttacattgaactatgatatcttcatctataaaattttactcttcaaaaaggtagcacccacttggaatctattgaaattctgaagatacatggagaatctcttaaggactgggatgtgccaactgccgagacttgcacacgtcacaaattaaagctgtttgcattgccggctaaccaagctccagggtataaacttcataattagacattctagatcttagttggccgacttgatcataagccactacccaaagcaaaaaaaagtatattattgaagatgcaactctcccctatatttgagagaagatgaaggatatatcagtgtgtttggtaccctgtagctcctcgtcgacctggtgcaacagcttaagctcaggaagaatgctttacaaatccgaatataagttcagtacgatagtgcaaatagagagcatcagcactaaagaagatagggagagttcaatgcatgatgtttgttttgttgacactggaagaggcgactaattgaggcggttgtcattgccaccggtgtgcacacattctttgtcaaggccgcatatcttgtcgattcaacaaaccaagttggtcattttcagaagctgttcatgctatcggtttggaaagaacatgtggaaagccaatctcggatcttgcttccttcagggattgtctccatcctcttgatagcgatctatattggttatttccgaagaagaatcaagaagcaattcaacattcatgcaagtgtggtaccagattgagatatgtctgttagtttgtaacaatataaacttgttagttatgtgtcagagaaaacatagtaacaatgatttgtgctctatttctacccgtcattgtgtcctatctcaatggtgacttctttgtacacaactgtgtggtctctctatgtcctaataaatacatgcatcatcaatgaacttaatggatattgtcaatacagtgttcta

SEQ ID NO: 200291 - DNA, 3000 bp, Zea Mays
ccgcaatctacgccgccgcggtgcccacgcccgcgacatccaccacctcgacctcacccccgcccgcggaaatctcgcccgcgagatccctctgcccacacaccgccccctctgctctccgtcgatggaagggcgccattaacacaccgcgatcctcgctaccgcccccacgaggccataccatgccctcgccccctcccagatcttcgaagaggccgccaccccgcccctgttcttggcccctcgtcggcgtcggcctcatcgcggcacgggctgcactccttcgccccgctcacggccgcggtgcttggccacctctgggcctccggggtggcggtgctcccgggcctgacagagctagagttggtgcgcaccaaggctgagatgtggtttgcgttcccgcccgacctccgtgccgtcctcgccgcgggcctgccgtcggggcccgggttcccggactggcagtcgcgcgtggggctgcggtccgcattcgacctgcccatcgcggcggcgtcgctacagatcgcgcggggcgagctgtggccgcgctgctagggcgtgcgccccgccgaccccaaccacgcgctatggtctgcttcatctatggcgtggttcctgttttgcctgcctcttgctcctatttgaccaccatgcgcgccgcgaggaccaccactaggtggagcgtgtctccgtggtcttcttcaccgaccacgaggctgctgagaccctaggggggctcgacctggacatcatcgcagtgctccccaccgtcaggtgccatcgtcggtcgaggtccgtgactaagtgtgacgtgtacctgggcgagttcgcgcacagggagcggctcaagcagttgtctctcttccagatcccctacctcctctttgttccctcggcttagccaccaccttggccggtgctccttgcacgtcgggataggaggatgccgaccaagttctagatgaagagcaactgatttgcttcccttggatggattccactgttgagccattcaaaatttgagatgcggattaatttttacaattcatgttttcagatttaccttccaattttcttagtaataataataatgtataggtagtgcaccatgttttgattctaatctatcttgggtcacctgttttataccgaggtaacacctgttttataccgagataattagtatgtattctgagcttcaatcattgttctttatggtgagattcaatgtctccagttaattcattttgtaaattttaggttacagaatgtctctcgagtgtgctagagatgctttgctgcaaaagaccatggacaacaaagaaaatacaagtgaattattttcccgatctcgtgataagctcagagttgatctcatgaatatttctatgactactcttagttgaaaaatactttcccaagacaaggagtactttactaaacttgtgattgatgttgtcttgaggcttaaggtgtacaaatggtttaatgaaagttggttatcatttacattgaactatgatatcttcatctataaaattttactcttcaaaaaggtagcacccacttggaatctattgaaattctgaagatacatggagaatctcttaaggactgggatgtgccaactgccgagacttgcacacgtcacaaattaaagctgtttgcattgccggctaaccaagctccagggtataaacttcataattagacattctagatcttagttggccgacttgatcataagccactacccaaagcaaaaaaaagtatattattgaagatgcaactctcccctatatttgagagaagatgaaggatatatcagtgtgtttggtaccctgtagctcctcgtcgacctggtgcaacagcttaagctcaggaagaatgctttacaaatccgaatataagttcagtacgatagtgcaaatagagagcatcaggtactccttaggttcctattgacgtttaattgtcctaatgaggttgatccatgttctattacgaattgtatgtgtgctattttcccacaattttctaatcaaaatattcagcacaaaaggatgacctcgtatatgggatattcaattaattgtccatgaaatttgacaaaattagaaaaatgaaaaatatagcaggcctgtagatctgagcaaatgatatgaagtaaatgttgttactttctcaaaacgtagatgagctttttttgcaaggactttagttgaaaattggaaaatctaacatgcctgtagatctgagaagacgatatgaagtacatgttgttactttcacaaaatgtagatgagcttttttgcaaggacttcagttgttatgttgctcctcattaacactaaaacttaacctgcccgggttacaattatacatctcaatccagatcagccttttcattgttctggttctgctcatttatcctttctagtcacataaattcttgccatttgacaccagcactaaagaagatagggagagttcaatgcatgatgtttgttttgttgacactggaagaggcgactaattgaggcggttgtcattgccaccggtgtgcacacattctttgtcaaggccgcatatcttgtcgattcaacaaaccaagttggtcattttcagaagctgttcatgctatcggtttggaaagaacatgtggaaagccaatctcggatcttgcttccttcagggattgtctccatcctcttgatagcgatctatattggttatttccgaagaagaatcaagaagcaattcaacattcatgcaagtgtggtaccagattgagatatgtctgttagtttgtaacaatataaacttgttagttatgtgtcagagaaaacatagtaacaatgatttgtgctctatttctacccgtcattgtgtcctatctcaatggtgacttctttgtacacaactgtgtggtctctctatgtcctaataaatacatgcatcatcaatgaacttaatggatattgtcaatacagtgttcta

SEQ ID NO: 200292 - DNA, 3151 bp, Zea Mays
ccgcaatctacgccgccgcggtgcccacgcccgcgacatccaccacctcgacctcacccccgcccgcggaaatctcgcccgcgagatccctctgcccacacaccgccccctctgctctccgtcgatggaagggcgccattaacacaccgcgatcctcgctaccgcccccacgaggccataccatgccctcgccccctcccagatcttcgaagaggccgccaccccgcccctgttcttggcccctcgtcggcgtcggcctcatcgcggcacgggctgcactccttcgccccgctcacggccgcggtgcttggccacctctgggcctccggggtggcggtgctcccgggcctgacagagctagagttggtgcgcaccaaggctgagatgtggtttgcgttcccgcccgacctccgtgccgtcctcgccgcgggcctgccgtcggggcccgggttcccggactggcagtcgcgcgtggggctgcggtccgcattcgacctgcccatcgcggcggcgtcgctacagatcgcgcggggcgagctgtggccgcgctgctagggcgtgcgccccgccgaccccaaccacgcgctatggtctgcttcatctatggcgtggttcctgttttgcctgcctcttgctcctatttgaccaccatgcgcgccgcgaggaccaccactaggtggagcgtgtctccgtggtcttcttcaccgaccacgaggctgctgagaccctaggggggctcgacctggacatcatcgcagtgctccccaccgtcaggtgccatcgtcggtcgaggtccgtgactaagtgtgacgtgtacctgggcgagttcgcgcacagggagcggctcaagcagttgtctctcttccagatcccctacctcctctttgttccctcggcttagccaccaccttggccggtgctccttgcacgtcgggataggaggatgccgaccaagttctagatgaagagcaactgatttgcttcccttggatggattccactgttgagccattcaaaatttgagatgcggattaatttttacaattcatgttttcagatttaccttccaattttcttagtaataataataatgtataggtagtgcaccatgttttgattctaatctatcttgggtcacctgttttataccgaggtaacacctgttttataccgagataattagtatgtattctgagcttcaatcattgttctttatggtgagattcaatgtctccagttaattcattttgtaaattttaggttacagaatgtctctcgagtgtgctagagatgctttgctgcaaaagaccatggacaacaaagaaaatacaagtgaattattttcccgatctcgtgataagctcagagttgatctcatgaatatttctatgactactcttagttgaaaaatactttcccaagacaaggagtactttactaaacttgtgattgatgttgtcttgaggcttaaggtgtacaaatggtttaatgaaagttggttatcatttacattgaactatgatatcttcatctataaaattttactcttcaaaaacacccacttggaatctattgaaattctgaagatacatggagaatctcttaaggactgggatgtgccaactgccgagacttgcacacgtcacaaattaaagctgtttgcattgccggctaaccaagctccagggtataaacttcataattagacattctagatcttagttggccgacttgatcataagccactacccaaagcaaaaaaaagtatattattgaagatgcaactctcccctatatttgagagaagatgaaggatatatcagtgtgtttggtaccctgtagctcctcgtcgacctggtgcaacagcttaagctcaggaagaatgctttacaaatccgaatataagttcagtacgatagtgcaaatagagagcatcaggtactccttaggttcctattgacgtttaattgtcctaatgaggttgatccatgttctattacgaattgtatgtgtgctattttcccacaattttctaatcaaaatattcagcacaaaaggatgacctcgtatatgggatattcaattaattgtccatgaaatttgacaaaattagaaaaatgaaaaatatagcaggcctgtagatctgagcaaatgatatgaagtaaatgttgttactttctcaaaacgtagatgagctttttttgcaaggactttagttgaaaattggaaaatctaacatgcctgtagatctgagaagacgatatgaagtacatgttgttactttcacaaaatgtagatgagcttttttgcaaggacttcagttgttatgttgctcctcattaacactaaaacttaacctgcccgggttacaattatacatctcaatccagatcagccttttcattgttctggttctgctcatttatcctttctagtcacataaattcttgccatttgacaccagcactaaagaagatagggagagttcaatgcatgatgtttgttttgttgacactggaagaggcgactaattgaggcggttgtcattgccaccggtgtgcacacattctttgtcaaggccgcatatcttgtcgattcaacaaaccaagttggtcattttcagaaggcaagctaagtgtgatgccgccacataagaccatgcccactgtatttatattttatactaatttttaacgtccaaaggacaccagatgtttcaatgttaatggtgctattgttatacactgatgttttgttcctgtttgcttgcaactttttgcagctgttcatgctatcggtttggaaagaacatgtggaaagccaatctcggatcttgcttccttcagggattgtctccatcctcttgatagcgatctatattggttatttccgaagaagaatcaagaagcaattcaacattcatgcaagtgtggtaccagattgagatatgtctgttagtttgtaacaatataaacttgttagttatgtgtcagagaaaacatagtaacaatgatttgtgctctatttctacccgtcattgtgtcctatctcaatggtgacttctttgtacacaactgtgtggtctctctatgtcctaataaatacatgcatcatcaatgaacttaatggatattgtcaatacagtgttcta

SEQ ID NO: 200293 - DNA, 2532 bp, Zea Mays
ccgcaatctacgccgccgcggtgcccacgcccgcgacatccaccacctcgacctcacccccgcccgcggaaatctcgcccgcgagatccctctgcccacacaccgccccctctgctctccgtcgatggaagggcgccattaacacaccgcgatcctcgctaccgcccccacgaggccataccatgccctcgccccctcccagatcttcgaagaggccgccaccccgcccctgttcttggcccctcgtcggcgtcggcctcatcgcggcacgggctgcactccttcgccccgctcacggccgcggtgcttggccacctctgggcctccggggtggcggtgctcccgggcctgacagagctagagttggtgcgcaccaaggctgagatgtggtttgcgttcccgcccgacctccgtgccgtcctcgccgcgggcctgccgtcggggcccgggttcccggactggcagtcgcgcgtggggctgcggtccgcattcgacctgcccatcgcggcggcgtcgctacagatcgcgcggggcgagctgtggccgcgctgctagggcgtgcgccccgccgaccccaaccacgcgctatggtctgcttcatctatggcgtggttcctgttttgcctgcctcttgctcctatttgaccaccatgcgcgccgcgaggaccaccactaggtggagcgtgtctccgtggtcttcttcaccgaccacgaggctgctgagaccctaggggggctcgacctggacatcatcgcagtgctccccaccgtcaggtgccatcgtcggtcgaggttacagaatgtctctcgagtgtgctagagatgctttgctgcaaaagaccatggacaacaaagaaaatacaagtgaattattttcccgatctcgtgataagctcagagttgatctcatgaatatttctatgactactcttagttgaaaaatactttcccaagacaaggagtactttactaaacttgtgattgatgttgtcttgaggcttaaggtgtacaaatggtttaatgaaagttggttatcatttacattgaactatgatatcttcatctataaaattttactcttcaaaaaggtagcacccacttggaatctattgaaattctgaagatacatggagaatctcttaaggactgggatgtgccaactgccgagacttgcacacgtcacaaattaaagctgtttgcattgccggctaaccaagctccagggtataaacttcataattagacattctagatcttagttggccgacttgatcataagccactacccaaagcaaaaaaaagtatattattgaagatgcaactctcccctatatttgagagaagatgaaggatatatcagtgtgtttggtaccctgtagctcctcgtcgacctggtgcaacagcttaagctcaggaagaatgctttacaaatccgaatataagttcagtacgatagtgcaaatagagagcatcaggtactccttaggttcctattgacgtttaattgtcctaatgaggttgatccatgttctattacgaattgtatgtgtgctattttcccacaattttctaatcaaaatattcagcacaaaaggatgacctcgtatatgggatattcaattaattgtccatgaaatttgacaaaattagaaaaatgaaaaatatagcaggcctgtagatctgagcaaatgatatgaagtaaatgttgttactttctcaaaacgtagatgagctttttttgcaaggactttagttgaaaattggaaaatctaacatgcctgtagatctgagaagacgatatgaagtacatgttgttactttcacaaaatgtagatgagcttttttgcaaggacttcagttgttatgttgctcctcattaacactaaaacttaacctgcccgggttacaattatacatctcaatccagatcagccttttcattgttctggttctgctcatttatcctttctagtcacataaattcttgccatttgacaccagcactaaagaagatagggagagttcaatgcatgatgtttgttttgttgacactggaagaggcgactaattgaggcggttgtcattgccaccggtgtgcacacattctttgtcaaggccgcatatcttgtcgattcaacaaaccaagttggtcattttcagaagctgttcatgctatcggtttggaaagaacatgtggaaagccaatctcggatcttgcttccttcagggattgtctccatcctcttgatagcgatctatattggttatttccgaagaagaatcaagaagcaattcaacattcatgcaagtgtggtaccagattgagatatgtctgttagtttgtaacaatataaacttgttagttatgtgtcagagaaaacatagtaacaatgatttgtgctctatttctacccgtcattgtgtcctatctcaatggtgacttctttgtacacaactgtgtggtctctctatgtcctaataaatacatgcatcatcaatgaacttaatggatattgtcaatacagtgttcta

SEQ ID NO: 200294 - DNA, 2723 bp, Zea Mays
cgccgcggtgcccacgcccgcgacatccaccacctcgacctcacccccgcccgcggaaatctcgcccgcgagatccctctgcccacacaccgccccctctgctctccgtcgatggaagggcgccattaacacaccgcgatcctcgctaccgcccccacgaggccataccatgccctcgccccctcccagatcttcgaagaggccgccaccccgcccctgttcttggcccctcgtcggcgtcggcctcatcgcggcacgggctgcactccttcgccccgctcacggccgcggtgcttggccacctctgggcctccggggtggcggtgctcccgggcctgacagagctagagttggtgcgcaccaaggctgagatgtggtttgcgttcccgcccgacctccgtgccgtcctcgccgcgggcctgccgtcggggcccgggttcccggactggcagtcgcgcgtggggctgcggtccgcattcgacctgcccatcgcggcggcgtcgctacagatcgcgcggggcgagctgtggccgcgctgctagggcgtgcgccccgccgaccccaaccacgcgctatggtctgcttcatctatggcgtggttcctgttttgcctgcctcttgctcctatttgaccaccatgcgcgccgcgaggaccaccactaggtggagcgtgtctccgtggtcttcttcaccgaccacgaggctgctgagaccctaggggggctcgacctggacatcatcgcagtgctccccaccgtcaggtgccatcgtcggtcgaggtccgtgactaagtgtgacgtgtacctgggcgagttcgcgcacagggagcggctcaagcagttgtctctcttccagatcccctacctcctctttgttccctcggcttagccaccaccttggccggtgctccttgcacgtcgggataggaggatgccgaccaagttctagatgaagagcaactgatttgcttcccttggatggattccactgttgagccattcaaaatttgagatgcggattaatttttacaattcatgttttcagatttaccttccaattttcttagtaataataataatgtataggtagtgcaccatgttttgattctaatctatcttgggtcacctgttttataccgaggtaacacctgttttataccgagataattagtatgtattctgagcttcaatcattgttctttatggtgagattcaatgtctccagttaattcattttgtaaattttaggttacagaatgtctctcgagtgtgctagagatgctttgctgcaaaagaccatggacaacaaagaaaatacaagtgaattattttcccgatctcgtgataagctcagagttgatctcatgaatatttctatgactactcttagttgaaaaatactttcccaagacaaggagtactttactaaacttgtgattgatgttgtcttgaggcttaaggtgtacaaatggtttaatgaaagttggttatcatttacattgaactatgatatcttcatctataaaattttactcttcaaaaaggtagcacccacttggaatctattgaaattctgaagatacatggagaatctcttaaggactgggaagaatgctttacaaatccgaatataagttcagtacgatagtgcaaatagagagcatcaggtactccttaggttcctattgacgtttaattgtcctaatgaggttgatccatgttctattacgaattgtatgtgtgctattttcccacaattttctaatcaaaatattcagcacaaaaggatgacctcgtatatgggatattcaattaattgtccatgaaatttgacaaaattagaaaaatgaaaaatatagcaggcctgtagatctgagcaaatgatatgaagtaaatgttgttactttctcaaaacgtagatgagctttttttgcaaggactttagttgaaaattggaaaatctaacatgcctgtagatctgagaagacgatatgaagtacatgttgttactttcacaaaatgtagatgagcttttttgcaaggacttcagttgttatgttgctcctcattaacactaaaacttaacctgcccgggttacaattatacatctcaatccagatcagccttttcattgttctggttctgctcatttatcctttctagtcacataaattcttgccatttgacaccagcactaaagaagatagggagagttcaatgcatgatgtttgttttgttgacactggaagaggcgactaattgaggcggttgtcattgccaccggtgtgcacacattctttgtcaaggccgcatatcttgtcgattcaacaaaccaagttggtcattttcagaagctgttcatgctatcggtttggaaagaacatgtggaaagccaatctcggatcttgcttccttcagggattgtctccatcctcttgatagcgatctatattggttatttccgaagaagaatcaagaagcaattcaacattcatgcaagtgtggtaccagattgagatatgtctgttagtttgtaacaatataaacttgttagttatgtgtcagagaaaacatagtaacaatgatttgtgctctatttctacccgtcattgtgtcctatctcaatggtgacttctttgtacacaactgtgtggtctctctatgtcctaataaatacatgcatcatcaatgaacttaatggatattgtcaatacagtgttcta

SEQ ID NO: 200295 - DNA, 2996 bp, Zea Mays
cctcgacctcacccccgcccgcggaaatctcgcccgcgagatccctctgcccacacaccgccccctctgctctccgtcgatggaagggcgccattaacacaccgcgatcctcgctaccgcccccacgaggccataccatgccctcgccccctcccagatcttcgaagaggccgccaccccgcccctgttcttggcccctcgtcggcgtcggcctcatcgcggcacgggctgcactccttcgccccgctcacggccgcggtgcttggccacctctgggcctccggggtggcggtgctcccgggcctgacagagctagagttggtgcgcaccaaggctgagatgtggtttgcgttcccgcccgacctccgtgccgtcctcgccgcgggcctgccgtcggggcccgggttcccggactggcagtcgcgcgtggggctgcggtccgcattcgacctgcccatcgcggcggcgtcgctacagatcgcgcggggcgagctgtggccgcgctgctagggcgtgcgccccgccgaccccaaccacgcgctatggtctgcttcatctatggcgtggttcctgttttgcctgcctcttgctcctatttgaccaccatgcgcgccgcgaggaccaccactaggtggagcgtgtctccgtggtcttcttcaccgaccacgaggctgctgagaccctaggggggctcgacctggacatcatcgcagtgctccccaccgtcaggtgccatcgtcggtcgaggtccgtgactaagtgtgacgtgtacctgggcgagttcgcgcacagggagcggctcaagcagttgtctctcttccagatcccctacctcctctttgttccctcggcttagccaccaccttggccggtgctccttgcacgtcgggataggaggatgccgaccaagttctagatgaagagcaactgatttgcttcccttggatggattccactgttgagccattcaaaatttgagatgcggattaatttttacaattcatgttttcagatttaccttccaattttcttagtaataataataatgtataggtagtgcaccatgttttgattctaatctatcttgggtcacctgttttataccgaggtaacacctgttttataccgagataattagtatgtattctgagcttcaatcattgttctttatggtgagattcaatgtctccagttaattcattttgtaaattttaggttacagaatgtctctcgagtgtgctagagatgctttgctgcaaaagaccatggacaacaaagaaaatacaagtgaattattttcccgatctcgtgataagctcagagttgatctcatgaatatttctatgactactcttagttgaaaaatactttcccaagacaaggagtactttactaaacttgtgattgatgttgtcttgaggcttaaggtgtacaaatggtttaatgaaagttggttatcatttacattgaactatgatatcttcatctataaaattttactcttcaaaaaggtagcacccacttggaatctattgaaattctgaagatacatggagaatctcttaaggactgggatgtgccaactgccgagacttgcacacgtcacaaattaaagctgtttgcattgccggctaaccaagctccagggtataaacttcataattagacattctagatcttagttggccgacttgatcataagccactacccaaagcaaaaaaaagtatattattgaagatgcaactctcccctatatttgagagaagatgaaggatatatcagtgtgtttggtaccctgtagctcctcgtcgacctggtgcaacagcttaagctcaggaagaatgctttacaaatccgaatataagttcagtacgatagtgcaaatagagagcatcaggtactccttaggttcctattgacgtttaattgtcctaatgaggttgatccatgttctattacgaattgtatgtgtgctattttcccacaattttctaatcaaaatattcagcacaaaaggatgacctcgtatatgggatattcaattaattgtccatgaaatttgacaaaattagaaaaatgaaaaatatagcaggcctgtagatctgagcaaatgatatgaagtaaatgttgttactttctcaaaacgtagatgagctttttttgcaaggactttagttgaaaattggaaaatctaacatgcctgtagatctgagaagacgatatgaagtacatgttgttactttcacaaaatgtagatgagcttttttgcaaggacttcagttgttatgttgctcctcattaacactaaaacttaacctgcccgggttacaattatacatctcaatccagatcagccttttcattgttctggttctgctcatttatcctttctagtcacataaattcttgccatttgacaccagcactaaagaagatagggagagttcaatgcatgatgtttgttttgttgacactggaagaggcgactaattgaggcggttgtcattgccaccggtgtgcacacattctttgtcaaggccgcatatcttgtcgattcaacaaaccaagttggtcattttcagaaggcaagctaagtgtgatgccgccacataagaccatgcccactctgttcatgctatcggtttggaaagaacatgtggaaagccaatctcggatcttgcttccttcagggattgtctccatcctcttgatagcgatctatattggttatttccgaagaagaatcaagaagcaattcaacattcatgcaagtgtggtaccagattgagatatgtctgttagtttgtaacaatataaacttgttagttatgtgtcagagaaaacatagtaacaatgatttgtgctctatttctacccgtcattgtgtcctatctcaatggtgacttctttgtacacaactgtgtggtctctctatgtcctaataaatacatgcatcatcaatgaacttaatggatattgtcaatacagtgttcta

SEQ ID NO: 200296 - DNA, 2561 bp, Zea Mays
cctcgacctcacccccgcccgcggaaatctcgcccgcgagatccctctgcccacacaccgccccctctgctctccgtcgatggaagggcgccattaacacaccgcgatcctcgctaccgcccccacgaggccataccatgccctcgccccctcccagatcttcgaagaggccgccaccccgcccctgttcttggcccctcgtcggcgtcggcctcatcgcggcacgggctgcactccttcgccccgctcacggccgcggtgcttggccacctctgggcctccggggtggcggtgctcccgggcctgacagagctagagttggtgcgcaccaaggctgagatgtggtttgcgttcccgcccgacctccgtgccgtcctcgccgcgggcctgccgtcggggcccgggttcccggactggcagtcgcgcgtggggctgcggtccgcattcgacctgcccatcgcggcggcgtcgctacagatcgcgcggggcgagctgtggccgcgctgctagggcgtgcgccccgccgaccccaaccacgcgctatggtctgcttcatctatggcgtggttcctgttttgcctgcctcttgctcctatttgaccaccatgcgcgccgcgaggaccaccactaggtggagcgtgtctccgtggtcttcttcaccgaccacgaggctgctgagaccctaggggggctcgacctggacatcatcgcagtgctccccaccgtcaggtgccatcgtcggtcgaggtccgtgactaagtgtgacgtgtacctgggcgagttcgcgcacagggagcggctcaagcagttgtctctcttccagatcccctacctcctctttgttccctcggcttagccaccaccttggccggtgctccttgcacgtcgggataggaggatgccgaccaagttctagatgaagagcaactgatttgcttcccttggatggattccactgttgagccattcaaaatttgagatgcggattaatttttacaattcatgttttcagatttaccttccaattttcttagtaataataataatgtataggtagtgcaccatgttttgattctaatctatcttgggtcacctgttttataccgaggtaacacctgttttataccgagataattagtatgtattctgagcttcaatcattgttctttatggtgagattcaatgtctccagttaattcattttgtaaattttaggttacagaatgtctctcgagtgtgctagagatgctttgctgcaaaagaccatggacaacaaagaaaatacaaataagctcagagttgatctcatgaatatttctatgactactcttagttgaaaaatactttcccaagacaaggagtactttactaaacttgtgattgatgttgtcttgaggcttaaggtgtacaaatggtttaatgaaagttggttatcatttacattgaactatgatatcttcatctataaaattttactcttcaaaaaggtagcacccacttggaatctattgaaattctgaagatacatggagaatctcttaaggactgggatgtgccaactgccgagacttgcacacgtcacaaattaaagctgtttgcattgccggctaaccaagctccagggtataaacttcataattagacattctagatcttagttggccgacttgatcataagccactacccaaagcaaaaaaaagtatattattgaagatgcaactctcccctatatttgagagaagatgaaggatatatcagtgtgtttggtaccctgtagctcctcgtcgacctggtgcaacagcttaagctcaggaagaatgctttacaaatccgaatataagttcagtacgatagtgcaaatagagagcatcagcactaaagaagatagggagagttcaatgcatgatgtttgttttgttgacactggaagaggcgactaattgaggcggttgtcattgccaccggtgtgcacacattctttgtcaaggccgcatatcttgtcgattcaacaaaccaagttggtcattttcagaaggcaagctaagtgtgatgccgccacataagaccatgcccactgtatttatattttatactaatttttaacgtccaaaggacaccagatgtttcaatgttaatggtgctattgttatacactgatgttttgttcctgtttgcttgcaactttttgcagctgttcatgctatcggtttggaaagaacatgtggaaagccaatctcggatcttgcttccttcagggattgtctccatcctcttgatagcgatctatattggttatttccgaagaagaatcaagaagcaattcaacattcatgcaagtgtggtaccagattgagatatgtctgttagtttgtaacaatataaacttgttagttatgtgtcagagaaaacatagtaacaatgatttgtgctctatttctacccgtcattgtgtcctatctcaatggtgacttctttgtacacaactgtgtggtctctctatgtcctaataaatacatgcatcatcaatgaacttaatggatattgtcaatacagtgttcta

SEQ ID NO: 200297 - DNA, 699 bp, Zea Mays
atctgatttcttatccttctcaccgctcaactcctatcccttatccttccacgctgtgctcgtcggctgccctgcagttcccccatggacgcctcctttctaatctgtgtgcaggggtttccttcccatggtcgccctcaaccccatggtcgacctcgcctagcccttcccccatctcttccccaagctcggttcggcatggaggctggccacaggacgcagcacaccaacctcaccggccataccctctgcttttccccactgtccgcagccccgatgtcgtcgtcgtgattagacatggtacgttcattgatcacgtattgtggaggacaacaacaactggaataatctcaaagtgggattgatgaatgaacccaaagctgaatgatctgatcgtactggaatgggaggtgctcgccaagcgagtatcatctaacaacactgacttagtgtttatcccaggcaagccccggtgcatttgccacccccttgttgttataaaactttttatcacttatatgttgcattaggtgataggagttgtgtgaataaacaattgatgcattaccattccttagaattttattactattccttgattcctctttataaaagagaactaaagatgcttagtcctgcttagataattaaaaagttgttctttttaataaagatgatgtgttacacgggatatgggaa

SEQ ID NO: 200298 - DNA, 900 bp, Zea Mays
atctgatttcttatccttctcaccgctcaactcctatcccttatccttccacgatgtgctgtcggcctcatctcccaagtccaagccattcttgttccttctctgctcgttctcatggccgagctccccacgtccgccgctcctccctggcgccctcacctccattggagctcgcccctgttgagctcacctgtgctcgtcggctgccctgcagttcccccatggacgcctcctttctaatctgtgtgcaggggtttccttcccatggtcgccctcaaccccatggtcgacctcgcctagcccttcccccatctcttccccaagctcggttcggcatggaggctggccacaggacgcagcacaccaacctcaccggccataccctctgcttttccccactgtccgcagccccgatgtcgtcgtcgtgattagacatgtgtggcgaaaagaaagattctagagtttggtgggaaaggaaagctctatcacgacgaccaccaggtacgttcattgatcacgtattgtggaggacaacaacaactggaataatctcaaagtgggattgatgaatgaacccaaagctgaatgatctgatcgtactggaatgggaggtgctcgccaagcgagtatcatctaacaacactgacttagtgtttatcccaggcaagccccggtgcatttgccacccccttgttgttataaaactttttatcacttatatgttgcattaggtgataggagttgtgtgaataaacaattgatgcattaccattccttagaattttattactattccttgattcctctttataaaagagaactaaagatgcttagtcctgcttagataattaaaaagttgttctttttaataaagatgatgtgttacacgggatatgggaa

SEQ ID NO: 200299 - DNA, 699 bp, Zea Mays; identical to SEQ ID NO: 200297

SEQ ID NO: 200300 - DNA, 2243 bp, Zea Mays
aagcattgtccggacggcgcgcgacagaaaaaggaggagcagggggaggggaagaaggatgcagcgaaagcgacggggaaagaggacgctgcgtcggatggtgggcccacggggactcccctcccagacaaaaagttgctactcttcatcctcgataggctccagaagaaggatacttatggagttttctcggagcctgtcgatgcagaggagcttccagattactttgacattattgaccatccaatggacttctcaacaatccgtgagaagctgttgaatgactcgtattctaagttggagcagtttgaggatgatgtgtttctactcacatcaaatgccatgtcttacaattcagctgatacaatctacttccgacaggcacggtctattgaagctcttgccaaaaaggattttgagaacctgaggcaacccagtgatgaagaggaacccaaaccaccagctcgaaggggtaggccaccgaagaatcccaagacagagggtgatgtgtcaccagacctatctaatgtgaaagcaaataaacctgaagacaatgtcgatacattcagaaaaaggtcaactggagacagaactcgaaatacaaataccccaatgaaagatctgtccagttttcacgatacgtttggttcttttagtgcaaaaagaacagataaaattggtgattattctggttcatcgaagtggggaaagaaacctgttagtctagatgacgaccgcaggagtacatatgatcagcactattcacgtaatagctctctgtttgctgccctggatgatgagaggaaactactggtgccagtaggggttcagcagccacatgcatatgctaggagcttggcacgatttgcatcaaaattgggcccagttggctgggatgtggcagcaaatcgtatcagaagggcactcccccctgggacaagtttcggcccaggatgggttgtagatggtgaaccacctcaaaactctcagtgggctcctgcagcatcgactaatccctcctctgagcccactgctccacccaatatgccatccaagaatgatgtactcgatcacaagtctggaccgtcttctaatggggatgttactgtaaagtaaccaagcttgagaacggagttaccgagtcatgtggtggtacggacaatacgggatcagcagcgcctccaatgcagcaacacagccacagtcgagaaatccactctaacatcaatggctttactgctatgtcaaacgccatgagtcagtacgcggggcaagggttatttggatcaggcattcatatgacgcacgcccaagtgcttgggatgttttctggcatgaatggcaaagtcaatggctatatccataggcacccagtaactgctgatagtcttaaaacagcaggacagaacggagatgttggaaaggcaactgtgaaccccgtgcaaagcgcaggccaggatccaaagaccgcgaccgaaaatagctctgctcacccaggcttgaattccagagcccagtcatcaggttcctcgcctaggggaaagctgacaaatccgaagcaccctgatctggctttgcagctatgagcgcggtagtaggcattgacatagtttggtttagtactgtgatctgtgacagaggcatgagctcctcgagcactgctcctccgggcctaattctcaagcttccggcacgctgatagacatttgtagcttgccaagcggttgaagaggtaacagatggttggattgttgtcagagaataataacgcaaagcagctgttgcatgaggcggcggcggaacaccatgtaggccccccattttaatcatttgacccccagtgagttgttgtaaaagggtagggtagcttctgtacaggttctaatcttattggagatgacagtgtttcggatgaggcggccgcctgttgtccaatttgtaacatttataggaggaagtatacaggcgaaaaaggcagtgaataattgtgccttttgaaatgttcgaacggccgattggcgacatgttgctgttgttttgatttcttgtgccttttgggctcactctgtccactggatacgttggatgctggtgattggcatatatatgtaggtcatgctcttgagccttctactcgctgtgattcttcttcgcctcggaaattagtcaccagcaagggcgcccatatgggtgtacactgatttactgatttacattatagatgtactgtttatagagtgaag

SEQ ID NO: 200301 - DNA, 1449 bp, Zea Mays
tcctggtatccagttcctttctttgcccctcctccgctttcttcggttcttcctctcccccactccccacgctgcctgagaggctgagactaggaaggggaaggaaaataatagtttggcgcgcaaatatccgcctccattcgtacgccgctattctcgtctgcgatccgcagcgcgatgatgatcccgtggggcggcgtggggtgctgtctcagcgccgctgcgctgtatctcctcgggaggagcagcggaagtgatgcggaggtgctgaggtcggtggcgagggcgggcagcatgaaggatttagctgctatcttggacactgcaagtaaggtcctaccacttgtagttgccatctctgggagagttggttcagacacaccacttatatgccaacaaagcggcatgagaggtgtaattgttgaagaaacggcagagcaacacttcctgaagcacaatgatgccggatcctggattcaagattcggcagtgatgctttctgttagcaaagaggttccatggtatctggatgatggaactggacgtgtttatgtggtcggtgctcgttctgcagctggtttaattttaactgttgccagtgaggtttttgaggaatcagggaggacacttgtacgtggaactctagattatttacaagggttgaagatgctgggagtaaagcgaactgaaagggttcttccaactggaacctcattgacagttgttggtgaggccattaaagatgatgttggaactattcgaattcagcgaccgcacaaaggacccttttatgcatcatcaaagagcattgatcaacttattgtgaatcttgggaaatgggccaagtaggaaaatttgttagaacatatttttggttgttacttcttagttagggcatcttatgctagtatcatgtttgtggcaggttataccgaattgcttccatgggttttgcaacatttggtgtcttccttcttgcaaagcgtgcactacagcattttctagaaagaagacggcggcatgaactgcaaaaaagggttcttaatgcagcagcacaaaggcaagctagagaagctgaagggagcaaaggtacatcagacgcagagcctaacagtaaaaaagatcaattagtgttggacatatgtgtcatatgccttgagcaagagtacaatgctgtttttgtgccgtaagtattgtatcttttccagaacttgaatgctctttgttgagaatgaagcaacttgattttctctatttttctatttcctttttcccataattccaaatatactaggcaacattatggttttcatatttcctgttcactagtagtttcttgatttttctcttaatggcttgcctcataacttgatagaacttgaatactgctaaggccttctttggatgttcagtactaaggaactataattctagaacccattgatctgc

SEQ ID NO: 200302 - DNA, 572 bp, Zea Mays
gctcgatactttaggaaacggcagcggcggcgcttcgcgattgtcatctgcgggaaggggtggatgggaaggccggaaggggcgaagtgtctttgtgactgcataccgatgcgagggcgcccttccctccttccttctttcgtgtgctcattgctgaagcatgggatgcaggaggtctctatcaagttggtcagtttcctcactggaatgtttggtcagagtggaatggaaaggagacttcagcttcgggatgaaggttttccctcatggcaaaggcatgcgcgatatgaagatacaacctgaaggtgatatggatggacgctgaagctatggctggaggagcttcggcttagtatgatgatgaagatcaaggacgaaaccgacctaaaggggaaacacttacttagtccttgattaatcacattatgattaagagtaaatatcagggacatgaatgtaattttgtccaggttgtgtcccgtgcctataaataggggaacagtaacaccttactgttcacgcgacattgcattcactctcgcgcctttctcacatcgttatcttctgccaag

SEQ ID NO: 200303 - DNA, 1086 bp, Zea Mays
cccacatgtcatgcagagatggtcagccagccaggcaagcattaaaagccagtgtccggtcgggccgcgtacctggttcgaccagaccagaactcaaccggtcgcgcttccttcttcaccctcagtcctcttccgtcctcctcctgtccaccgccccgtgcagttcggcggcgacatggcggcggccggcgacctgtccgacgatgagaagcgggcgatgaggggcagcaagttcgcgccgcttcctccgcctcctccctcttcccgcccccagccgaggtgagccttcaacttcaggaagagtagtacgacatgtttcctcatttgtggatggaactgaggattctgaagatgaagcagaggttaaggggatcaaaagaaaaaggaaaaataagaaggttaaaactcatcaaggtgacaaacaacagagcaagaaaaagaagaaaaataaaaagaaaaagggcaaaggtaatgcaatataggttttttgttctctcttgttttttcatgtaaaagaatttggttggcagctgggcaccgtactgaaactatgccaccgtaccattgctgaacctacttgtagatcaggtttgaggtgctgtcagagtgtcagcatgcaaaactttctgttgataatgatccatagtgttctaaacctcagattagatcactggattttgctatatgaatactccctccattcccaattataagacacactggctttttttatatacgtaggttttgctatgtacttcgtaacttagatatacactgtctatagatacatagtaaaagccatcggtattaaggcgtcacactaggtgatgaggtgtgctggaaatctgggcgcccgggttgccacgaccaaaaatcagtgaaagagagggatgaagggagaacgagagggtagagggcaattgttgcgatccctgctgtctccggtgctgcatcacagtcaaatggaaggggactgcagcaatggttgatctgagggtgtagagcagtgaggaaaaagcaggagggagaagttttgggtggtggcacatctggagattgagagagagaagcaatctatgaggaggg

SEQ ID NO: 200304 - DNA, 1109 bp, Zea Mays
gtctgggacgggtcacgggtgaggtctattccttcctgctacagtccaaagtcatggatccaattacctgaccgattcgcgagactgatgggacggcgtcacagcggcggcggcggccgcggcggcggaagaggaagagggcgagggcgagggcgtgggcgagatgaggaagaagatcttcctctgcacaaggctgcaaggtctggtgatgcggcagcagtggagtcgactccacctggctgcatgggctgggcatgttgatgttgtgagatgcctttgcaagcacaaagctgatgtgggagctgcagcaatggacgacactgcagcacttcattttgcttcccagaaaggccatgtagaagtggctcgtgagctgctggcatctggggcctctgtgaaagccaagaaccggaaaggcttcacggcgctgcactttgctgctcagaattctcacctggatcttgtgaagtaccttgtgaagaaaggtgttgacgtcacagcaaagaccaaaggtggccagacagctctacatgtcgctgaggatgatgaagtgcgtgcgttcctgaaggagtgcgagcaatccttgaagaagggtgccgagctaccatcggagaaggatgattctgccgagaaagagggcgatagcaagtcttcaggtgaggttatgaaagatgaggaggatgcagagcagggcgagaagaggaaaagcgaattggttggtgcgtcgagtttgtcaggagcaaaaaaagccaaagtttctcttggtcatctagtttgtgaaaatgacatggacgaggaagaggagtgatttcgagcagccttgaccttgaggatgcaatagaagtgcacttcgatgttttgttatgctagtcttagtctgtacggcgatcttgaatgtaaagacaagtgcaaagttgaatctcagttctcatgtattgcatggatgaaaattctaagggcttgtttggtaggactctggctcctttgaaaacggatgtagctctggctcatttatttgtaggagcagctcctccacatgagtcactgtacctcaatttctgtaaaccagtttcttaaaaaaaaatgggtgcttttaaacacgatctaag

SEQ ID NO: 200305 - DNA, 1026 bp, Zea Mays
gggaaattggttgcttactttcctatctacatggcatacttctatttgggggcttggggctagcgctgctatagcctgttttataaagtcctatcggtgaactcaagaagctagtggaggaaggaaagataaaatacattgggttatccgaagcatctgcatcaacaatccgaagagctcatgcagtccatcctatcaccgcggtacagcttgaatggtcgctatggtctagagatgcagaagaagatataatccccacttgcagagaacttggaattggaatcgtggcttacagtccactaggcagaggtttcttctctagtggagcaaaactagttgactcactatctgagcaggacttccgcaagcatatgcctagatttcagccagagaatctcgacaagaacgctcagatattcgagcgcgtgagcgcgatggcagcacggaaaggatgcacgccatcacagctcgcgttggcctgggttcaccaccaaggaaacgacgtttgccccatacctggcacaacaaaaatcgacaacttcaaccagaacgtgggggcactgtctgtgaagcttacaccggatgagatggctgaactcgagtcgtatgccgcggctggtgaagtcttgggtgaccggtatggcgatcaattggccaacacttggaaggactccgagaccccaccgttatcttcatggaaattttgagtagccagtatctggtattttcaactgcgtcctctgttcgttgacgtatctccgagttgccgggatgcagaagatctccatgtgcactttgcaaaagcatccatatatatgatgttgggagtttatgatgtttggtacagagtgcgtattgtattgcatacttatctcattttgtttttgtgcgtatatgcttaaatgttaaaacctctgacgggatgaccggatgaatagaataaccatgtgtgcattgtatcaagacttcaagagtttctaccatgagtaaaaaaactcgacctgcccagcccccgggcattttaat

SEQ ID NO: 200306 - DNA, 978 bp, Zea Mays
cagcagtgacgtagaagtttccagaagtttgcacacacgcgctccccaaggccccaaatactccctgacgcccttaccctcacaagtcgcagccaggtctctctgtccgccgaagtcctccctcgtcgcgagagacgagtcgcgttcctgttcgccgcccccgccgcccatctcccaatccggactcaggagatcgactcctcctctcggttgaggttgaaggggaaggaactagaaggctactcaagggatggctgaggatgcttctcacggggccagcagctcgactgtgatacctgctgatggtccagagtctaccatcgagatcaacatcaagaccctggattcacaagtccacaaacttcgcgtggataagaatatgttaatatgtgtgttatgcaatggttcgggagagcaagtaataaccgcctcatttttaggcgcctgtttccgttctaaaagagaaggttgttgaagcgactggagttccattggatcagcagcgcttgatttttcgaggaagagtcttgaaggatgaccacctcctatcagaataccatttggaggatgggtatacattgcatctggttgctcggcgtgcagcagaggcccagacttcttctggggcttctgaaggaaacacaaatgctaatgtaaacgttactggaaatggaggattgttggatgatatttccaggagtgttcgggatcttctgggttccttaggtgttgcaatgtctggtggtgtcactaacacggcattttcggttcctttgactagcacaccagaagggcccaataatgtgcctggaagaactcagccaatgaacccagcacaacctggattctcagttctaaatcatcaaatacaagtaacacaacttcatccgccaggagctattcctcgcaatatgattctttgacaactctttcggagtacatggatcgcattgacagagtactacagaataatggtac

SEQ ID NO: 200307 - DNA, 362 bp, Zea Mays
cacgcgctccccaaggccccaaatactccctgacgcccttaccctcacaagtcgcagccaggtctctctgtccgccgaagtcctccctcgtcgcgagagacgagtcgcgttcctgttcgccgcccccgccgcccatctcccaatccggactcaggagatcgactcctcctctcggttgaggttgaaggggaaggaactagaaggctactcaagggatggctgaggatgcttctcacggggccagcagctcgactgtgatacctgctgatggtccagagtctaccatcgagatcaacatcaagaccctggattcacaagtccacaaacttcgcgtggataagaatggagatgcgtcgaaccca

SEQ ID NO: 200308 - DNA, 2818 bp, Zea Mays
agagatgagccagaccattcttggatcaggtttatatggtggtgatggaggatgacccagtcatttcttacaaagtgaaccgcaagcatgtaatgagaggcgacgaagctcagaagtacaagcgagtggccacaacaaagcatgatagcttcctggactcatttctcccagtgggatcttacaagaagctgtacagttacacgcacttgattaatggatttgctcttcatgctgaatctgagaagacagttagaattcttagtggtgcaaaaggagtaagacttatccaagaagacatcaaaatggccaagatgaccacacatacaccaagttacatcggagctactggagtctggccgctcctaggtggtgctgagaattctggtaacggggtggtgattggcatgatcgataccgggattgaccctaagaacccaagctttgctaccagcaacacgtcaagccaggcggaaccaccaccggctagtttcaaaggaatatgtcgtaccggcaatagatttcctccggattcatgcggtggtaagatagtaggagctaggtggtttgcgcgtgctgcccaagcgactggagagttcaacgctacaattcactatgaatctccttatgatccagatggtcatggcagccacaccgcatcgattgctgctgggaatttccatacaccactaatatccagaggctacaactttgggtatgcaagcggcatggcccctggagctcgtcttgcaatctacaaagctgcctatcccttcggtggatacatgtcagatgtgattgctgcagtcgaccaggcggtagaggatggggtcaatgttataagtctttctatggctccttcttcagtttcatctgggccagcgtctttcctcaatttgcttgaggcacagctgctcctcgccaccaaggctggagtgtcggttgttcaggccgttggcaatgcaggacccgatgcaaacacagtcgtctctttcagtccatggatattaagcgttgctgcttcaatgacagaccgcacgtatagaaaatcaatcgtaattggcaatgggaaagtgttctcttgcggcgtcctttcagcaccaacaccaggtgaaacaatgtacccactagcatgggctgatgatgtggtcaatgagaactcgaccgatgggtctgtcaattgccaagatccaagggtgttcatcagacctcttgtccagggaaaggtgatcatctgcatgttcgactcatcaaactactacgaagacgatcccaacctcgccggtgtcatccatacgatcgagagaattggagctgctggcgtcgttgtcactgatcgttcttcgggtgacatcgacattgactatgagcctacatttcccacgacagtcccttccgccatagttctcaggggttccgacatgcgagctctactgaggtactataacaacaacacggttcgagacgaacgtggaaacgtggtcagcttcggagcgactatacggattacggagggacggcgtgcgagctactctggagaagcaccagtggtggccgactactcctcgaggggaccggacgtggagaacgcacagatgcagccggcagaggtgctgaaaccgaacgtcatggcgccagggaacctcgtatggggagcatggagcccgacgagcaacgcgctgccggagatccagggcgaggagtacgcgctcctgtccggcacaagcatggccgcgccgcatgtcgccggggtggcggccctgatcaagcagaggcacccgacgtggagccccgccatggtcatgtcggcgatcatgacgaccgcggacgtgaccgaccgctcgggccggccgctgatggcgaggagcgactccggctccgtggaccccgcgacgccgttcgacatgggcgcgggagccgtgaacgcggcgcgcgcgctggaccccggcctggtgttcgacgccgggtacagcgactacctccggttcctgtgcgcggtgcccggcgtggacgaggccgccctgctgcgcgcggtgggcgcgccgtgcccggccccggccccgccgcgcgcgggggcgccgcgctggtgctcggacctgaacgcggccagcgtgacggtggcgaacctgctggggtcgcggcgcgtggaccggcgggtgacgagcgtgggctcgcagaacgagacgtacatggcgtacgtgcgcgcgcccggcggcgtcgcggtgcgggtggccccctcgcagttcgccatcgcgcccggcgcgacgcgggcactgcggatcgtgctcaacaccaccgcgcccgggaatgcgttcagcttcggggaggtggtgctcaagggcgacaagaagcaccgcgtccggattcccctcgccgtgtaccccgccgcggcactgagcccatgatgaacttgagcgcaagaagagtataccgcttgtagttactctgtaacgtacgcaggcagagagcgcgcgttccagcgtatacgtacacgtagacgtagtacgtacatgtactacccgttacttgctctccaatcgagttgcagttgcagccccgctccaacgtctaattctaaggccctgtttggttttattagtcctaggactaaagtttagtcaagggactaatctttagtccctaccctgtttggttctagagactaaacataagctaaacacagttaaagcagtatacaaatactaaaatgccctcacgcttgcccctgctgcttatacaaacacctgggcgtgcttatacaaacaaaccgagcacgtgcttatacaaacacttgtgcgtgcttatatttcaaatgagcaaa

SEQ ID NO: 200309 - DNA, 1319 bp, Zea Mays
cttggatcaggtgcatgcttcattttactcccctctaattctcacctaacattctttagaggaatcctgttggcgcagttatataagcacatgcgttcaagcgtagcatagaagttctgggaggtttcatacaatcattcagtgacaccgttatggcttttctcaagccatctctcgtgttctgctctattctcacttttctgagcttgaactggggtccatctcatgtgtttgccaaggtttatatggtggtgatggaggatgacccagtcatttcttacaaagtgaaccgcaagcatgtaatgagaggcgacgaagctcagaagtacaagcgagtggccacaacaaagcatgatagcttcctggactcatttctcccagtgggatcttacaagaagctgtacagttacacgcacttgattaatggatttgctcttcatgctgaatctgagaagacagttagaattcttagtggtgcaaaaggagtaagacttatccaagaagacatcaaaatggccaagatgaccacacatacaccaagttacatcggagctactggagtctggccgctcctaggtggtgctgagaattctggtaacggggtggtgattggcatgatcgataccgggattgaccctaagaacccaagctttgctaccagcaacacgtcaagccaggcggaaccaccaccggctagtttcaaaggaatatgtcgtaccggcaatagatttcctccggattcatgcggtggtaagatagtaggagctaggtggtttgcgcgtgctgcccaagcgactggagagttcaacgctacaattcactatgaatctccttatgatccagatggtcatggcagccacaccgcatcgattgctgctgggaatttccatacaccactaatatccagaggctacaactttgggtatgcaagcggcatggcccctggagctcgtcttgcaatctacaaagctgcctatcccttcggtggatacatgtcagatgtgattgctgcagtcgaccaggcggtagaggatggggtcaatgttataagtctttctatggctccttcttcagtttcatctgggccagcgtctttcctcaatttgcttgaggcacagctgctcctcgccaccaaggctggagtgtcggttgttcaggccgttggcaatgcaggacccgatgcaaacacagtcgtctctttcagtccatggatattaagcgttgctgcttcaatgacagaccgcacgtatagaaaatcaatcgtaattggcaatgggaaagtgttctcttgcggcgtcctttcagtgcctgtgttgcca

SEQ ID NO: 200310 - DNA, 2032 bp, Zea Mays
gacatccggtcgtcgtcgtccgccagacgctttaaaacggtttctgctattctgggctttctgtgggttttcgcagcatgggcgtatgctgaggttctcttccataggaagaatactgcttctattaaaactagacattcagatgtcaatctagcagtgatggatgacagttcagtcaaagcagaagaccagacaatgttattggaggagggtggtcaagcaatggctgcaaagccagcttatacttccctcacatcacaaatactcagacttatattcatggaccagttgcttcttctggagaatcgtttaacactgagggcattatctgaatttggaggttatctactttatttttacatatgtgatcgtacaaacttgcttggagagtctgccaagaattacagccgagatctgttccttttcctctactttcttcttatcattgtagcagctatgacttcctttaaggtccatcaagacaagtcatcattcacaggaaaatctgtactgtacttgaataggcatcaaactgaagaatggaagggttggatgcaggtgctattcttgatgtaccattacttcaatgctaaagaaatctacaatgcaatccgtgtgttcatcgctgcatatgtctggatgactggatttggcaatttctcttattattatgtgaggaaggatttcagtcttggaagatttgctcagatgatgtggcgcctcaatttctttgttatattctgctgcattgtcctgaacaatgattatacactctattatatttgtcctatgcacacccttttcaccctcatggtttatggtgctcttggaattctaaacaaatacaacgagattagatcagtgatggcaatgaaatttgttgcttgcttcttggtagttgtcctggtttgggaagttccaggtgtctttgacatagtatggagcccattcacattccttctaggctataccgatccttctaaaccagatcttccccggttgcatgaatggcaatttcgatctggactggatcgctacatttggatcgtggggatgatatatgcatattaccatccaactgttgagaagtggttggagaagctggaagaaactgaaatgagaaccaaactctatattaagacctcaatagttacagtgtcaatgatggctggttatttgtggtatgaatacatttataagctggataagattacttacaacaagttgcatccatatacatcctggatccccataactgtctacatatgtctacgcaacttcactcaagaattcaggggcttctccctcacactatttgcctggcttggaaagattacactagaaacatacatatctcagttccatatctggctcagatcaagtgtgcccaatggccaaccaaaatggctattgtcaataatcccaaattatccactgctcaatttcatgctgactactgctatatatgttgcggtttcccataggctcttcgaattgactaataccttgaagatggtatttgtaccaaatcgtgacaacaagcgcctctcatacaattttgtggcaggaacagccatttctgctgccctgtactttgtatcgtttgttctaattggcattgcaggatactaggaagtctagttattgcctttttctttgttcgattagttacaacaaggcctgatctactgatcaaatttaaggcgacacagcacgcagccacgcactgctaaggaacctgcaatttcattcactggagtcaggttttatctgggtttcatggtgaagaaaaaaaattgctgtgcaaggcagaagatctcgaagagtgtaacatatgagtgaaccccaatcccaagaggggatatgataaaaatatctctgtataggcgttggaacacataccgacttaccgagtggtcacgtcgtctgtgaaaatcagattttgttccttgttttgtttaaaagcttgaaatagacagaattgttccttttttttgtttaaagcgtaaaatagacataatggtctcatgcg

SEQ ID NO: 200311 - DNA, 1904 bp, Zea Mays
aattcactcctttcttcttctcctgcatcaggatcatcatcaggttctccgttccactccatggccttccctgctgtgcccctcctcgccgctctgctcctggtcgccgccacgcggctgtgggactacgtcttcgtgcgcctcgtatggcggccgtacgccatcaccaaggggttcagagagcaagggatccatggaccctcctacaggttcttcaagggctgcaacgaggagatcaggagcatgaaggagaagaccgacggtctcgtgctggacgtcggcgaccacaagtacctcccgcggatcgcgccgcactacctcgaatggagggctcagtacggagaaccatttctatattggtacggggcacaagcccgaatttgcatatttgactacgaactagcaaggcaaatcctttcgagcaagtctgggcatttcgtgaagaacgatgcgcaccctactttgttggctctggtcggcaagggactcgggttcatggaaggctctgactgggtgcgccatcgcagggtgatcaaccctgctttcaccattgacaagcttaagctacaagttaggcaaacaagtgttcgaggcacaaactgagctgctggggatcaccatggctactttccttgacgtgcccataccaggatccaaataccttccaacccaagcgaatcggcgaaaatggatgctggagacgaagctcaagagcttactcacgcggatcatacagccacggttagcaagcggtgagcacggaaacgatctgctgggcgtgatgctggactcctgcactgagaccaagcaaggagggaagcagcagcaagtggatcgtctgcgtctcagcttgagcatggaggagatcatacacgagtgcaagctgttcttcttcgctggccacgagaacacagcccttctcctcacgtggtccgtgtatttgctcagcatataccccgagtggcaagaaaggctccggaaggaggtcttgagggagttcgggagggacgctcctaaccccaacgcgctcaacagattgaaagagatgacaatggtgttgttcgagaccttgaggctctactcgcctgctctcttcatgcaaaggaagaccctggccgacatgaccgtggggccaataaaactgcccaaaggcactgcaattgtgatacccattccgatcatgcatcgagacaagcaggcatggggcgacgacgcagacgagttcagtccgatgagatttgcgaatgggatcacgggagcagcgaaagttcctcacggcctgctggcgttctcgatggggccaaggtcttgcatcggccagaacttgtcgatgctggaagccaagtcgacgctggccctgatgctccgcaagttctccttcgctctctcccctgactacgtgcacgcgcccgtggatctcttcactctcaaacctaagtttggccttcccgtcattctgaggccactggataatgttttgatttgagttgggcatatagtacaacaggaagtaacttaggtacatatcaaatttgctagctggtcaaaacgttatatgatgttctcaaccctccgttgttctatatcgttgaaaacaagtattttaatttaggtgcggtttggtttggcgctgcaagcgaaaatggggacgtaaatccggaattaattatagcaaaacatctcttcaagcttgaagtagttcataaatgaagactggtaaagtgtctgtaagttgctacagattctatttatgtctaagtatagaacataaaacataaaaacacggctgatttgttagctaggtggatgtaaatataggtttagagccaataactatggttcaaatcaccatttgtgcataattttaatatttttattatttaatcactactggaatcttcggc

SEQ ID NO: 200312 - DNA, 2000 bp, Zea Mays
cttgcgttttgatttcacatggcgttggatctctccacgcgtgtcacactgctgcgccgctcgctagcctcggatccagctgcggatcatcatcaggttctccgttccactccatggccttccctgctgtgcccctcctcgccgctctgctcctggtcgccgccacgcggctgtgggactacgtcttcgtgcgcctcgtatggcggccgtacgccatcaccaaggggttcagagagcaagggatccatggaccctcctacaggttcttcaagggctgcaacgaggagatcaggagcatgaaggagaagaccgacggtctcgtgctggacgtcggcgaccacaagtacctcccgcggatcgcgccgcactacctcgaatggagggctcagtacggagaaccatttctatattggtacggggcacaagcccgaatttgcatatttgactacgaactagcaaggcaaatcctttcgagcaagtctgggcatttcgtgaagaacgatgcgcaccctactttgttggctctggtcggcaagggactcgggttcatggaaggctctgactgggtgcgccatcgcagggtgatcaaccctgctttcaccattgacaagcttaagattgtgaccgagacgatgctggacttcgccgatagcatggcagctacaagttaggcaaacaagtgttcgaggcacaaactgagctgctggggatcaccatggctactttccttgacgtgcccataccaggatccaaataccttccaacccaagcgaatcggcgaaaatggatgctggagacgaagctcaagagcttactcacgcggatcatacagccacggttagcaagcggtgagcacggaaacgatctgctgggcgtgatgctggactcctgcactgagaccaagcaaggagggaagcagcagcaagtggatcgtctgcgtctcagcttgagcatggaggagatcatacacgagtgcaagctgttcttcttcgctggccacgagaacacagcccttctcctcacgtggtccgtgtatttgctcagcatataccccgagtggcaagaaaggctccggaaggaggtcttgagggagttcgggagggacgctcctaaccccaacgcgctcaacagattgaaagagatgacaatggtgttgttcgagaccttgaggctctactcgcctgctctcttcatgcaaaggaagaccctggccgacatgaccgtggggccaataaaactgcccaaaggcactgcaattgtgatacccattccgatcatgcatcgagacaagcaggcatggggcgacgacgcagacgagttcagtccgatgagatttgcgaatgggatcacgggagcagcgaaagttcctcacggcctgctggcgttctcgatggggccaaggtcttgcatcggccagaacttgtcgatgctggaagccaagtcgacgctggccctgatgctccgcaagttctccttcgctctctcccctgactacgtgcacgcgcccgtggatctcttcactctcaaacctaagtttggccttcccgtcattctgaggccactggataatgttttgatttgagttgggcatatagtacaacaggaagtaacttaggtacatatcaaatttgctagctggtcaaaacgttatatgatgttctcaaccctccgttgttctatatcgttgaaaacaagtattttaatttaggtgcggtttggtttggcgctgcaagcgaaaatggggacgtaaatccggaattaattatagcaaaacatctcttcaagcttgaagtagttcataaatgaagactggtaaagtgtctgtaagttgctacagattctatttatgtctaagtatagaacataaaacataaaaacacggctgatttgttagctaggtggatgtaaatataggtttagagccaataactatggttcaaatcaccatttgtgcataattttaatatttttattatttaatcactactggaatcttcggc

SEQ ID NO: 200313 - DNA, 2799 bp, Zea Mays
ctgagtttgctttgttttgcatctgggttcagtggaaaagttactgcagtactctctccctcctagcgttccagagcttcggcgtggtgtatggagacttgagcacatcgcctttgtatgtctacagaaactcactgtctgggagactgaacggttaccttgatgagacaaccatctttgggttgttttctctggtgttttggaccttcacacttgttccgttgctgaagtatgtcataattgtcttgagcgcggatgataatggggaagaaaacaccttagcttaggacatgcaactttgtgcaacaagtggagcttttgctttgtactcacttctttgcaggcatgcaaaattcagtctgctgccaaaccagcaagcagcagatgaagagctgtcaacttattaccatccaggcactgatcgagctgtggtttcctctccattcaaaaggtttctggagaagcacaggaagctgcggacctgtttacttctttttgtactgtttggtgcgtgcatggtgataggtgatggtgtctttacaccaactatatctgttctgtcagccatctctggattacaagatcctgccacaagtggactaggagatggatggatcgtattcatcgcatgtgttatgcttgttggtctctttgctctgcagcaccgaggtactcataaggtggcattcttgttcgctccgattattgtgctctggctcttgagcattggtatcattggactatataacatcatccgttggaatcctagaatatttgttgctctttctccacactatattgtaaagtttttcaagaaaactggaaaagatggttggatatctcttggtggggtacttcttgctatcacaggtaccgaagctatgtttgccgatcttggccacttctctgctgcatctatcaggttggcttttgtcagtgtcatatatccctgtcttgtgctgcaatacatgggacaggctgcgtttctgtctaaaaacataccagctgtatataacagtttttatctttctattccaagtcctttattttggcctgtgttcgtcatagcaactcttgctgcaattttgggcagccaagctattatatctgcaaccttttctatcgttaagcagtgccttgccttgggatgctttccacgggtaaaggtcgtgcatacttcaaggtggatccgtggccagatttacatacctgagataaattggattctgatggtcctctgtttagctgtgacacttggcttccgtgacataacagtgataggaaatgcttatggtctcgcgtgcatcactgtgatgtttgtcaccacctgtctgatgtcattggtcatcatcttcgtgtggcaaaagaatctcctcatctccttgctattcttcgtattctttggggcactcgaaggcgcctacctgtctgcagcagtgatgaaggttccccagggaggctgggctccgatcgcgctatccgccgtgttcatgttcatcatgtacgtgtggcactacggcacgcggcggaagtacctgttcgacctccagaacaaggtgtccatgagatggatcctgaacctgggcccgagcctgggcatcgtgcgcgtgcccgggatcggcctcatctacacggagctggtgacgggcgtgccggccatcttctcccacttcgtcaccaacctgccggcgttccaccaggtgctggtcttcgtgtgcgtcaagtccgtgccggtgccgtacgtgcccatggacgagcggtacctcatcgggcggatcggccccagggagtaccgcatgtaccggtgcatcgtcaggtacgggtacaaggacgtgcagaaggacgacgagaacttcgagaacaacctggtgatgagcatcgcccggttcatccagatggaggccgaggagtcggcctcgtcggggacggggaggagctacgagtcgtcgacggagggcaggatggcggtcgtgcacaccaccggcacgacggggaccgggctggtgatgatggcctccgccgaggacgcggaaggcacgtccctgtccaggagcagcaagtcggagacgctccggagcctgcagtccatctacgagcaggagtccgccggcaccgtcagccggcggcggaggagggtgcggttccagatcgacgaggaggagcggatcgagccgcaggtgagggacgagctgtccgacctcctggaggccaaggaggccggcgcggcctacatcatcggccactcgtacgtgaaggcgaggaagaactccaatttcctcaagacgttcgccatcaactacgcctactccttcctccggaagaactgcagggggccgtcggtgacgctgcacatcccccacatcagcctcatcgaggtcggcatgatctactacgtgtaagtgtaacccaggcggcctgccctcaaagtcaaagcagcacggggggattttcattttctttcgggtgatacgatatgcttgttttggacccagacttactgctggagatactctctccgtttctttttatttgtcgctggatagtgtaaaattacagtatccagcgacaaaaataaaaagaaacagatgaagtaattagttagttttgtctctgctctgcaccgtatctgtatcgtagtttcatcaaggtggtggcataagacacacagtagccgaatcggccggttgccaccgtttgttcaccagagctttcggtaaccctttgtaaatagattctgttcatcatggaaattaagcattgtagcttgtcaataggctacagctagcatacagatttgag

SEQ ID NO: 200314 - DNA, 2996 bp, Zea Mays
ctctcccccctccttcgtctcgacggcctcgcctgtatataaactagacgaggggaagcttccctcctccgccttatcccgccgttttgtagtggcttcgtctttagcttgggcctcgcttccacttcgtagctgcctacgcgctcgcgactcgcctggtcgcttccggttgaagggccgggccgcaatggacgaagaggtcggcgccgccgggcggcagcaggttcagtggaaaagttactgcagtactctctccctcctagcgttccagagcttcggcgtggtgtatggagacttgagcacatcgcctttgtatgtctacagaaactcactgtctgggagactgaacggttaccttgatgagacaaccatctttgggttgttttctctggtgttttggaccttcacacttgttccgttgctgaagtatgtcataattgtcttgagcgcggatgataatggggaagaaaacaccttagcttaggacatgcaactttgtgcaacaagtggagcttttgctttgtactcacttctttgcaggcatgcaaaattcagtctgctgccaaaccagcaagcagcagatgaagagctgtcaacttattaccatccaggcactgatcgagctgtggtttcctctccattcaaaaggtttctggagaagcacaggaagctgcggacctgtttacttctttttgtactgtttggtgcgtgcatggtgataggtgatggtgtctttacaccaactatatctgttctgtcagccatctctggattacaagatcctgccacaagtggactaggagatggatggatcgtattcatcgcatgtgttatgcttgttggtctctttgctctgcagcaccgaggtactcataaggtggcattcttgttcgctccgattattgtgctctggctcttgagcattggtatcattggactatataacatcatccgttggaatcctagaatatttgttgctctttctccacactatattgtaaagtttttcaagaaaactggaaaagatggttggatatctcttggtggggtacttcttgctatcacaggtaccgaagctatgtttgccgatcttggccacttctctgctgcatctatcaggttggcttttgtcagtgtcatatatccctgtcttgtgctgcaatacatgggacaggctgcgtttctgtctaaaaacataccagctgtatataacagtttttatctttctattccaagtcctttattttggcctgtgttcgtcatagcaactcttgctgcaattttgggcagccaagctattatatctgcaaccttttctatcgttaagcagtgccttgccttgggatgctttccacgggtaaaggtcgtgcatacttcaaggtggatccgtggccagatttacatacctgagataaattggattctgatggtcctctgtttagctgtgacacttggcttccgtgacataacagtgataggaaatgcttatggtctcgcgtgcatcactgtgatgtttgtcaccacctgtctgatgtcattggtcatcatcttcgtgtggcaaaagaatctcctcatctccttgctattcttcgtattctttggggcactcgaaggcgcctacctgtctgcagcagtgatgaaggttccccagggaggctgggctccgatcgcgctatccgccgtgttcatgttcatcatgtacgtgtggcactacggcacgcggcggaagtacctgttcgacctccagaacaaggtgtccatgagatggatcctgaacctgggcccgagcctgggcatcgtgcgcgtgcccgggatcggcctcatctacacggagctggtgacgggcgtgccggccatcttctcccacttcgtcaccaacctgccggcgttccaccaggtgctggtcttcgtgtgcgtcaagtccgtgccggtgccgtacgtgcccatggacgagcggtacctcatcgggcggatcggccccagggagtaccgcatgtaccggtgcatcgtcaggtacgggtacaaggacgtgcagaaggacgacgagaacttcgagaacaacctggtgatgagcatcgcccggttcatccagatggaggccgaggagtcggcctcgtcggggacggggaggagctacgagtcgtcgacggagggcaggatggcggtcgtgcacaccaccggcacgacggggaccgggctggtgatgatggcctccgccgaggacgcggaaggcacgtccctgtccaggagcagcaagtcggagacgctccggagcctgcagtccatctacgagcaggagtccgccggcaccgtcagccggcggcggaggagggtgcggttccagatcgacgaggaggagcggatcgagccgcaggtgagggacgagctgtccgacctcctggaggccaaggaggccggcgcggcctacatcatcggccactcgtacgtgaaggcgaggaagaactccaatttcctcaagacgttcgccatcaactacgcctactccttcctccggaagaactgcagggggccgtcggtgacgctgcacatcccccacatcagcctcatcgaggtcggcatgatctactacgtgtaagtgtaacccaggcggcctgccctcaaagtcaaagcagcacggggggattttcattttctttcgggtgatacgatatgcttgttttggacccagacttactgctggagatactctctccgtttctttttatttgtcgctggatagtgtaaaattacagtatccagcgacaaaaataaaaagaaacagatgaagtaattagttagttttgtctctgctctgcaccgtatctgtatcgtagtttcatcaaggtggtggcataagacacacagtagccgaatcggccggttgccaccgtttgttcaccagagctttcggtaaccctttgtaaatagattctgttcatcatggaaattaagcattgtagcttgtcaataggctacagctagcatacagatttgag

SEQ ID NO: 200315 - DNA, 2950 bp, Zea Mays
tgggcatcaagctccatccaattttcccccgcgctctcctgttaagctctcccccctccttcgtctcgacggcctcgcctgtatataaactagacgaggggaagcttccctcctccgccttatcccgccgttttgtagtggcttcgtctttagcttgggcctcgcttccacttcgtagctgcctacgcgctcgcgactcgcctggtcgcttccggttgaagggccgggccgcaatggacgaagaggtcggcgccgccgggcggcagcaggttcagtggaaaagttactgcagtactctctccctcctagcgttccagagcttcggcgtggtgtatggagacttgagcacatcgcctttgtatgtctacagaaactcactgtctgggagactgaacggttaccttgatgagacaaccatctttgggttgttttctctggtgttttggaccttcacacttgttccgttgctgaagtatgtcataattgtcttgagcgcggatgataatggggaaggtggagcttttgctttgtactcacttctttgcaggcatgcaaaattcagtctgctgccaaaccagcaagcagcagatgaagagctgtcaacttattaccatccaggcactgatcgagctgtggtttcctctccattcaaaaggtttctggagaagcacaggaagctgcggacctgtttacttctttttgtactgtttggtgcgtgcatggtgataggtgatggtgtctttacaccaactatatctgttctgtcagccatctctggattacaagatcctgccacaagtggactaggagatgcaccgaggtactcataaggtggcattcttgttcgctccgattattgtgctctggctcttgagcattggtatcattggactatataacatcatccgttggaatcctagaatatttgttgctctttctccacactatattgtaaagtttttcaagaaaactggaaaagatggttggatatctcttggtggggtacttcttgctatcacaggtaccgaagctatgtttgccgatcttggccacttctctgctgcatctatcaggttggcttttgtcagtgtcatatatccctgtcttgtgctgcaatacatgggacaggctgcgtttctgtctaaaaacataccagctgtatataacagtttttatctttctattccaagtcctttattttggcctgtgttcgtcatagcaactcttgctgcaattttgggcagccaagctattatatctgcaaccttttctatcgttaagcagtgccttgccttgggatgctttccacgggtaaaggtcgtgcatacttcaaggtggatccgtggccagatttacatacctgagataaattggattctgatggtcctctgtttagctgtgacacttggcttccgtgacataacagtgataggaaatgcttatggtctcgcgtgcatcactgtgatgtttgtcaccacctgtctgatgtcattggtcatcatcttcgtgtggcaaaagaatctcctcatctccttgctattcttcgtattctttggggcactcgaaggcgcctacctgtctgcagcagtgatgaaggttccccagggaggctgggctccgatcgcgctatccgccgtgttcatgttcatcatgtacgtgtggcactacggcacgcggcggaagtacctgttcgacctccagaacaaggtgtccatgagatggatcctgaacctgggcccgagcctgggcatcgtgcgcgtgcccgggatcggcctcatctacacggagctggtgacgggcgtgccggccatcttctcccacttcgtcaccaacctgccggcgttccaccaggtgctggtcttcgtgtgcgtcaagtccgtgccggtgccgtacgtgcccatggacgagcggtacctcatcgggcggatcggccccagggagtaccgcatgtaccggtgcatcgtcaggtacgggtacaaggacgtgcagaaggacgacgagaacttcgagaacaacctggtgatgagcatcgcccggttcatccagatggaggccgaggagtcggcctcgtcggggacggggaggagctacgagtcgtcgacggagggcaggatggcggtcgtgcacaccaccggcacgacggggaccgggctggtgatgatggcctccgccgaggacgcggaaggcacgtccctgtccaggagcagcaagtcggagacgctccggagcctgcagtccatctacgagcaggagtccgccggcaccgtcagccggcggcggaggagggtgcggttccagatcgacgaggaggagcggatcgagccgcaggtgagggacgagctgtccgacctcctggaggccaaggaggccggcgcggcctacatcatcggccactcgtacgtgaaggcgaggaagaactccaatttcctcaagacgttcgccatcaactacgcctactccttcctccggaagaactgcagggggccgtcggtgacgctgcacatcccccacatcagcctcatcgaggtcggcatgatctactacgtgtaagtgtaacccaggcggcctgccctcaaagtcaaagcagcacggggggattttcattttctttcgggtgatacgatatgcttgttttggacccagacttactgctggagatactctctccgtttctttttatttgtcgctggatagtgtaaaattacagtatccagcgacaaaaataaaaagaaacagatgaagtaattagttagttttgtctctgctctgcaccgtatctgtatcgtagtttcatcaaggtggtggcataagacacacagtagccgaatcggccggttgccaccgtttgttcaccagagctttcggtaaccctttgtaaatagattctgttcatcatggaaattaagcattgtagcttgtcaataggctacagctagcatacagatttgag

SEQ ID NO: 200316 - DNA, 3588 bp, Zea Mays
ctacgccacgccagacgcccagacggcgacgtgggcatcaagctccatccaattttcccccgcgctctcctgttaagctctcccccctccttcgtctcgacggcctcgcctgtatataaactagacgaggggaagcttccctcctccgccttatcccgccgttttgtagtggcttcgtctttagcttgggcctcgcttccacttcgtagctgcctacgcgctcgcgactcgcctggtcgcttccggttgaagggccgggccgcaatggacgaagaggtcggcgccgccgggcggcagcaggttcagtggaaaagttactgcagtactctctccctcctagcgttccagagcttcggcgtggtgtatggagacttgagcacatcgcctttgtatgtctacagaaactcactgtctgggagactgaacggttaccttgatgagacaaccatctttgggttgttttctctggtgttttggaccttcacacttgttccgttgctgaagtatgtcataattgtcttgagcgcggatgataatggggaaggtggagcttttgctttgtactcacttctttgcaggcatgcaaaattcagtctgctgccaaaccagcaagcagcagatgaagagctgtcaacttattaccatccaggcactgatcgagctgtggtttcctctccattcaaaaggtttctggagaagcacaggaagctgcggacctgtttacttctttttgtactgtttggtgcgtgcatggtgataggtgatggtgtctttacaccaactatatctgttctgtcagccatctctggattacaagatcctgccacaagtggactaggagatggatggatcgtattcatcgcatgtgttatgcttgttggtctctttgctctgcagcaccgaggtactcataaggtggcattcttgttcgctccgattattgtgctctggctcttgagcattggtatcattggactatataacatcatccgttggaatcctagaatatttgttgctctttctccacactatattgtaaagtttttcaagaaaactggaaaagatggttggatatctcttggtggggtacttcttgctatcacaggtaccgaagctatgtttgccgatcttggccacttctctgctgcatctatcaggttggcttttgtcagtgtcatatatccctgtcttgtgctgcaatacatgggacaggctgcgtttctgtctaaaaacataccagctgtatataacagtttttatctttctattccaagtcctttattttggcctgtgttcgtcatagcaactcttgctgcaattttgggcagccaagctattatatctgcaaccttttctatcgttaagcagtgccttgccttgggatgctttccacgggtaaaggtcgtgcatacttcaaggtggatccgtggccagatttacatacctgagataaattggattctgatggtcctctgtttagctgtgacacttggcttccgtgacataacagtgataggaaatgcttatggtaagcccctgaccatttcagtactgcataaactgggcaagtcctaccaagcgcatggattttattttggaaccatatggtgcttccgtttacgtcacctgcaaattctccatttcattcaagaccctaagtttaagccgttttcaactttgtggttgatatagacagtgcaccctctcattttgaccactaattgctatcatataccccgtacatttgtaccgtcacttttagttaaacaaatcaaatatcaatgaaatgtgcaactctatattttgcactaggcaattactgcgttttgcaacttatgaaggccagctgttattttttttcctttctatattagaaaccaaagctgccaattttcttggataggttgtaagtacggtgctcataactttggaggtggatagtcagtttgttggttctagcattctctccatatcttgatgcacattacatcgatattctctgccatcatatttttcacgaattcctcacactgaatcaaccatcggtgaataccgctcccttcgttggtatgatgatttcaggtctcgcgtgcatcactgtgatgtttgtcaccacctgtctgatgtcattggtcatcatcttcgtgtggcaaaagaatctcctcatctccttgctattcttcgtattctttggggcactcgaaggcgcctacctgtctgcagcagtgatgaaggttccccagggaggctgggctccgatcgcgctatccgccgtgttcatgttcatcatgtacgtgtggcactacggcacgcggcggaagtacctgttcgacctccagaacaaggtgtccatgagatggatcctgaacctgggcccgagcctgggcatcgtgcgcgtgcccgggatcggcctcatctacacggagctggtgacgggcgtgccggccatcttctcccacttcgtcaccaacctgccggcgttccaccaggtgctggtcttcgtgtgcgtcaagtccgtgccggtgccgtacgtgcccatggacgagcggtacctcatcgggcggatcggccccagggagtaccgcatgtaccggtgcatcgtcaggtacgggtacaaggacgtgcagaaggacgacgagaacttcgagaacaacctggtgatgagcatcgcccggttcatccagatggaggccgaggagtcggcctcgtcggggacggggaggagctacgagtcgtcgacggagggcaggatggcggtcgtgcacaccaccggcacgacggggaccgggctggtgatgatggcctccgccgaggacgcggaaggcacgtccctgtccaggagcagcaagtcggagacgctccggagcctgcagtccatctacgagcaggagtccgccggcaccgtcagccggcggcggaggagggtgcggttccagatcgacgaggaggagcggatcgagccgcaggtgagggacgagctgtccgacctcctggaggccaaggaggccggcgcggcctacatcatcggccactcgtacgtgaaggcgaggaagaactccaatttcctcaagacgttcgccatcaactacgcctactccttcctccggaagaactgcagggggccgtcggtgacgctgcacatcccccacatcagcctcatcgaggtcggcatgatctactacgtgtaagtgtaacccaggcggcctgccctcaaagtcaaagcagcacggggggattttcattttctttcgggtgatacgatatgcttgttttggacccagacttactgctggagatactctctccgtttctttttatttgtcgctggatagtgtaaaattacagtatccagcgacaaaaataaaaagaaacagatgaagtaattagttagttttgtctctgctctgcaccgtatctgtatcgtagtttcatcaaggtggtggcataagacacacagtagccgaatcggccggttgccaccgtttgttcaccagagctttcggtaaccctttgtaaatagattctgttcatcatggaaattaagcattgtagcttgtcaataggctacagctagcatacagatttgag

SEQ ID NO: 200317 - DNA, 2968 bp, Zea Mays
cgggtttgcaggtctacgccacgccagacgcccagacggcgacgtgggcatcaagctccatccaattttcccccgcgctctcctgttaagctctcccccctccttcgtctcgacggcctcgcctgtatataaactagacgaggggaagcttccctcctccgccttatcccgccgttttgtagtggcttcgtctttagcttgggcctcgcttccacttcgtagctgcctacgcgctcgcgactcgcctggtcgcttccggttgaagggccgggccgcaatggacgaagaggtcggcgccgccgggcggcagcaggttcagtggaaaagttactgcagtactctctccctcctagcgttccagagcttcggcgtggtgtatggagacttgagcacatcgcctttgtatgtctacagaaactcactgtctgggagactgaacggttaccttgatgagacaaccatctttgggttgttttctctggtgttttggaccttcacacttgttccgttgctgaagtatgtcataattgtcttgagcgcggatgataatggggaaggtggagcttttgctttgtactcacttctttgcaggcatgcaaaattcagtctgctgccaaaccagcaagcagcagatgaagagctgtcaacttattaccatccaggcactgatcgagctgtggtttcctctccattcaaaaggtttctggagaagcacaggaagctgcggacctgtttacttctttttgtactgtttggtgcgtgcatggtgataggtgatggtgtctttacaccaactatatctgttctgtcagccatctctggattacaagatcctgccacaagtggactaggagatggatggatcgtattcatcgcatgtgttatgcttgttggtctctttgctctgcagcaccgaggtactcataaggtggcattcttgttcgctccgattattgtgctctggctcttgagcattggtatcattggactatataacatcatccgttggaatcctagaatatttgttgctctttctccacactatattgtaaagtttttcaagaaaactggaaaagatggttggatatctcttggtggggtacttcttgctatcacaggtaccgaagctatgtttgccgatcttggccacttctctgctgcatctatcaggttggcttttgtcagtgtcatatatccctgtcttgtgctgcaatacatgggacaggctgcgtttctgtctaaaaacataccagctgtatataacagtttttatctttctattccaagtcctttattttggcctgtgttcgtcatagcaactcttgctgcaattttgggcagccaagctattatatctgcaaccttttctatcgttaagcagtgccttgccttgggatgctttccacgggtaaaggtcgtgcatacttcaaggtggatccgtggccagatttacatacctgagataaattggattctgatggtcctctgtttagctgtgacacttggcttccgtgacataacagtgataggaaatgcttatggtctcgcgtgcatcactgtgatgtttgtcaccacctgtctgatgtcattggtcatcatcttcgtgtggcaaaagaatctcctcatctccttgctattcttcgtattctttggggcactcgaaggcgcctacctgtctgcagcagtgatgaaggttccccagggaggctgggctccgatcgcgctatccgccgtgttcatgttcatcatgtacgtgtggcactacggcacgcggcggaagtacctgttcgacctccagaacaaggtgtccatgagatggatcctgaacctgggcccgagcctgggcatcgtgcgcgtgcccgggatcggcctcatctacacggagctggtgacgggcgtgccggccatcttctcccacttcgtcaccaacctgccggcgttccaccaggtgctggtcttcgtgtgcgtcaagtccgtgccggtgccgtacgtgcccatggacgagcggtacctcatcgggcggatcggccccagggagtaccgcatgtaccggtgcatcgtcagatggaggccgaggagtcggcctcgtcggggacggggaggagctacgagtcgtcgacggagggcaggatggcggtcgtgcacaccaccggcacgacggggaccgggctggtgatgatggcctccgccgaggacgcggaaggcacgtccctgtccaggagcagcaagtcggagacgctccggagcctgcagtccatctacgagcaggagtccgccggcaccgtcagccggcggcggaggagggtgcggttccagatcgacgaggaggagcggatcgagccgcaggtgagggacgagctgtccgacctcctggaggccaaggaggccggcgcggcctacatcatcggccactcgtacgtgaaggcgaggaagaactccaatttcctcaagacgttcgccatcaactacgcctactccttcctccggaagaactgcagggggccgtcggtgacgctgcacatcccccacatcagcctcatcgaggtcggcatgatctactacgtgtaagtgtaacccaggcggcctgccctcaaagtcaaagcagcacggggggattttcattttctttcgggtgatacgatatgcttgttttggacccagacttactgctggagatactctctccgtttctttttatttgtcgctggatagtgtaaaattacagtatccagcgacaaaaataaaaagaaacagatgaagtaattagttagttttgtctctgctctgcaccgtatctgtatcgtagtttcatcaaggtggtggcataagacacacagtagccgaatcggccggttgccaccgtttgttcaccagagctttcggtaaccctttgtaaatagattctgttcatcatggaaattaagcattgtagcttgtcaataggctacagctagcatacagatttgag

SEQ ID NO: 200318 - DNA, 2318 bp, Zea Mays
gccacggcccaatcgccggctgacactcacaagaacctgcctccctcggtctggatcgctatctcttttctagcggctccagagggagggaaagctagcgcacagccgagagaagaaagcagagagggagggagaacaaagagagagagaaaaaaaaaaccagagaggttgagcaagaaccgaggcggatccgccttttgtccctcctgcccgagggctagcctgccgccgcccccgcgagagatcgagaggaggcgctgttcagttcaggtgaaattttgccttgttctgggtggggtctctcgggctctctgtggtgtttggtggtgtaaattggagtgggatttagaggtagttaggtctcgtctgctaggataggtgcggtggtctcgttaatttgtgggctccggaggtcaatttgttcacgatcccggtcctgttcgcggttcagttcaggagcgagtgttcctgagcccaatctaattcgtccataaagtcgatcccttaggtcgaggacaataacctgtttgcagctggttccaggtttcacttgcaaaagatgcgccttgatatctcctccaatcccatgttcatcttatatgatttgatttctagcgacgacaagaatttgtgttcagagagagagagggggcgggggagagagagagaaatcctttaataattgttacagtgctctcggaatctttatcttgttctgagtgagatgcccaaaaaggcaaagggaaatctaacctttcttccagtcctgtgattccttcctacaggggggtgagaagccgtgggggaagagatgatgcgggagacgtacatggacgtgctgccgccggtggaccacatagccgcctcacggagcggcggctggttcccgggcgcggcgcgtctctggacggcggcggagaacaagcagttcgagcgggcgctggccgggctcgacctctgccgcccggactgggagaaggtggcgcgggccatcccgggccggacggtgcgcgaggtcgtcagccacttcaagagcctccaggtcgacgtccagcagatcgagagcggcctggtgcccatgccggtctacggcgccggggccggctcgttcaccctgcagtgggacggctgctacggccccgcggactcgaggcacaacggctaccgcttcggaagcggaggctgcgggaggcggcaccacggccgcaccccggagcaggaccggaagaagggcgtgccgtggacggaggaggagcacaggctgttcctcttaggcctgaagaaatacggcaagggggactggaggaacatatcgcgcaactacgtccagacgcggacgcccacgcaggtggccagccacgcgcagaagtacttcatcaggctcaactccggcggcaaggacaagaggaggtccagcatccacgacatcaccacggtgaacctgacggacgacgagcgggcgccctcgccgtcgcggtcctctctgatcaccaccaccagccagccaaacgcgccggctccggccgcagcggtgataggcgggcccttctcgtcggcggcggcggccgaggccaagcagcaccagcacggcgctgggaacctgccaccgaaccggacctccgtggtgccggctgtttacaggatggacgattcgcaggaccacggcctgcagtgtggccctctgcgtcatcaactggtcgccagccaccacagcgttctgttttaggcgcaagcgcaatcccactttgaggcgcgccatggtcatggatccatccatcaggtgttgtctagtgtgtgtgtgtacgatgcgtgtgttctttgctgtagcttcagcgcctgtatcgaagtgattagccttttggggagggggggcgtaacggaaaggggatcttcggttccacggtggtccaggtccacaatttgttgttggtgatgccgagaacgtaacaaaaaaaaggacgccaagaattctgagtggacttggcattcaatcatggaccctgcttttgctcgccgtggcccgggatgatcagcagaacctaattctggatccttcttggtcggctgatgtatcccttgagtgaccttggtgaccatctcatcctgctgctgtctctgaagacggcgacgcgcttgtattggagggtttcagagttcagatcacattgctgtagtgtagtctagacatgtttacccatagtacgtaatcagtttttttttttggcactggcggctgccgaaatctgtgtctggacaggcttcatttctctcggatgaagagaagataaaaaacgaaatcgagtttgcgatgagtcatg

SEQ ID NO: 200319 - DNA, 2187 bp, Zea Mays
gccacggcccaatcgccggctgacactcacaagaacctgcctccctcggtctggatcgctatctcttttctagcggctccagagggagggaaagctagcgcacagccgagagaagaaagcagagagggagggagaacaaagagagagagaaaaaaaaaaccagagaggttgagcaagaaccgaggcggatccgccttttgtccctcctgcccgagggctagcctgccgccgcccccgcgagagatcgagaggaggcgctgttcagttcagtcctgtgattccttcctacaggggggtgagaagccgtgggggaagagatgatgcgggagacgtacatggacgtgctgccgccggtggaccacatagccgcctcacggagcggcggctggttcccgggcgcggcgcgtctctggacggcggcggagaacaagcagttcgagcgggcgctggccgggctcgacctctgccgcccggactgggagaaggtggcgcgggccatcccgggccggacggtgcgcgaggtcgtcagccacttcaagagcctccaggtcgacgtccagcagatcgagagcggcctggtgcccatgccggtctacggcgccggggccggctcgttcaccctgcagtgggacggctgctacggccccgcggactcgaggcacaacggctaccgcttcggaagcggaggctgcgggaggcggcaccacggccgcaccccggagcaggaccggaagaagggcgtgccgtggacggaggaggagcacaggtgagtgtatgctgctgcatacgatacgatacgacttctgttatgttctgagagcgattgctctgcgtcgtcatgcggaagattggcgggagtttccgtcttggatagatagttgaatttcgccatcgttcagttgggtttacatcatctgagtacatttgcaacttgcaattaatcaactgtcaacagttaatcgcatttaatccctggaactttccttatcgagtaggatccgactctctaggacagtcatgtactactagcttgttgcacatatgatggccagcaaagcaagaactgatcaaaagttagtagcactgaacaagatcacgttttttttgtggttgatgttcttggggccaggctgttcctcttaggcctgaagaaatacggcaagggggactggaggaacatatcgcgcaactacgtccagacgcggacgcccacgcaggtggccagccacgcgcagaagtacttcatcaggctcaactccggcggcaaggacaagaggaggtccagcatccacgacatcaccacggtgaacctgacggacgacgagcgggcgccctcgccgtcgcggtcctctctgatcaccaccaccagccagccaaacgcgccggctccggccgcagcggtgataggcgggcccttctcgtcggcggcggcggccgaggccaagcagcaccagcacggcgctgggaacctgccaccgaaccggacctccgtggtgccggctgtttacaggatggacgattcgcaggaccacggcctgcagtgtggccctctgcgtcatcaactggtcgccagccaccacagcgttctgttttaggcgcaagcgcaatcccactttgaggcgcgccatggtcatggatccatccatcaggtgttgtctagtgtgtgtgtgtacgatgcgtgtgttctttgctgtagcttcagcgcctgtatcgaagtgattagccttttggggagggggggcgtaacggaaaggggatcttcggttccacggtggtccaggtccacaatttgttgttggtgatgccgagaacgtaacaaaaaaaaggacgccaagaattctgagtggacttggcattcaatcatggaccctgcttttgctcgccgtggcccgggatgatcagcagaacctaattctggatccttcttggtcggctgatgtatcccttgagtgaccttggtgaccatctcatcctgctgctgtctctgaagacggcgacgcgcttgtattggagggtttcagagttcagatcacattgctgtagtgtagtctagacatgtttacccatagtacgtaatcagtttttttttttggcactggcggctgccgaaatctgtgtctggacaggcttcatttctctcggatgaagagaagataaaaaacgaaatcgagtttgcgatgagtcatg

SEQ ID NO: 200320 - DNA, 479 bp, Zea Mays
cgcggttcatgggaccgtgagaaactcggctacacctgcaaaatggatatggcaatggcttccttcgtcgccgctacgcaccaccacggcagtcacctggccgccggcttcccctactccgcgcgagcaggcaggagcgttggccgcagcggcgtcaccatctccattagagcccagaagagaaggtgagaaaggtaagggagaatgggaagatcatatgcctggatattaatcagctgatgttatctcaagagaatagatttgcgttcaccatggaggtggctgaagaagctaatgcctatcttgagaagaacaggcatgaatatgggttaaagaagcctatactgcatgttctcagtgatcgcatgaatgaatctgggttttctcggcctgagggttacctttatccttatcctatcaagcctggcccttatttcattaaagaggaaggaaactgagtaaatcacatgctacttggt

SEQ ID NO: 200321 - DNA, 472 bp, Zea Mays
gtaaaatatcactttatgaatacaaataagctaaaataaactagtatttgttagttagcttgtttcagcttatttataattttaaaataatattttatcctcttacgtttttaccataatctaacttatataatacagaagaaaagtaaacaagttttgttcgattattttaattttatgtggattggaatgaattgacatgaattttgacttgcgataaatttaaaatgacttaataccacataatatacatagactaagggtgaaacgcggttcatgggaccgtgagaaactcggctacacctgcaaaatggatatggcaatggcttccttcgtcgccgctacgcaccaccacggcagtcacctggccgccggcttcccctactccgcgcgagcaggcaggagcgttggccgcagcggcgtcaccatctccattagagcccagaagaagagtaatagcgacttctgggag

SEQ ID NO: 200322 - DNA, 3498 bp, Zea Mays
ccagaccccgtggttcgtactccaatattccctgcacaggctccagcggtcgcctcgcgaccccgacccacctccccgcagcctcactcatctcccccgcccacttgccccacgcctccgggctgcgacctccatccatccatccatgtataaagccgccaacgcccgcctcctcctcagatccctctcccccaactcagctgcgctagcctccgtcaacccgggccgcgccgcctcctccgcccgcctcgcgctctcgctgccgtgcggcgcgtgggtcggccgaagcgggctcgtccgccgcgccgccgccttctccgggacacggccgcgtttcgcgggcgccagggcgcagatcggggccgccgtgcctgccgtcgagcagttccagcgcaggatggcaacccaagctactgtgcatgccttcaaggatattctgaccagcctccctaagcctggaggtggtgaatatggaaagttctacagccttcctgcactaaatgatccaaggattgataagctgccgtactccgtccgtattcttcttgagtcagctatccgtaactgtgataacttccaagttaccaagaatgatgttgagaaaataattgactgggaaaacacatctccaaagctggccgagataccattcaagccagctcgagttcttcttcaggacttcactggagttccagcagttgttgatcttgcagctatgcgtgatgcgatggccaagttgggcagtgatgcgaacaagattaacccattggtcccggtggatcttgttattgatcactcagtgcaggtggatgtagcaaggtcgcagaatgccgtacaagcaaacatggaactggaatttagtcgcaacaaggaaagatttggtttccttaaatggggctctagtgctttccaaaatatgctagttgttcctcctggttctggtattgtgcaccaggtcaatcttgagtatcttggcagagttgttttcaacacagatggcattctctatcctgacagcgtagttggtactgattcacacaccactatgattgatggtttgggtgttgctggctggggggttggtggtatagaagcggaggctacaatgcttggtcagccaatgagcatggttttgcctggtgttgttggcttcaagttaactgggaagttacggagtggtgtcacggccactgatcttgttcttacagtaacacaaatgctaaggaaacatggtgttgttggcaaatttgttgaattctatggtgaaggtatgggtaagctgtctttagctgacagggccacaattgcgaacatgtcaccagaatatggagctaccatgggcttctttcctgtggaccatgtgacattggattaccttaaactgacaggccgcagtgatgaaactgtgtcaatgattgaagcatacctgcgagccaataaaatgtttgtggactacaatgagcctccaacagagagaatatactcatcttatcttgagctgaaccttgatgaggtggagcctagcatgtctggcccaaagaggcctcatgatcgtgtccctttgaaggaaatgaaatcagattggcatgcttgcctggacaacaaagttgggttcaagggttttgcagtgccaaaggagcagcaggataaggttgtcaaatttgactttcatgggcagccagcagaaatgaagcatggtagtgttgttatagcagcaataactagctgcacaaacacctcaaatcctagtgttatgcttggtgctggtcttgtagctaagaaagcttgcgagttgggtcttgaggttaaaccatgggtgaagacaagccttgcccctggatcaggagttgtcacgaagtacttgcttcagagtggtcttcaagaatacctcaaccagcaaggattccatatcgttggctatggctgtaccacttgcattggaaactctggtgatctcgatgaatctgtatcaactgccattacagaaaatgatgttgttgctgctgctgttttgtcgggtaaccgtaacttcgagggtcgtgtgcaccctttaactcgggctaactatcttgcttcgccacctcttgttgttgcttatgcacttgccggaactgttgatattgattttgagaaagagcccattggatttggaaaggatggcaaggaagtctacttcagggatatatggccctcgacagaagaaattgcgcaggttgtccaatccagtgtgctgcctgacatgttcaagggcacctatgaggctatcacaaaaggcaacccaatgtggaaccagctaactgtcccagaagcatcactctactcatgggattccaaatccacttacattcatgagcccccttactttaaggacatgaccatgtccccacctggcccctctacagtgaaagatgcctactgcttgctgaacttcggggacagcattactacagatcacatttcacctgcaggaagcatacacaaagacagtcctgctgccaagtatttgatggagcgtggtgtggaccggaaggacttcaactcatatggtagccgtcgtggtaatgatgaagtaatggcaaggggaacgtttgcaaacattaggatcgtgaacaagtttttgaacggagaagttggacccaagaccattcatgttcctactggggagaagctttctgtttttgatgcggccatgagatacaaatctgagggccatgctactataatcctcgctggcgctgagtatggaagcggcagttctcgtgattgggctgctaaggggagttaaagctgtaattgccaagagctttgagcgtatccacagaagcaacttggtggggatgggaatcattcctctgtgcttcaaagctggtgaggatgctgattcacttggcctcactggacatgagcggtacagcatcgatctccctaccaacctcagtgagatccgtcccggccaggatgtgactgttactaccgacaatgggaaatctttcacttgcatcgttcgctttgacactgaggtggagctggcgtacttcaaccatggaggcatcctcccttatgtcatccgcaacttggcagctgcgcataactgaggcaagatcacacaccgtttgacccacaatggcagtggcaggctccatgttcccagggctagcgacctggttctcaatgtagtgacatttgtgatggatctaggggtctctttgtcgattcagcccataaataaagtgtgaaataaaagccgcaggtggaggcaggaacctgctgattgagggaacagttttgcctgtgtttggttacatgaaatatctgtttcacagatgtgtagagcatggtgtaaatgcttcctgtgctgttactttcgtttcgacaaattgattatgctgtagcccttcaggtttcatctagacatttcggtgtcttggagcacattcttttttctgataaaaaaagggaaacaaaggcaaaggagaaccgaaaaacgacgaaacgggg

SEQ ID NO: 200323 - DNA, 1331 bp, Zea Mays
ctccctccatccatcacgctcccccagaccttcgcctcccgactccgcgcgccgcccgccgccgcgccgtgggcgcagcagcacccggcctcgcggatctaccgcgtctcccgggcctccggcggcaaggaccgccacagcaaggtgtacacggccaagggcatcagggaccgccgcgtccgcctctccgttgccaccgccatccagttctacgacctgcaggaccgcctcggctacgaccagcccagcaaggccatcgagtggctcatcagggccgctgccgaggccatcgacaagctcccctcgctcgacgccgccgcgggcttccccgcgcacccggcctccgccaaggaccacgccccgcctgtcggtgacgacgacgaccaccaccaccagcagcagcagcagctcacgaggtccggatgcagcagcacgtccgagaccagcaagggctccgtcctctccctctcccgctccgagagccgggtcaaggcgcgggagcgcgcaagggagcggaacaccgttgccagggacaaggaccccgccgccaacgacaccaccgccaccacctcggcgcaggcggcgtccttcaccgagctgcttacggggatggccgcggccagcgccgcccccgctcaacacaagcaccagctgcggcagtcgtcggtgtcctggcagccgacgattgtctccgccaccaccgactacatcgggttcgcgcagccccggaagggcggggggcacgcgatggcgcacgccttcgcctcccccgctcctcacctcggcaacattgcgtccatcgccatggccccagcgcagcacttcggcttggccagtggtgccgtcaccgtcgcctccgggggcggcggcgagccgcacgccgagatgacgcacttctcgttcttgcaggaccatttcatgcccgtccacgcggcaccggcgccggccccggcgtcggctcccgccggagaatacaacctcgacttctccatgtcctcgggtcttatgggtgtcaacactaggggggcccttcagtccaattcgcagccgcatatctccggccaccatcaccagcagcagcagctccagaggctgtctactccactggacgctcccaacatacccttcctgtacagctctgccgccgctgcagctgcggcggtcaccacgcccaccacggccgacggccagttcgccgcgttccagctctggaacgggttccagcacgcagacatgaaggagaagggcaagcactgatcgacacctgcccagcgcagtgcgctgctatctggatgtggttatctcgtgttgctccctgatttgcgaaaagg

SEQ ID NO: 200324 - DNA, 2120 bp, Zea Mays
attggccattgccgaaccggcagaggcggcagcaggccacgccgtcccttcgctcgtgccacctcgcctcgtgccgcgcacctactactgcgctgcccagcaggcagcagctcccctttatcctccgcccccgtcctcataaaatctcgcttctcgcttctcgcctgtcagtcatcactagtcaccacccaccaccaccatcgctggcggcagtcagtctcagtcaggcagccactccctccctccctccatccatcacgctcccccagaccttcgcctcccgactccgcgcgccgcccgccgccgcgccgtgggcgcagcagcacccggcctcgcggatctaccgcgtctcccgggcctccggcggcaaggaccgccacagcaaggtgtacacggccaagggcatcagggaccgccgcgtccgcctctccgttgccaccgccatccagttctacgacctgcaggaccgcctcggctacgaccagcccagcaaggccatcgagtggctcatcagggccgctgccgaggccatcgacaagctcccctcgctcgacgccgccgcgggcttccccgcgcacccggcctccgccaaggaccacgccccgcctgtcggtgacgacgacgaccaccaccaccagcagcagcagcagctcacgaggtccggatgcagcagcacgtccgagaccagcaagggctccgtcctctccctctcccgctccgagagccgggtcaaggcgcgggagcgcgcaagggagcggaacaccgttgccagggacaaggaccccgccgccaacgacaccaccgccaccacctcggcgcaggcggcgtccttcaccgagctgcttacggggatggccgcggccagcgccgcccccgctcaacacaagcaccagctgcggcagtcgtcggtgtcctggcagccgacgattgtctccgccaccaccgactacatcgggttcgcgcagccccggaagggcggggggcacgcgatggcgcacgccttcgcctcccccgctcctcacctcggcaacattgcgtccatcgccatggccccagcgcagcacttcggcttggccagtggtgccgtcaccgtcgcctccgggggcggcggcgagccgcacgccgagatgacgcacttctcgttcttgcaggaccatttcatgcccgtccacgcggcaccggcgccggccccggcgtcggctcccgccggagaatacaacctcgacttctccatgtcctcgggtcttatgggtgtcaacactaggggggcccttcagtccaattcgcagccgcatatctccggccaccatcaccagcagcagcagctccagaggctgtctactccactggacgctcccaacatacccttcctgtacagctctgccgccgctgcagctgcggcggtcaccacgcccaccacggccgacggccagttcgccgcgttccagctctggaacgggttccagcacgcagacatgaaggagaagggcaagcactgatcgacacctgcccagcgcagtgcgctgctatctggatggacgtggaaactggaaaggcgtcaaataatcgcagcctgtccctacaaagcaccatccattattgcctgaagctgctgccatgattgcagtggggatggttcctccccccgaattcttggaagtagatcatccttatttcaggctatcacactgaagaacctcgtcgtccttactctggcaaataaccttccgcacttctttttctgcctgctgctgtactcatttcctggaggcgaggttttcgggggcatgatttgccagaccagagcgcccccgtcagagatctactgtgatcattcccactcgaaaactttgccggtggatgggttcggtttggcccccttgatcggctctctctcgagctttagtgatcagttagttagttcttatatccctgccatttgtatggttctcggttgtgtgttgcacgaggagtgggaggactccagtgcatgacgtgtgtgtgcaagtttgtgcccctgttgtgtactactggcatagtgagagttctcctcgtatgtaaattttatttttattgttttgcagtggttatctcgtgttgctccctgatttgcgaaaagg

SEQ ID NO: 200325 - DNA, 2205 bp, Zea Mays
ttccgccggtcgaccgatcccccccacccccaccggataccaccgcctccaccaaccgattccgttccatcccccctcccccctcgctcgagcgcgaggcttctctcccctcccctcccttctcctccccccccggcgcggattcctacagccagctccctcgccgatcgcggtcccgtcccgagatttatgagtctcgacaacttaactttgcaatataagctccgtaacaagggcacggatgggcacagaggaacagaaacgccaaactccaagaaaggcgcagactcgggagaggtgatgataaaggatatttgctgaccaaacttgcagtagttcttctttaaggaaatagaacttggcgtcatgacacatagaaatatgctctggacacatcagtctgttaatcctgaatgggagcaaagacatgcccaagttcaaccaggaagttcctattatgcaggcactgcaagtgattcatccaacctgggtgtgcaagttgctgtgggagttccaggaaatactgctaatgttggtatatgtgatttgcggaatcatgagtgcccgcatgttcataattcatacccacatgccggtgttacatcaagatttgtcttcccaactactatgtacaaccctagcatgtcagcagcagctgtcaacatatatattcctcagactcaaagctttggactaggcagtgtgctaccaccatctttacataatcaagttcccacaggaactattgatgagagtagcagcagtgtcaattttggtgatagtgctattggattcatgaaaaggaaaaatgcagtagttgctggaagccatcattttcttcatggatttgctgggtcaagttcatctgttcatgtgcctcagaatcctgtgcatgggccatggaatccttcatctcaatcaaattgtttacccagttctgcagcttcaaacctaccagaataccacaatagtaatgggtggccatacttagaagaatcttctgcagatgcttcaaacagtttcagttctgtggctgcttgccaggagctggcacctcatggtaactatttatatccagcttgtcacataagccagtccaatacatgggttccacagcctgcaggttatggagtaccacagtggggatatagtaatgcagtggtcaatcctccagacatgtcaaatgggccactgcctcatttctgccagaatagtatgcaggcacctcaaatacaagtgtcccatcaacagttcatcggtaacaatgcggtgcatggtttaaatccttctgccacaggccttcctttacatccaagaatgctggctctcccattcaatgctgagcacacttttgggcatccaatgcacccacctctgataaaccaagttaacaatggggctttaagaattctgccataccagaatgctacagtgatggaccattcaaggatttatgaagcaggacatgttatcgatgaacatagcgatatgcgtttagatgtggataacatgacttatgaggaacttgtagcattgcaagagcagataggcgatgtcaatactggtttgacagaaagctatatccaggaaaacttgaggtccagttttcatgttccaggagcagctagcatgtctgatcagttttctgagctttctttggagaatgatgcttgcataatatgccaggaggagtataaagctaaagaacttataggaacccttgaatgcggtcacaagtaccatgtgaattgcataaagcaatggttgatgatgaaaaacctgtgccccatatgcaagacgacagctttgtcatcagatagaaggaacggatgaccgtcgccaataatgttgttggttgtttaccgcgtggcaaattagcgtggattttgtatatagacatggttgcctttatttgcccgtcccctttgctgtggacataaactgagcttcgaaacactgtacagatattttgtaggatgttttagacgttaaatggcacaatggtgtgtaaagctcccatgactgccttggtagatgccctcttcctttacattgtacattgtatttatctttactcttcaaaaaaagaagcttgaaaaccgtaagttctgtacattctggaattgaaagaaccggaaattttcttcacctgtagagctttttgctagagctttatgagattcagtggtgaatcttgaagtcgtg

SEQ ID NO: 200326 - DNA, 2436 bp, Zea Mays
gttcattgctgcttagcaatgatacttggttttaatgatcagggaatggtttggactttgaatgttgtatctgagcttaggtttggtttgaagaatttagttagagcacgttctttgtttcaattttagaatcaagtgttttcagttatttgctacttgggtatgaagtttttcagttgctagtgttgtggatcttggtagttttttgttgggcctttttagggtctgttgagggggaaagggtttttcctacctgctatattgcactggaagacaatgcattctgcaaatgagtttacaacactagccaacaagagtttggtagggttgttgcgcttgcaatcatatatccatataacatctcgtcaaagttaatgccatttaatctatcctttttgtggttgctttagatttatgagtctcgacaacttaactttgcaatataagctccgtaacaagggcacggatgggcacagaggaacagaaacgccaaactccaagaaaggcgcagactcgggagaggtgatgataaaggatatttgctgaccaaacttgcagtagttcttctttaaggaaatagaacttggcgtcatgacacatagaaatatgctctggacacatcagtctgttaatcctgaatgggagcaaagacatgcccaagttcaaccaggaagttcctattatgcaggcactgcaagtgattcatccaacctgggtgtgcaagttgctgtgggagttccaggaaatactgctaatgttggtatatgtgatttgcggaatcatgagtgcccgcatgttcataattcatacccacatgccggtgttacatcaagatttgtcttcccaactactatgtacaaccctagcatgtcagcagcagctgtcaacatatatattcctcagactcaaagctttggactaggcagtgtgctaccaccatctttacataatcaagttcccacaggaactattgatgagagtagcagcagtgtcaattttggtgatagtgctattggattcatgaaaaggaaaaatgcagtagttgctggaagccatcattttcttcatggatttgctgggtcaagttcatctgttcatgtgcctcagaatcctgtgcatgggccatggaatccttcatctcaatcaaattgtttacccagttctgcagcttcaaacctaccagaataccacaatagtaatgggtggccatacttagaagaatcttctgcagatgcttcaaacagtttcagttctgtggctgcttgccaggagctggcacctcatggtaactatttatatccagcttgtcacataagccagtccaatacatgggttccacagcctgcaggttatggagtaccacagtggggatatagtaatgcagtggtcaatcctccagctgcagacatgtcaaatgggccactgcctcatttctgccagaatagtatgcaggcacctcaaatacaagtgtcccatcaacagttcatcggtaacaatgcggtgcatggtttaaatccttctgccacaggccttcctttacatccaagaatgctggctctcccattcaatgctgagcacacttttgggcatccaatgcacccacctctgataaaccaagttaacaatggggctttaagaattctgccataccagaatgctacagtgatggaccattcaaggatttatgaagcaggacatgttatcgatgaacatagcgatatgcgtttagatgtggataacatgacttatgaggaacttgtagcattgcaagagcagataggcgatgtcaatactggtttgacagaaagctatatccaggaaaacttgaggtccagttttcatgttccaggagcagctagcatgtctgatcagttttctgagctttctttggagaatgatgcttgcataatatgccaggaggagtataaagctaaagaacttataggaacccttgaatgcggtcacaagtaccatgtgaattgcataaagcaatggttgatgatgaaaaacctgtgccccatatgcaagacgacagctttgtcatcagatagaaggaacggatgaccgtcgccaataatgttgttggttgtttaccgcgtggcaaattagcgtggattttgtatatagacatggttgcctttatttgcccgtcccctttgctgtggacataaactgagcttcgaaacactgtacagatattttgtaggatgttttagacgttaaatggcacaatggtgtgtaaagctcccatgactgccttggtagatgccctcttcctttacattgtacattgtatttatctttactcttcaaaaaaagaagcttgaaaaccgtaagttctgtacattctggaattgaaagaaccggaaattttcttcacctgtagagctttttgctagagctttatgagattcagtggtgaatcttgaagtcgtg

SEQ ID NO: 200327 - DNA, 2369 bp, Zea Mays
ttggttttaatgatcagggaatggtttggactttgaatgttgtatctgagcttaggtttggtttgaagaatttagttagagcacgttctttgtttcaattttagaatcaagtgttttcagttatttgctacttgggtatgaagtttttcagttgctagtgttgtggatcttggtagttttttgttgggcctttttagggtctgttgagggggaaagggtttttcctacctgctatattgcactggaagacaatgcattctgcaaatgagtttacaacactagccaacaagagtttggtagggttgttgcgcttgcaatcatatatccatataacatctcgtcaaagttaatgccatttaatctatcctttttgtggttgctttagatttatgagtctcgacaacttaactttgcaatataagctccgtaacaagggcacggatgggcacagaggaacagaaacgccaaactccaagaaaggcgcagactcggtaacggacaaggagaggtgatgataaaggatatttgctgaccaaacttgcagtagttcttctttaaggaaatagaacttggcgtcatgacacatagaaatatgctctggacacatcagtctgttaatcctgaatgggagcaaagacatgcccaagttcaaccaggaagttcctattatgcaggcactgcaagtgattcatccaacctgggtgtgcaagttgctgtgggagttccaggaaatactgctaatgttggtatatgtgatttgcggaatcatgagtgcccgcatgttcataattcatacccacatgccggtgttacatcaagatttgtcttcccaactactatgtacaaccctagcatgtcagcagcagctgtcaacatatatattcctcagactcaaagctttggactaggcagtgtgctaccaccatctttacataatcaagttcccacaggaactattgatgagagtagcagcagtgtcaattttggtgatagtgctattggattcatgaaaaggaaaaatgcagtagttgctggaagccatcattttcttcatggatttgctgggtcaagttcatctgttcatgtgcctcagaatcctgtgcatgggccatggaatccttcatctcaatcaaattgtttacccagttctgcagcttcaaacctaccagaataccacaatagtaatgggtggccatacttagaagaatcttctgcagatgcttcaaacagtttcagttctgtggctgcttgccaggagctggcacctcatgcctgcaggttatggagtaccacagtggggatatagtaatgcagtggtcaatcctccaggaactgcagacatgtcaaatgggccactgcctcatttctgccagaatagtatgcaggcacctcaaatacaagtgtcccatcaacagttcatcggtaacaatgcggtgcatggtttaaatccttctgccacaggccttcctttacatccaagaatgctggctctcccattcaatgctgagcacacttttgggcatccaatgcacccacctctgataaaccaagttaacaatggggctttaagaattctgccataccagaatgctacagtgatggaccattcaaggatttatgaagcaggacatgttatcgatgaacatagcgatatgcgtttagatgtggataacatgacttatgaggaacttgtagcattgcaagagcagataggcgatgtcaatactggtttgacagaaagctatatccaggaaaacttgaggtccagttttcatgttccaggagcagctagcatgtctgatcagttttctgagctttctttggagaatgatgcttgcataatatgccaggaggagtataaagctaaagaacttataggaacccttgaatgcggtcacaagtaccatgtgaattgcataaagcaatggttgatgatgaaaaacctgtgccccatatgcaagacgacagctttgtcatcagatagaaggaacggatgaccgtcgccaataatgttgttggttgtttaccgcgtggcaaattagcgtggattttgtatatagacatggttgcctttatttgcccgtcccctttgctgtggacataaactgagcttcgaaacactgtacagatattttgtaggatgttttagacgttaaatggcacaatggtgtgtaaagctcccatgactgccttggtagatgccctcttcctttacattgtacattgtatttatctttactcttcaaaaaaagaagcttgaaaaccgtaagttctgtacattctggaattgaaagaaccggaaattttcttcacctgtagagctttttgctagagctttatgagattcagtggtgaatcttgaagtcgtg

SEQ ID NO: 200328 - DNA, 2128 bp, Zea Mays
ctgaaagcctctaatcttcttaaacaagtaaagcaaaagctgaatctttcaagtaaggcaagctattactaaaatggcttaccaatcaatttattcccaaccatggaatctgaattgtcgtaattgtttatatgagttgtcataacttgttgtgcagcttacatattgtcgtttcactgtttggacctatgcccgtaattactcttcccccaagtcaaacaactcatccttgagtttgtgatggacatggttgatgcgaggggagaggtgatgataaaggatatttgctgaccaaacttgcagtagttcttctttaaggaaatagaacttggcgtcatgacacatagaaatatgctctggacacatcagtctgttaatcctgaatgggagcaaagacatgcccaagttcaaccaggaagttcctattatgcaggcactgcaagtgattcatccaacctgggtgtgcaagttgctgtgggagttccaggaaatactgctaatgttggtatatgtgatttgcggaatcatgagtgcccgcatgttcataattcatacccacatgccggtgttacatcaagatttgtcttcccaactactatgtacaaccctagcatgtcagcagcagctgtcaacatatatattcctcagactcaaagctttggactaggcagtgtgctaccaccatctttacataatcaagttcccacaggaactattgatgagagtagcagcagtgtcaattttggtgatagtgctattggattcatgaaaaggaaaaatgcagtagttgctggaagccatcattttcttcatggatttgctgggtcaagttcatctgttcatgtgcctcagaatcctgtgcatgggccatggaatccttcatctcaatcaaattgtttacccagttctgcagcttcaaacctaccagaataccacaatagtaatgggtggccatacttagaagaatcttctgcagatgcttcaaacagtttcagttctgtggctgcttgccaggagctggcacctcatgcctgcaggttatggagtaccacagtggggatatagtaatgcagtggtcaatcctccaggaactgcagacatgtcaaatgggccactgcctcatttctgccagaatagtatgcaggcacctcaaatacaagtgtcccatcaacagttcatcggtaacaatgcggtgcatggtttaaatccttctgccacaggccttcctttacatccaagaatgctggctctcccattcaatgctgagcacacttttgggcatccaatgcacccacctctgataaaccaagttaacaatggggctttaagaattctgccataccagaatgctacagtgatggaccattcaaggatttatgaagcaggacatgttatcgatgaacatagcgatatgcgtttagatgtggataacatgacttatgaggaacttgtagcattgcaagagcagataggcgatgtcaatactggtttgacagaaagctatatccaggaaaacttgaggtccagttttcatgttccaggagcagctagcatgtctgatcagttttctgagctttctttggagaatgatgcttgcataatatgccaggaggagtataaagctaaagaacttataggaacccttgaatgcggtcacaagtaccatgtgaattgcataaagcaatggttgatgatgaaaaacctgtgccccatatgcaagacgacagctttgtcatcagatagaaggaacggatgaccgtcgccaataatgttgttggttgtttaccgcgtggcaaattagcgtggattttgtatatagacatggttgcctttatttgcccgtcccctttgctgtggacataaactgagcttcgaaacactgtacagatattttgtaggatgttttagacgttaaatggcacaatggtgtgtaaagctcccatgactgccttggtagatgccctcttcctttacattgtacattgtatttatctttactcttcaaaaaaagaagcttgaaaaccgtaagttctgtacattctggaattgaaagaaccggaaattttcttcacctgtagagctttttgctagagctttatgagattcagtggtgaatcttgaagtcgtg

SEQ ID NO: 200329 - DNA, 1577 bp, Zea Mays
agtttgccgctctgtgagcctgctgccgtcttcttccgccgccgccgccgtcgtcttcgtccgtaggtagcctcctctctcctgtcctcgcttgatcttatctactagtagtactcctgatgagacgctaagaaatctcgcttatattatgttaaccctgaaaccgaaagtgagtcttgtgcaactgtaaaaactgggacgtcactgaacgaacgatagcctgggttcgttcggtcgtagtggaggatacagcaacatcctcttaagttgaatttacgaacgcaatcagagagcggggaggaagaaaaagcgatcgatggcgtccaactacgtggacacgacgggcgaggagggacggttccacggccctcacagccacagcaccagcacgaccccgacgggcggcgcggcggcggcggcggcatcgccgcgcaacttccggcgcagcttctcctccgcgtcctccgcgggccacagccacggcggcggcggcggcggggccaagtgcgtgtgcgcgcccgcgacccacgccgggtcgttcaagtgccggctccaccgcaccaactcccagggccacggccacggccacccgcacccgtccccgccggcctcccccgccgcgccggcgcagggcgtctcgtcttccgcttcctcccgcaccgtcgaggccctgtgagtgtccgaggccaaagacgggcgaggcgtggggaaagtgagaagatgatgggatatacttgtcgtgtcagtctgtcagaaggaaaggagtgaagctattattccctcttgttgtgatccgcgctgttttgcctcttcccccctacccgtttcctcccttcgtgctggttgtggttctaaattcctgattgccggccgtcccgccttcttccttgccaagacgagactctcctcctcctgccactgctaccgctgctcctctcaactggtgaactggatcctgatttggggagaaggttaaactggatgcctttccatgtaattaattgcctctctttaccattctacgtgctactagtattgaagtatcatcacccttgttgtgtccttctgtctgtggtgtgatggtcatggactcatggtctgtgtttcttcggtgaagagttcgtacccgtacataaaagatcttcaatcagtggccggtttggtacctgtttggttcagcttttttctgaccagcttttctgaaaatctggctgtggtgagaatctggctgtggggagaatctgagtataattacgattacgtgtggaggaagataaagttgtttatagggctcaggatctagaaagtgacggattcctactattacaacgactcaaccgattctgttacaacgactcaaccgattctgtgtttatgttgattttggatggtttttgtcccaacgaattttatagaagctgactgaaaagctgagcgtttggcagtccgcagcagcttttggtggccagaagctgacagaagctgaaacaaacagggccttggttagatttcttgaggggaggtgcaaggcaccacagctgaagaagccctgagtcgagggcgaagatgacgacgtg

SEQ ID NO: 200330 - DNA, 1444 bp, Zea Mays
cccgggcagcccctacccggcctgcccgcgggcacctctgctctgacctctcgccggctataaaacgggcgccaaggcctggataacgcagtttgccgctctgtgagcctgctgccgtcttcttccgccgccgccgccgtcgtcttcgtccatcagagagcggggaggaagaaaaagcgatcgatggcgtccaactacgtggacacgacgggcgaggagggacggttccacggccctcacagccacagcaccagcacgaccccgacgggcggcgcggcggcggcggcggcatcgccgcgcaacttccggcgcagcttctcctccgcgtcctccgcgggccacagccacggcggcggcggcggcggggccaagtgcgtgtgcgcgcccgcgacccacgccgggtcgttcaagtgccggctccaccgcaccaactcccagggccacggccacggccacccgcacccgtccccgccggcctcccccgccgcgccggcgcagggcgtctcgtcttccgcttcctcccgcaccgtcgaggccctgtgagtgtccgaggccaaagacgggcgaggcgtggggaaagtgagaagatgatgggatatacttgtcgtgtcagtctgtcagaaggaaaggagtgaagctattattccctcttgttgtgatccgcgctgttttgcctcttcccccctacccgtttcctcccttcgtgctggttgtggttctaaattcctgattgccggccgtcccgccttcttccttgccaagacgagactctcctcctcctgccactgctaccgctgctcctctcaactggtgaactggatcctgatttggggagaaggttaaactggatgcctttccatgtaattaattgcctctctttaccattctacgtgctactagtattgaagtatcatcacccttgttgtgtccttctgtctgtggtgtgatggtcatggactcatggtctgtgtttcttcggtgaagagttcgtacccgtacataaaagatcttcaatcagtggccggtttggtacctgtttggttcagcttttttctgaccagcttttctgaaaatctggctgtggtgagaatctggctgtggggagaatctgagtataattacgattacgtgtggaggaagataaagttgtttatagggctcaggatctagaaagtgacggattcctactattacaacgactcaaccgattctgttacaacgactcaaccgattctgtgtttatgttgattttggatggtttttgtcccaacgaattttatagaagctgactgaaaagctgagcgtttggcagtccgcagcagcttttggtggccagaagctgacagaagctgaaacaaacagggccttggttagatttcttgaggggaggtgcaaggcaccacagctgaagaagccctgagtcgagggcgaagatgacgacgtg

SEQ ID NO: 200331 - DNA, 2024 bp, Zea Mays
aacaaagactccgaaccaaaacccgacgcgacatttttttttttgttggaagggggtgggggctttgttggtgctgtcgttagaagagatcaaacgggtccgtggaaaaaagaaagaggtttcattcgcgtgcgtgcgtgcctgcgccgagcgcccgagctaatctagtagttagcacgcgacgggagcatctaattcacccccacagcgagccgagcgagcgagaattcgaattggagttggacttgcggctgctgcgtccggtggggctggaattctcaccgcctccccgtgcggggtgagaggcggtgggtcgtggttgcggtcggcgcgcgaggagggtcgacggcctcgcgccattgggtacgaaaccggccgagactgtgagcggtgggcggccgctgcctggagacagctcaaggcaggttgatccaggttcgagcgcctcgggttgctggaggatttgcgggggggtgcgtgtttatgggcggctagatcggtgattcttcagctgctctcggtgtgatggcagctgactctagcatggggtttcaccaggggatcaccgcctcgctgtacaaccatcacatgctctcgttccagtccaacagcgacgtcggcatcagcggcgacgccaccggtgccatggtcatggccccggggagtgtgggtggcggcagtagcaacgccgggctgttcctctccgcaaacacaggggtcatgggcaacgcgccgggggtcgccccgtcaaggacctcgtcgggggatgcactccttggtaccgggacgcccaagtataagtacgtaactggtcctccttcggattggagtgaccgcgaggtggccatactgaaggaaggacttgtgagatatgctcgtgaaccgagtatcatgaggtacattaagatagcagctatgcttcctaacaggaccatcagggatgttgcgttgcgatgctggtggtctacacagggtaaagagagaaggaagaaacctgatggattctatacaggaaaaaaaatgagagacatgaagccaatccaggacaaaatggttgcatctgtcccaatagctaattttcacatgacacctacaaccaatgtaacccctttttcgatatcaatgcaacatccaaatcaacaaagtcaggttcccaaagaagctcctattgtcgacagtgcaacccagcgtctcctggaggaaaataatcagttgcttaaccagatttctgcaaatattaaaacattcaagacagtggagaacacagatctttttctccgcacgagtaacaacatcaaaacaattttaagcagaatgagcgaaacgcatggtatcatgggtcaaatgcctccattgcctttatccataaatgaagaccatataaattcgcttattcaactgaacagactggttgcatcatatggtacgacaagcatttctcatcatacgaagcaagagccatgaagctagtttaccatacccagggggaaaaacgagacgaccagatggccggacctcctgcaatcctgtaaacgtgctgttgaggaaggcttacatgttgttatactgaccaagcaccagggaaaaatcactgttttccagataatgtttttgcagtgatcaccagagtatcagacactttatcctggactccgcaagtgactgtaaatatcggatgactggaggcattccatgttttgttttactgatcgttcgtgaatgcatttcttcttttcttgttttttattgttatcccagacagggttgcattgctcccaatatgtaactatgtacaatagccactgccctagactgctaggcgtagaacgactccattttctgactatttggacactggaacccaaacatgttgtccaggtgttctgcattcttttttatcttcacttcagaagctttggattagcacttctgatgcagcaatggttagctgtgccccaacatggacaacaacagtttattccttttgtttcgtttcaaattgtaagccattttagcattgtctc

SEQ ID NO: 200332 - DNA, 2014 bp, Zea Mays
aaagactccgaaccaaaacccgacgcgacatttttttttttgttggaagggggtgggggctttgttggtgctgtcgttagaagagatcaaacgggtccgtggaaaaaagaaagaggtttcattcgcgtgcgtgcgtgcctgcgccgagcgcccgagctaatctagtagttagcacgcgacgggagcatctaattcacccccacagcgagccgagcgagcgagaattcgaattggagttggacttgcggctgctgcgtccggtggggctggaattctcaccgcctccccgtgcggggtgagaggcggtgggtcgtggttgcggtcggcgcgcgaggagggtcgacggcctcgcgccattgggtacgaaaccggccgagactgtgagcggtgggcggccgctgcctggagacagctcaaggttgatccaggttcgagcgcctcgggttgctggaggatttgcgggggggtgcgtgtttatgggcggctagatcggtgattcttcagctgctctcggtgtgatggcagctgactctagcatggggtttcaccaggggatcaccgcctcgctgtacaaccatcacatgctctcgttccagtccaacagcgacgtcggcatcagcggcgacgccaccggtgccatggtcatggccccggggagtgtgggtggcggcagtagcaacgccgggctgttcctctccgcaaacacaggggtcatgggcaacgcgccgggggtcgccccgtcaaggacctcgtcgggggatgcactccttggtaccgggacgcccaagtataagtacgtaactggtcctccttcggattggagtgaccgcgaggtggccatactgaaggaaggacttgtgagatatgctcgtgaaccgagtatcatgaggtacattaagatagcagctatgcttcctaacaggaccatcagggatgttgcgttgcgatgctggtggtctacaggtaaagagagaaggaagaaacctgatggattctatacaggaaaaaaaatgagagacatgaagccaatccaggacaaaatggttgcatctgtcccaatagctaattttcacatgacacctacaaccaatgtaacccctttttcgatatcaatgcaacatccaaatcaacaaagtcaggttcccaaagaagctcctattgtcgacagtgcaacccagcgtctcctggaggaaaataatcagttgcttaaccagatttctgcaaatattaaaacattcaagacagtggagaacacagatctttttctccgcacgagtaacaacatcaaaacaattttaagcagaatgagcgaaacgcatggtatcatgggtcaaatgcctccattgcctttatccataaatgaagaccatataaattcgcttattcaactgaacagactggttgcatcatatggtacgacaagcatttctcatcatacgaagcaagagccatgaagctagtttaccatacccagggggaaaaacgagacgaccagatggccggacctcctgcaatcctgtaaacgtgctgttgaggaaggcttacatgttgttatactgaccaagcaccagggaaaaatcactgttttccagataatgtttttgcagtgatcaccagagtatcagacactttatcctggactccgcaagtgactgtaaatatcggatgactggaggcattccatgttttgttttactgatcgttcgtgaatgcatttcttcttttcttgttttttattgttatcccagacagggttgcattgctcccaatatgtaactatgtacaatagccactgccctagactgctaggcgtagaacgactccattttctgactatttggacactggaacccaaacatgttgtccaggtgttctgcattcttttttatcttcacttcagaagctttggattagcacttctgatgcagcaatggttagctgtgccccaacatggacaacaacagtttattccttttgtttcgtttcaaattgtaagccattttagcattgtctc

SEQ ID NO: 200333 - DNA, 1963 bp, Zea Mays
gggggctttgttggtgctgtcgttagaagagatcaaacgggtccgtggaaaaaagaaagaggtttcattcgcgtgcgtgcgtgcctgcgccgagcgcccgagctaatctagtagttagcacgcgacgggagcatctaattcacccccacagcgagccgagcgagcgagaattcgaattggagttggacttgcggctgctgcgtccggtggggctggaattctcaccgcctccccgtgcggggtgagaggcggtgggtcgtggttgcggtcggcgcgcgaggagggtcgacggcctcgcgccattgggtacgaaaccggccgagactgtgagcggtgggcggccgctgcctggagacagctcaaggttgatccaggttcgagcgcctcgggttgctggaggatttgcgggggggtgcgtgtttatgggcggctagatcggtgattcttcagctgctctcggtgtgatggcagctgactctagcatggggtttcaccaggggatcaccgcctcgctgtacaaccatcacatgctctcgttccagtccaacagcgacgtcggcatcagcggcgacgccaccggtgccatggtcatggccccggggagtgtgggtggcggcagtagcaacgccgggctgttcctctccgcaaacacaggggtcatgggcaacgcgccgggggtcgccccgtcaaggacctcgtcgggggatgcactccttggtaccgggacgcccaagtataagtacgtaactggtcctccttcggattggagtgaccgcgaggtggccatactgaaggaaggacttgtgagatatgctcgtgaaccgagtatcatgaggtacattaagatagcagctatgcttcctaacaggaccatcagggatgttgcgttgcgatgctggtggtctacacagggtaaagagagaaggaagaaacctgatggattctatacaggaaaaaaaatgagagacatgaagccaatccaggacaaaatggttgcatctgtcccaatagctaattttcacatgacacctacaaccaatgtaacccctttttcgatatcaatgcaacatccaaatcaacaaagtcaggttcccaaagaagctcctattgtcgacagtgcaacccagcgtctcctggaggaaaataatcagttgcttaaccagatttctgcaaatattaaaacattcaagacagtggagaacacagatctttttctccgcacgagtaacaacatcaaaacaattttaagcagaatgagcgaaacgcatggtatcatgggtcaaatgcctccattgcctttatccataaatgaagaccatataaattcgcttattcaactgaacagactggttgcatcatatggtacgacaagcatttctcatcatacgaagcaagagccatgaagctagtttaccatacccagggggaaaaacgagacgaccagatggccggacctcctgcaatcctgtaaacgtgctgttgaggaaggcttacatgttgttatactgaccaagcaccagggaaaaatcactgttttccagataatgtttttgcagtgatcaccagagtatcagacactttatcctggactccgcaagtgactgtaaatatcggatgactggaggcattccatgttttgttttactgatcgttcgtgaatgcatttcttcttttcttgttttttattgttatcccagacagggttgcattgctcccaatatgtaactatgtacaatagccactgccctagactgctaggcgtagaacgactccattttctgactatttggacactggaacccaaacatgttgtccaggtgttctgcattcttttttatcttcacttcagaagctttggattagcacttctgatgcagcaatggttagctgtgccccaacatggacaacaacagtttattccttttgtttcgtttcaaattgtaagccattttagcattgtctc

SEQ ID NO: 200334 - DNA, 1957 bp, Zea Mays
ttgttggtgctgtcgttagaagagatcaaacgggtccgtggaaaaaagaaagaggtttcattcgcgtgcgtgcgtgcctgcgccgagcgcccgagctaatctagtagttagcacgcgacgggagcatctaattcacccccacagcgagccgagcgagcgagaattcgaattggagttggacttgcggctgctgcgtccggtggggctggaattctcaccgcctccccgtgcggggtgagaggcggtgggtcgtggttgcggtcggcgcgcgaggagggtcgacggcctcgcgccattgggtacgaaaccggccgagactgtgagcggtgggcggccgctgcctggagacagctcaaggcaggttgatccaggttcgagcgcctcgggttgctggaggatttgcgggggggtgcgtgtttatgggcggctagatcggtgattcttcagctgctctcggtgtgatggcagctgactctagcatggggtttcaccaggggatcaccgcctcgctgtacaaccatcacatgctctcgttccagtccaacagcgacgtcggcatcagcggcgacgccaccggtgccatggtcatggccccggggagtgtgggtggcggcagtagcaacgccgggctgttcctctccgcaaacacaggggtcatgggcaacgcgccgggggtcgccccgtcaaggacctcgtcgggggatgcactccttggtaccgggacgcccaagtataagtacgtaactggtcctccttcggattggagtgaccgcgaggtggccatactgaaggaaggacttgtgagatatgctcgtgaaccgagtatcatgaggtacattaagatagcagctatgcttcctaacaggaccatcagggatgttgcgttgcgatgctggtggtctacaggtaaagagagaaggaagaaacctgatggattctatacaggaaaaaaaatgagagacatgaagccaatccaggacaaaatggttgcatctgtcccaatagctaattttcacatgacacctacaaccaatgtaacccctttttcgatatcaatgcaacatccaaatcaacaaagtcaggttcccaaagaagctcctattgtcgacagtgcaacccagcgtctcctggaggaaaataatcagttgcttaaccagatttctgcaaatattaaaacattcaagacagtggagaacacagatctttttctccgcacgagtaacaacatcaaaacaattttaagcagaatgagcgaaacgcatggtatcatgggtcaaatgcctccattgcctttatccataaatgaagaccatataaattcgcttattcaactgaacagactggttgcatcatatggtacgacaagcatttctcatcatacgaagcaagagccatgaagctagtttaccatacccagggggaaaaacgagacgaccagatggccggacctcctgcaatcctgtaaacgtgctgttgaggaaggcttacatgttgttatactgaccaagcaccagggaaaaatcactgttttccagataatgtttttgcagtgatcaccagagtatcagacactttatcctggactccgcaagtgactgtaaatatcggatgactggaggcattccatgttttgttttactgatcgttcgtgaatgcatttcttcttttcttgttttttattgttatcccagacagggttgcattgctcccaatatgtaactatgtacaatagccactgccctagactgctaggcgtagaacgactccattttctgactatttggacactggaacccaaacatgttgtccaggtgttctgcattcttttttatcttcacttcagaagctttggattagcacttctgatgcagcaatggttagctgtgccccaacatggacaacaacagtttattccttttgtttcgtttcaaattgtaagccattttagcattgtctc

SEQ ID NO: 200335 - DNA, 3591 bp, Zea Mays
tttcctttctcctttctctgccggcccagctatattttcttcgcgtaattcccccgtccaggcgtccagcacgctccagcgtaccacaagccgcgcatccaagctagtcctagatatagcacactagttgctgggcagcagcaggaagtcgcagcgttgcgtgatgaagaacaacccgagcttcgagaacacgtgcagcgccgccgccggcgggtccggctctggctccttcaacgtccggaacctgtccaaggtcatcctcccgccgctcggcgggccgtccggccagagccagtcccatggcgggtcggacaagtgggtcatctcgccgctcgactccagatacaggtggtgggacacgttgatggtagtcctggtggcgtactcggcgtgggtgtacccgttcgaggtggccttcatgaacgcgtccccgaagggcgggctggaggtggcggacatggtcgtggacctcttcttcgccgtcgacatcgtgctcaccttcttcgtcgcctacatcgaccccaggacccagctgctcgtccgcgacaggaagaagataaccctcaggtgtggattttaaaatcaagttccttacagttggtggaaagaaactaaagttgacaatatgggatactgtttggtatcttcatcagaacttgctggacattccaatgtttgctgctaaatgcttctgtttttactcattttagaattccacccttttctgctatcattactgttagtggtttgagaatcaaggtttgcttttcagctaatatatttggtttcttcttccacgcctgtccttacatcatggctattggggtttcttattcacagattttagctcgacattgctgctttgtgcctaaaatatttggctactttcgccatgttagccctcacatctctaaatcattgtgaccctacgttccaatattattaaaagttttcttgtttagccccaccaactcattttgcccaaaggtatctaggtgcttcaccatgttacctctgtctactactgctagaacttgaaggtttctaagttatctattaacgacataaattatgttaccttgttttctgatattttcaatattccaaaaacttggagtccatcgtgtgctttttgtttatgtttatttgtgggttggatctctcaagagctcgtggttgcactgtagcctgttgaggcgtgcctgccatcaagctggccaggagaggtttaggacaataactagttcttactacagaggtgctcagggaattattttaggtacctgtcgacgttcttcatcatggacgtggcatcgacgatcccgttccagagccttgcctacctcatcaccggcgaggtcagggagaacgccgcgtacagcatgctgggcgtcctacgcctctggcggctccgcagggtcaagcagttgttcaccaggctcgagaaagacatccgcttcagctacttctggatccgcagcgcgcgtctaatcgcggtgaccttgttcctggtccactgcgccgggtgcctgtactacctgatcgccgaccggtacccggacagggagaagacgtggatcggcgcggtgaaccccaacttccggcaggctagtctgcggatccgctacatctcctccgtctactggtccatcaccaccatgaccacagtcggctacggcgacctgcacgcccagaacaccgtcgagatgatcttcaacatattctacatgctcttcaacctcgggctcaccgcctacctcatcggcaacatgaccaacctcgtcgtcgagggcacccgccgcactatggagtttaggaacagcgtaaggacagcgtcgagtttcgtgggccggaaccacctgccgccgcggctgaagcagcagatcctggcctacatgtgcctcaagttcagggcggagagcctgaaccagcagcagctcatggaccagctgcccaagtccatctgcaagagcatctgcgagcacctcttcgtgccggtcgtcaaggatgtctacctgttcaagggtgtctcaagggaaatgctgctgtccctggccaccaagatgaagccggagtacatcccgcccaaggaagacgtgatcgtgcagaacgaggctccggacgacgtgtacgtcgtcgtctctggcgaggtggaggtcgtactgttcgacggcgtcgacgagcgggtggaggcgacgctggggacgcgcaacatcttcggcgaggtgagcgcgctgagcgaccggccgcaggcgcccttcacgttccggacgaggacgctgagccagctgctgcggctgaagcaggccacgctcaaggaggccatgcagagctggcccgacgacagcgtcatcatcatcaagaattacgtcaagcatcaggtcgagatgcatggcatgaaagccgatgactcgctgggagacaacactagcgagcacgacgacgacgcgaatgtgctcacagtcgccgcgatgggaaacagcggcttactcgaagacctcctcagggcagggaaggacgctgacgtcggtgacgccatgggcagaacagcattgcacatcgcggcgtctaaggggtacgaggactgcgtgctggtgctgctcaagcacgcgtgcaacgccaacatcagggacgcgcagggcaacacggcgatgtggaacgccatcgcggcggggcaccacaagatcttcaacatcctgtaccactccgcgcgcgcgtcgaaccctcacgccggcggagacgtcatgtgcctcgccacgcggcgcggcgacctcgacgcgctccgggagctcctcaagctcggccttgacgtggactcggaggaccacgatggcgccactgcgctgcgcgtcgcgatggccgagggccacgcggacgcggcaaggttcctgatcacgaacggggccagcgtggacaaggcgagcctcgacgacgacggctccggctccggcgccgcgcggcttacaatgtcgccgacagagctgcacgagctgctgcagaagcgggagctcgtccactcgataaccatcactgactcgccaccggtggtcccggacggcggctcgtcggggcacagccgtccgggcagattacagagcacaggctcggacaacacgcgctggcctcgggtgagcatatacaggggccacccgttcctcagaaaccgcagctctgaagctggcaagctgatcaatctgccagccaccatggaagaattcatagccgtcgtcggtgagaaattgaaggttgatacggagaaggcgctgattgtgaacgacgaaggagcggaggtcgactcgatcgacgtgatccgggacaacgacaagctgttcgtggtcaccgaagaagatctgacgcggctggcaccaatggactcggtgccttcgtcatagcatttgtagattcaggtttttccgtagcaagtcacacggtagatgtgcacccaactaacaaaatgtgtattcctcggggtctcaagatagtcaatatttcatgtttttaaatacaactttttaaattttgatcgaatatatacagaaatactaaactttatggtatattattatatagccttttaatctattctataac

SEQ ID NO: 200336 - DNA, 2846 bp, Zea Mays
gagtatttgcagccttgtatgccattaggtattggagacactttcagcacttgatagagctattcattctccacatgcttcaactcaggaagtatcagcttctgtttcaaaactttcaagagatacatcgggacagtacagtgatttccatattctctcttctttaaattctcagttgtttgaaagttcagccttgatgaacatagctgcggtgaagtcacttctgtctgcattgcaccaattgtcaagtcagcacatatctggaagctctcaattgtctgtccagcagattgggagcatttcattttcagtggagcgcatgacaacgattcttgccaataatctgcatcgagttgaaccgatatgggatcaaattgctgctcatcatcttgagcttgcaaattgctctaacccacaattatgtaatatggcactgaactcattggatcaatcaatttgtttggtagcgggttctgaaaaatttcagggcatcagcgcagcacctcatcagtttccagaaagccatttggtcaaagaaagtgaaactgtatcatttgagtatgcagttttatctccattgatgatcctctattcctccaacaagaacgttgatgtacaaatgggtgcattaaagattcttttgcatgttcttgagagacatggagaaaagttatcatatagctggcccagcattcttcatatgttaaggatggttactgatgcatcagaaaaagacctcatctccttaggctttcagagcattcgtgtaataatgaatgaaggactggcaacaatccctgtacaatgccttgatgaatgcattttggtaactggagcatatggtactcagaaaactgatataaacataagtttaacatcagttggacttttgtggactgctactgattttattgtgaagggattagtcagcaagcctattgagcaagctagtcacatgaatgatgatgttcaatcatgtgaaatgactgaagaggcaaacagcaagcaagttcctccaaaactagttgattatagtatacttttcttttcagttttctctgtcctccagaaattgggttcagatgatcgtcctgaggttcgaaattcagctgttaggactctcttccagactctcagcatccatggccaaaagctttctaaaagtatgtgggaggattgtctttggttatatgttttccctatgttagagcatgtttcccacttggcatctacctcatctcgagatgagtggcaagggaaggaacttggaactcgggctggcaaagctgttcatatgcttatccatcacagtcgaaatacagcacaaaagcaatgggatgaaaccattgttcttgtacttggtggtattgcacggcttttgcgttcttttttctcttacctccaacaactgagaaaattttcttctggttgggtgcttttactcagttttataaaaaatagcatcttaaacggtagcaaggaggttgctattgctgccatcaattgcttgcagacgtttgtcggcgcaaactgtccaaagggcaatttggaatcctcgtatgttaaatctgttcttgatatttatgaacttgttcttcaaacttcatctaattttaagaatgactccactgataaagtgaagcaagaggttctccgtggtcttggtgatctttatgtccaagcacaatctctgtttactggtgacatgtatctaaggcttatggcaattatgcatctgatgatcaagactaccttgaatcctactgattatgatagtgaactgggtagtattcctgctgtacaacgaggtatattggaaatcattcctatgctacgcccaacagttgtattgtctcccatgtggacacatctgcttcttgagctgctatgctatcttaatgggcacgaaggccccctccagaaaaataatgaacaaacgcccgatcataattctcaagcactggtagacggtgcaaagcatgctcttgttgaaagaagcaatctcaatggcgggggtacaaaactggatatggtgggatctggttggggcattctatttgtagaaaaacttgtaccaatcattgccaaccttttcttggaggctccaccaaatgaaaggtttagtgtctctcctgaagtcattcaaggtcttggaaggtatttgctttttatgatttatatctgacaacataatgcaaaactaaggatatatccacttgtcaagaaggctttacgattattgcagaacagaagaacagctttacttattttcatttttccatgtcgaaaagggtattaattgtgaaacggcctctagcttagttggttaggtggtctgagtagcactccttagatcctgagttggactctctgtgtgagtgaatttcatgataaggttaaaaaaatcccctagttgtcccacgctaaagcataggtcttattgaagtgtataagtggattggctatcttctcccattaacttaagcttttgagtttaactggttagtgtgtccactttaacatgttatcaaagtcagagtcagaggtctcgagttcgaatcctggtataggctttatttgtgcctccacctatttatttctacgtttgcgcctttctctctggctgcacgtgagtgggagtgttgaagtgtataagtggattggctatcttcttccattagcttaaacttttgggttgaactggttagtgcgtccactctaacaggtctaaggttcgaccccggttgcggtcattctcacatgggctacgatgtcgtgtatgggtggagcagaggtttaggggttttctcaacttgtttaaggtcttcttagtattgtgagaatag

SEQ ID NO: 200337 - DNA, 1405 bp, Zea Mays
cttctcatgacttcactccgcactaatgttgagctcgagggtgaagcaggggagccttcttaccgtcgtttagttctccgtctggtttctcatgtcatcaggctatacagctcttcacttgttactgaaagtgagggtttttgtgttgaagcctgcactctgcgcttgctgtttcagacatttgacttgaatcctgtgaataccaatgtcgtggagaacatagttagagcacttgctttggttgtagcttcaattcaggtggtattggttcctttgcttcaaaagaatatcatccttattaattacatgtttggttcccttgcttcaaaagaatatcatccttattaattacatgtttgcttgaactcattttttgataattttccattgctgttcctttaactagaaatgtttctcttataggcttcagattcaagcgaagaaactctagccgctgttggtgggatgttcagtagtaaagctaaagggatcgagtggagtatggaccatgatgcatcaaatgctgctgttttggttgctagtgaagcacatactatcactctggcccttgaaggtctcttaggcgtagttttcactattgccactttgactgatgaagctctagatgttggtgagcttgaatcacctaaatgtgaatcaaatagtatggaatgtagtggacagttggcccttctttgtatggctttggtcaattcaacatggttaaccatccttgactctttgtcatttattttgacgaggtcacagggggaagctataatattagagatattgaaaggataccaagcattcactcaggcactaagaacactttttaatgttgcacatcgattacacaatgtccttggtccttcttgggttctggtattggagacactttcagcacttgatagagctattcattctccacatgcttcaactcaggaagtatcagcttctgtttcaaaactttcaagagatacatcgggacagtacagtgatttccatattctctcttctttaaattctcagttgtttgaaagttcagccttgatgaacatagctgcggtgaagtcacttctgtctgcattgcaccaattgtcaagtcagcacatatctggaagctctcaattgtctgtccagcagattgggagcatttcattttcagtggagcgcatgacaacgattcttgccaataatctgcatcgagttgaaccgatatgggatcaaattgctgctcatcatcttgaggatggttactgatgcatcagaaaaagacctcatctccttaggctttcagcatgatatgatttctctgtgggagttttcccctggcatagctccttaggcctgttgtgtttatgtctgtctatggaagttgaatagggttacagattacatttct

SEQ ID NO: 200338 - DNA, 1642 bp, Zea Mays
ctcacttctcatgacttcactccgcactaatgttgagctcgagggtgaagcaggggagccttcttaccgtcgtttagttctccgtctggtttctcatgtcatcaggctatacagctcttcacttgttactgaaagtgaggttttccttaatatgcttgtaaaagttacccgtcaggacttaccattatggcatcagatacttgtccttgaaattttaaggggtttttgtgttgaagcctgcactctgcgcttgctgtttcagacatttgacttgaatcctgtgaataccaatgtcgtggagaacatagttagagcacttgctttggttgtagcttcaattcaggtggcttcagattcaagcgaagaaactctagccgctgttggtgggatgttcagtagtaaagctaaagggatcgagtggagtatggaccatgatgcatcaaatgctgctgttttggttgctagtgaagcacatactatcactctggcccttgaaggtctcttaggcgtagttttcactattgccactttgactgatgaagctctagatgttggtgagcttgaatcacctaaatgtgaatcaaatagtatggaatgtagtggacagttggcccttctttgtatggctttggtcaattcaacatggttaaccatccttgactctttgtcatttattttgacgaggtcacagggggaagctataatattagagatattgaaaggataccaagcattcactcaggcactaagaacactttttaatgttgcacatcgattacacaatgtccttggtccttcttgggttctggtattggagacactttcagcacttgatagagctattcattctccacatgcttcaactcaggaagtatcagcttctgtttcaaaactttcaagagatacatcgggacagtacagtgatttccatattctctcttctttaaattctcagttgtttgaaagttcagccttgatgaacatagctgcggtgaagtcacttctgtctgcattgcaccaattgtcaagtcagcacatatctggaagctctcaattgtctgtccagcagattgggagcatttcattttcagtggagcgcatgacaacgattcttgccaataatctgcatcgagttgaaccgatatgggatcaaattgctgctcatcatcttgagcttgcaaattgctctaacccacaattatgtaatatggcactgaactcattggatcaatcaatttgtttggtagcgggttctgaaaaatttcagggcatcagcgcagcacctcatcagtttccagaaagccatttggtcaaagaaagtgaaactgtatcatttgagtatgcagttttatctccattgatgatcctctattcctccaacaagaacgttgatgtacaaatgggtgcattaaagattcttttgcatgttcttgagagacatggagaaaagttatcatatagctggcccagcattcttcatatgttaaggatggttactgatgcatcagaaaaagacctcatctccttaggctttcagcatgatatgatttctctgtgggagttttcccctggcatagctccttaggcctgttgtgtttatgtctgtctatggaagttgaatagggttacagattacatttct

SEQ ID NO: 200339 - DNA, 1625 bp, Zea Mays
gatatttcgtccacaataatttctcccaaagacaggacaatgagaataacctctcaattgtgtcattttgttgtattttcatcaggagaatcaattgatggtcaacatggggattagtccgaggcggagtgctccgtcgacctcaagctcggcgggctaggcgagatcggggcggcggacggcacaaccacgaaggagccggtggctgcaaccgcagctccgtccgccaccccgatgaagcgcccgcgcttgcggcccggcggcgccggcggggcgcagtgcccgtcgtgcgcggtggacggctgcaaggccgacctgagcaagtgccgcgactaccaccgccgccacaaggtctgtgagacgcactccaagacgcccatcgttgtcgtcaccggccgcgagatgcgcttctgccagcagtgcagcagacacccaaatctctcttcagcacacaataaagcaggagctgttcaagaacgctggctatgtcgaaggctgtttgtagagggccatggcatcatggcatgggaggaagaagaagaggatgcaacaataaattaatcttaagtagcggtggaagcaacaacagtagtatcagttcaggtccagtagcggaaaaggcaggcagggcaaagatttgggaggccttttcaatccatctcccccatcataacccactttgatctatccatgttagcagtacatgttcgtccatcctatagcatcatgcaggatgcaaagggttctatattcataagcatgttgttgcaccacacaacctttttgttttatatgttgtcatctgatctctggtgaaaaggagggagatgagctacggaggaaatctgatgttatggaactctaagaaaagtctagatttccacaggtccagtggtgccactgatgtcaagtcagcagaaacgattcttgagcatgagtatgcgtcgatgctctttttccctgaggcaatgctactcctatgcacagtgatgtagtagcaacggagaactgtcattaattggatacttcttatcctaattgcagtcgtatcatttagcttggggtttgaattatcggattgccctaccatactgcttagctaaagcccttgtcaaaatgcataattagaagcaactattaaagaaagatcagcttcagatagagtgaagacgcgagtgcattttccagggatggaaagaaggcatgatttattttcctccgacatataaatactcattcaactcggatcgttactctggtgtgcggcccaaagaaaatcggaggacacatgcttggtgcgatcacattccgtggcctcttgcagtcgtcctacatccgcggagagtctcgcttctttgaccacggaccagtgtacaatcttttcatggctaaggttgggagtgtccaccacagaagatcgaacttaaccttgatcatgatctctagcgctgagggaacagtgatagattgatatgaggtttgtaggtgtaattatgtgtataataacctttttttattttccttgcccctatggtgtagtacctgaaaagcaaaatgatgtatgtatttgttgttaaatacttttctaattctaacagtaagaaattaaggttgtgccgatgcac

SEQ ID NO: 200340 - DNA, 3512 bp, Zea Mays
gggaggcgaaagaggatggataattggatcggatagccgtcccctgggttctgtctggggagcaggagcagcagtcgccgagagcaacccaaagcaagctgcaggctccccaagaaatgccgtgtgcactagaagtgattgatgcaaggttacagagcacatcacatattcagtgcagcagatcatttgaccaaaacattggaagacgcttttcaaagggccatctgatacaaaaacctgttgccatttgtcctgagaacagtgacacctcatcaacaatacttctgtttcggcacgatccagactggaaacaagcaccattcttgtctgacactcaagaggtcaacaagccaaatgaaaagaacatgcatgatcaggttgattcttctaaaccagtttccaatggaaacacacatgggggaagcacctttagacaatctcagcaaagggaaaacgtttgtaattcattgatggcagttcctccctgccatgtagttgcaaagaagtactccaggtctgttgctactgctctgagtctgggatctgattctgatattttgcacaacggtgacaagcttccaaaaaggaattctagaaagagaggaaaacagtgcaagcgaacaatccgcaaaaggctgaatttggcatcagaaaccatttttgaagagagtacttatggtgcttctcctgcggaggtagttccgaccaatttactggttgataagttgtcagagaccacatcctctgctagctcattggttaaaactgatggtcggtacaaggaggaccatgtggaatgtggtattatgttgaatttagctacattgggaactgatgagatggatggttctggatgtgctggttcatcttataatgatgcaggagggagattaagctccagttgtgtttcttacttgaatgacaaatccaatacgacagattcttcagaatttgacggatccaccttcactgaacatggcttgggagaagaaagcaatagctaccagaagttaacatgcccctatgtttataatcccagttatgcaaccatggattccatctttagtaggtggaacagcgacaacagtgggaactacagtgtcgatgttgaggctaggttaaccgtcaaagacgaaaatagacatgatcattcgaaactgggggcttccacagggcggagtaatgtgaggatggaatgccagttgatagggtcatgttttagtgctactcatgctgaagacacaaacgatcctctagggatcagatcatactcctctaaggatgttactgatagttgtagccatactgaaatggttcagtgcagcagcaagtcctttcattttaaatcagggaggaggaacataaaatcaagtaaaacaccaagctatgttgatttgactgcgtctaacagagtgagaggttctaataggcacaagaacaatggaaaagatagttcagcagtgtggcagaaagtagaaaggaatgacaagatggtatctaaagcaggccatccgagcgatacacctgttcatgataagggtgcaaatgaagttggtaagaagggtgtacaggaagatccaacaagaattcgggcaaaacataatccgaataagaaagtgtgcaaacagaagccttcaaatggagcagttgaattggagcctgccaaaggagaagatgcattgaactcatgccatacattttctggacctttctacacgaagcaagcaccctttctacgccagcaaagaaactctttttcgaaacaaggttctcagtcattgaaaaactactgtgctcctaggaatggtatccccaaggtggcaaaggattacttgcagcaagaagaattacctatgttggtgctagttcatgccaagaacaccagtgataaatcaagctcatattcaagttcagctgatgaagttggtctaactggagtcagcaacaactatccaactgagggaaatgagagttcacaacctgatattgaggtagcagcgtcagtatcttgcaacttggttccagatttggctccacaagctgcttctgatgatttccacatatcagatcctcactctttacgtcctgaaaacaagggtgcatccaacagtcggagctccaataacttgtgcacagatccttttgctgcagaagcaaaggaagctcgatgtgtgaagctactaacagagaataattcccaagaaccctcagataatgcagctgagaccgattacagcaagatgaaagaagtcatcagctatgtttacacagcacagcagcgagtggaagacatccaactttgcattggtaggcctattgctgattttgaaaattttgtttactctgcttctccagttgtgcactgcagctcgtgctctgttggctgtaaatcttgcctgcaagaatgtgtgaaggatggcttatgtttgcatcagactccagatatcactctaagaactgtctggcagtggtacgaagagcctagttgctatggtttggatgtaaaggcacaagatctctggaggtcaaaagccttgtggaatagtcattgtcagtttacaacatattttgtaccatatctatctgctgttcaactcttcagtcaacctaaaagaaccagtggtggaagcattgataaggaatcaatccatagggatgtgacatgtgaaacatctccacagctgaacctgcccccaatatttgcaaagctttttccaaaacaatctgttccagtaaataaaccatctactctgcgtactgaagatgatcaacagtcagcagatggggagctggtatttgaattttttgaatatgaacagccatactcacggcgacaattatttgacaaggtaaatgagctgattgccggtgcgaaaccgtcaaattgccaaatatctggggacccaaagaatctggaggccagcctgcatgatctccatccagcgtcttggtattgtgttgcatggtatcccatataccggatacctgatggaaaattccaggctacattcttgacatatcactctcttggccactggattcgtcggagcagctcagcaggtggggccgctgttttgccagtcatgggcctgcagtcttacaatgccaaggcagagtggtggtttgagatgagcaagtccgaatctgaaggcgggcagtcgcaggccagtgaagcatccgagattctgaaggagagatcgcgcacgctgagtgaggctgcggccgtgttgtccagggccagcgtgctgaagaatgggcagatgagtagaaacagacatccagactacgagttcttcctctcccggagctgatttggaagtgcctcttcgtactcggatttagttaggtttcagtgtatgtatgtgttgttgacactaaagcttattctgcaaccgatgactggaagctgtttgcttagcttagcttagcaatataataataatgctagtcagttctcatccaagtgtcatgtcactgttattgaagtagatcagagatgaaacaggaaggac

SEQ ID NO: 200341 - DNA, 3517 bp, Zea Mays
gggaggcgaaagaggatggataattggatcggatagccgtcccctgggttctgtctggggagcaggagcagcagtcgccgagagcaacccaaagcaagctgcaggctccccaagaaatgccgtgtgcactagaagtgattgatgcaaggttacagagcacatcacatattcagtgcagcagatcatttgaccaaaacattggaagacgcttttcaaagggccatctgatacaaaaacctgttgccatttgtcctgagaacagtgacacctcatcaacaatacttctgtttcggcacgatccagactggaaacaagcaccattcttgtctgacactcaagaggtcaacaagatcagccaaatgaaaagaacatgcatgatcaggttgattcttctaaaccagtttccaatggaaacacacatgggggaagcacctttagacaatctcagcaaagggaaaacgtttgtaattcattgatggcagttcctccctgccatgtagttgcaaagaagtactccaggtctgttgctactgctctgagtctgggatctgattctgatattttgcacaacggtgacaagcttccaaaaaggaattctagaaagagaggaaaacagtgcaagcgaacaatccgcaaaaggctgaatttggcatcagaaaccatttttgaagagagtacttatggtgcttctcctgcggaggtagttccgaccaatttactggttgataagttgtcagagaccacatcctctgctagctcattggttaaaactgatggtcggtacaaggaggaccatgtggaatgtggtattatgttgaatttagctacattgggaactgatgagatggatggttctggatgtgctggttcatcttataatgatgcaggagggagattaagctccagttgtgtttcttacttgaatgacaaatccaatacgacagattcttcagaatttgacggatccaccttcactgaacatggcttgggagaagaaagcaatagctaccagaagttaacatgcccctatgtttataatcccagttatgcaaccatggattccatctttagtaggtggaacagcgacaacagtgggaactacagtgtcgatgttgaggctaggttaaccgtcaaagacgaaaatagacatgatcattcgaaactgggggcttccacagggcggagtaatgtgaggatggaatgccagttgatagggtcatgttttagtgctactcatgctgaagacacaaacgatcctctagggatcagatcatactcctctaaggatgttactgatagttgtagccatactgaaatggttcagtgcagcagcaagtcctttcattttaaatcagggaggaggaacataaaatcaagtaaaacaccaagctatgttgatttgactgcgtctaacagagtgagaggttctaataggcacaagaacaatggaaaagatagttcagcagtgtggcagaaagtagaaaggaatgacaagatggtatctaaagcaggccatccgagcgatacacctgttcatgataagggtgcaaatgaagttggtaagaagggtgtacaggaagatccaacaagaattcgggcaaaacataatccgaataagaaagtgtgcaaacagaagccttcaaatggagcagttgaattggagcctgccaaaggagaagatgcattgaactcatgccatacattttctggacctttctacacgaagcaagcaccctttctacgccagcaaagaaactctttttcgaaacaaggttctcagtcattgaaaaactactgtgctcctaggaatggtatccccaaggtggcaaaggattacttgcagcaagaagaattacctatgttggtgctagttcatgccaagaacaccagtgataaatcaagctcatattcaagttcagctgatgaagttggtctaactggagtcagcaacaactatccaactgagggaaatgagagttcacaacctgatattgaggtagcagcgtcagtatcttgcaacttggttccagatttggctccacaagctgcttctgatgatttccacatatcagatcctcactctttacgtcctgaaaacaagggtgcatccaacagtcggagctccaataacttgtgcacagatccttttgctgcagaagcaaaggaagctcgatgtgtgaagctactaacagagaataattcccaagaaccctcagataatgcagctgagaccgattacagcaagatgaaagaagtcatcagctatgtttacacagcacagcagcgagtggaagacatccaactttgcattggtaggcctattgctgattttgaaaattttgtttactctgcttctccagttgtgcactgcagctcgtgctctgttggctgtaaatcttgcctgcaagaatgtgtgaaggatggcttatgtttgcatcagactccagatatcactctaagaactgtctggcagtggtacgaagagcctagttgctatggtttggatgtaaaggcacaagatctctggaggtcaaaagccttgtggaatagtcattgtcagtttacaacatattttgtaccatatctatctgctgttcaactcttcagtcaacctaaaagaaccagtggtggaagcattgataaggaatcaatccatagggatgtgacatgtgaaacatctccacagctgaacctgcccccaatatttgcaaagctttttccaaaacaatctgttccagtaaataaaccatctactctgcgtactgaagatgatcaacagtcagcagatggggagctggtatttgaattttttgaatatgaacagccatactcacggcgacaattatttgacaaggtaaatgagctgattgccggtgcgaaaccgtcaaattgccaaatatctggggacccaaagaatctggaggccagcctgcatgatctccatccagcgtcttggtattgtgttgcatggtatcccatataccggatacctgatggaaaattccaggctacattcttgacatatcactctcttggccactggattcgtcggagcagctcagcaggtggggccgctgttttgccagtcatgggcctgcagtcttacaatgccaaggcagagtggtggtttgagatgagcaagtccgaatctgaaggcgggcagtcgcaggccagtgaagcatccgagattctgaaggagagatcgcgcacgctgagtgaggctgcggccgtgttgtccagggccagcgtgctgaagaatgggcagatgagtagaaacagacatccagactacgagttcttcctctcccggagctgatttggaagtgcctcttcgtactcggatttagttaggtttcagtgtatgtatgtgttgttgacactaaagcttattctgcaaccgatgactggaagctgtttgcttagcttagcttagcaatataataataatgctagtcagttctcatccaagtgtcatgtcactgttattgaagtagatcagagatgaaacaggaaggac

SEQ ID NO: 200342 - DNA, 1008 bp, Zea Mays
cgaaagaggatggataattggatcggatagccgtcccctgggttctgtctggggagcaggagcagcagtcgccgagagcaacccaaagcaagctgcaggctccccaagaaatgccgtgtgcactagaagtgattgatgcaaggttacagagcacatcacatattcagtgcagcagatcatttgaccaaaacattggaagacgcttttcaaagggccatctgatacaaaaacctgttgccatttgtcctgagaacagtgacacctcatcaacaatacttctgtttcggcacgatccagactggaaacaagcaccattcttgtctgacactcaagaggtcaacaagggtaaatgagctgattgccggtgcgaaaccgtcaaattgccaaatatctggggacccaaagaatctggaggccagcctgcatgatctccatccagcgtcttggtattgtgttgcatggtatcccatataccggatacctgatggaaaattccaggctacattcttgacatatcactctcttggccactggattcgtcggagcagctcagcaggtggggccgctgttttgccagtcatgggcctgcagtcttacaatgccaaggcagagtggtggtttgagatgagcaagtccgaatctgaaggcgggcagtcgcaggccagtgaagcatccgagattctgaaggagagatcgcgcacgctgagtgaggctgcggccgtgttgtccagggccagcgtgctgaagaatgggcagatgagtagaaacagacatccagactacgagttcttcctctcccggagctgatttggaagtgcctcttcgtactcggatttagttaggtttcagtgtatgtatgtgttgttgacactaaagcttattctgcaaccgatgactggaagctgtttgcttagcttagcttagcaatataataataatgctagtcagttctcatccaagtgtcatgtcactgttattgaagtagatcagagatgaaacaggaaggac

SEQ ID NO: 200343 - DNA, 3537 bp, Zea Mays
ggataattggatcggatagccgtcccctgggttctgtctggggagcaggagcagcagtcgccgagagcaacccaaagcaagctgcaggctccccaagaaatgccgtgtgcactagaagtgattgatgcaaggttacagagcacatcacatattcagtgcagcagatcatttgaccaaaacattggaagacgcttttcaaagggccatctgatacaaaaacctgttgccatttgtcctgagaacagtgacacctcatcaacaatacttctgtttcggcacgatccagactggaaacaagcaccattcttgtctgacactcaagaggtcaacaagatcagccaaatgaaaagaacatgcatgatcaggttgattcttctaaaccagtttccaatggaaacacacatgggggaagcacctttagacaatctcagcaaagggaaaacgtttgtaattcattgatggcagttcctccctgccatgtagttgcaaagaagtactccaggtctgttgctactgctctgagtctgggatctgattctgatattttgcacaacggtgacaagcttccaaaaaggaattctagaaagagaggaaaacagtgcaagcgaacaatccgcaaaaggctgaatttggcatcagaaaccatttttgaagagagtacttatggtgcttctcctgcggaggtagttccgaccaatttactggttgataagttgtcagagaccacatcctctgctagctcattggttaaaactgatggtcggtacaaggaggaccatgtggaatgtggtattatgttgaatttagctacattgggaactgatgagatggatggttctggatgtgctggttcatcttataatgatgcaggagggagattaagctccagttgtgtttcttacttgaatgacaaatccaatacgacagattcttcagaatttgacggatccaccttcactgaacatggcttgggagaagaaagcaatagctaccagaagttaacatgcccctatgtttataatcccagttatgcaaccatggattccatctttagtaggtggaacagcgacaacagtgggaactacagtgtcgatgttgaggctaggttaaccgtcaaagacgaaaatagacatgatcattcgaaactgggggcttccacagggcggagtaatgtgaggatggaatgccagttgatagggtcatgttttagtgctactcatgctgaagacacaaacgatcctctagggatcagatcatactcctctaaggatgttactgatagttgtagccatactgaaatggttcagtgcagcagcaagtcctttcattttaaatcagggaggaggaacataaaatcaagtaaaacaccaagctatgttgatttgactgcgtctaacagagtgagaggttctaataggcacaagaacaatggaaaagatagttcagcagtgtggcagaaagtagaaaggaatgacaagatggtatctaaagcaggccatccgagcgatacacctgttcatgataagggtgcaaatgaagttggtaagaagggtgtacaggaagatccaacaagaattcgggcaaaacataatccgaataagaaagtgtgcaaacagaagccttcaaatggagcagttgaattggagcctgccaaaggagaagatgcattgaactcatgccatacattttctggacctttctacacgaagcaagcaccctttctacgccagcaaagaaactctttttcgaaacaaggttctcagtcattgaaaaactactgtgctcctaggaatggtatccccaaggtggcaaaggattacttgcagcaagaagaattacctatgttggtgctagttcatgccaagaacaccagtgataaatcaagctcatattcaagttcagctgatgaagttggtctaactggagtcagcaacaactatccaactgagggaaatgagagttcacaacctgatattgaggtagcagcgtcagtatcttgcaacttggttccagatttggctccacaagctgcttctgatgatttccacatatcagatcctcactctttacgtcctgaaaacaagggtgcatccaacagtcggagctccaataacttgtgcacagatccttttgctgcagaagcaaaggaagctcgatgtgtgaagctactaacagagaataattcccaagaaccctcagataatgcagctgagaccgattacagcaagatgaaagaagtcatcagctatgtttacacagcacagcagcgagtggaagacatccaactttgcattggtaggcctattgctgattttgaaaattttgtttactctgcttctccagttgtgcactgcagctcgtgctctgttggctgtaaatcttgcctgcaagaatgtgtgaaggatggcttatgtttgcatcagactccagatatcactctaagaactgtctggcagtggtacgaagagcctagttgctatggtttggatgtaaaggcacaagatctctggaggtcaaaagccttgtggaatagtcattgtcagtttacaacatattttgtaccatatctatctgctgttcaactcttcagtcaacctaaaagaaccagtggtggaagcattgataaggaatcaatccatagggatgtgacatgtgaaacatctccacagctgaacctgcccccaatatttgcaaagctttttccaaaacaatctgttccagtaaataaaccatctactctgcgtactgaagatgatcaacagtcagcagatggggagctggtatttgaattttttgaatatgaacagccatactcacggcgacaattatttgacaaggtaaatgagctgattgccggtgcgaaaccgtcaaattgccaaatatctggggacccaaagaatctggaggccagcctgcatgatctccatccagcgtcttggtatgctctcttttcatggaacgtgcacttgtatctggtattgtgttgcatggtatcccatataccggatacctgatggaaaattccaggctacattcttgacatatcactctcttggccactggattcgtcggagcagctcagcaggtggggccgctgttttgccagtcatgggcctgcagtcttacaatgccaaggcagagtggtggtttgagatgagcaagtccgaatctgaaggcgggcagtcgcaggccagtgaagcatccgagattctgaaggagagatcgcgcacgctgagtgaggctgcggccgtgttgtccagggccagcgtgctgaagaatgggcagatgagtagaaacagacatccagactacgagttcttcctctcccggagctgatttggaagtgcctcttcgtactcggatttagttaggtttcagtgtatgtatgtgttgttgacactaaagcttattctgcaaccgatgactggaagctgtttgcttagcttagcttagcaatataataataatgctagtcagttctcatccaagtgtcatgtcactgttattgaagtagatcagagatgaaacaggaaggac

SEQ ID NO: 200344 - DNA, 3767 bp, Zea Mays
ctgggttctgtctggggagcaggagcagcagtcgccgagagcaacccaaagcaagctgcagttcgtaagaggatcaggggccggcgccggaggagatcccccgcgctatttggagctccccaagaaatgccgtgtgcactagaagtgattgatgcaaggttacagagcacatcacatattcagtgcagcagatcatttgaccaaaacattggaagacgcttttcaaagggccatctgatacaaaaacctgttgccatttgtcctgagaacagtgacacctcatcaacaatacttctgtttcggcacgatccagactggaaacaagcaccattcttgtctgacactcaagaggtcaacaaggtaatctctttgtcatcaggagctcttgatacagattgccttgagctattatctgaacagccaagaatactgttttgcttagatcagccaaatgaaaagaacatgcatgatcaggttgattcttctaaaccagtttccaatggaaacacacatgggggaagcacctttagacaatctcagcaaagggaaaacgtttgtaattcattgatggcagttcctccctgccatgtagttgcaaagaagtactccaggtctgttgctactgctctgagtctgggatctgattctgatattttgcacaacggtgacaagcttccaaaaaggaattctagaaagagaggaaaacagtgcaagcgaacaatccgcaaaaggctgaatttggcatcagaaaccatttttgaagagagtacttatggtgcttctcctgcggaggtagttccgaccaatttactggttgataagttgtcagagaccacatcctctgctagctcattggttaaaactgatggtcggtacaaggaggaccatgtggaatgtggtattatgttgaatttagctacattgggaactgatgagatggatggttctggatgtgctggttcatcttataatgatgcaggagggagattaagctccagttgtgtttcttacttgaatgacaaatccaatacgacagattcttcagaatttgacggatccaccttcactgaacatggcttgggagaagaaagcaatagctaccagaagttaacatgcccctatgtttataatcccagttatgcaaccatggattccatctttagtaggtggaacagcgacaacagtgggaactacagtgtcgatgttgaggctaggttaaccgtcaaagacgaaaatagacatgatcattcgaaactgggggcttccacagggcggagtaatgtgaggatggaatgccagttgatagggtcatgttttagtgctactcatgctgaagacacaaacgatcctctagggatcagatcatactcctctaaggatgttactgatagttgtagccatactgaaatggttcagtgcagcagcaagtcctttcattttaaatcagggaggaggaacataaaatcaagtaaaacaccaagctatgttgatttgactgcgtctaacagagtgagaggttctaataggcacaagaacaatggaaaagatagttcagcagtgtggcagaaagtagaaaggaatgacaagatggtatctaaagcaggccatccgagcgatacacctgttcatgataagggtgcaaatgaagttggtaagaagggtgtacaggaagatccaacaagaattcgggcaaaacataatccgaataagaaagtgtgcaaacagaagccttcaaatggagcagttgaattggagcctgccaaaggagaagatgcattgaactcatgccatacattttctggacctttctacacgaagcaagcaccctttctacgccagcaaagaaactctttttcgaaacaaggttctcagtcattgaaaaactactgtgctcctaggaatggtatccccaaggtggcaaaggattacttgcagcaagaagaattacctatgttggtgctagttcatgccaagaacaccagtgataaatcaagctcatattcaagttcagctgatgaagttggtctaactggagtcagcaacaactatccaactgagggaaatgagagttcacaacctgatattgaggtagcagcgtcagtatcttgcaacttggttccagatttggctccacaagctgcttctgatgatttccacatatcagatcctcactctttacgtcctgaaaacaagggtgcatccaacagtcggagctccaataacttgtgcacagatccttttgctgcagaagcaaaggaagctcgatgtgtgaagctactaacagagaataattcccaagaaccctgtaagtggtattctgctgctggacacttgtcacagaagtgggttcctgttggaaagaaagagacttgcaatgggatctgtttagatgtctcagctaatggtgatgacagcaacttgcctagtgaaaggacttataaactgaacttatctgaacatgctgcagcagataatgcagctgagaccgattacagcaagatgaaagaagtcatcagctatgtttacacagcacagcagcgagtggaagacatccaactttgcattggtaggcctattgctgattttgaaaattttgtttactctgcttctccagttgtgcactgcagctcgtgctctgttggctgtaaatcttgcctgcaagaatgtgtgaaggatggcttatgtttgcatcagactccagatatcactctaagaactgtctggcagtggtacgaagagcctagttgctatggtttggatgtaaaggcacaagatctctggaggtcaaaagccttgtggaatagtcattgtcagtttacaacatattttgtaccatatctatctgctgttcaactcttcagtcaacctaaaagaaccagtggtggaagcattgataaggaatcaatccatagggatgtgacatgtgaaacatctccacagctgaacctgcccccaatatttgcaaagctttttccaaaacaatctgttccagtaaataaaccatctactctgcgtactgaagatgatcaacagtcagcagatggggagctggtatttgaattttttgaatatgaacagccatactcacggcgacaattatttgacaaggtaaatgagctgattgccggtgcgaaaccgtcaaattgccaaatatctggggacccaaagaatctggaggccagcctgcatgatctccatccagcgtcttggtattgtgttgcatggtatcccatataccggatacctgatggaaaattccaggctacattcttgacatatcactctcttggccactggattcgtcggagcagctcagcaggtggggccgctgttttgccagtcatgggcctgcagtcttacaatgccaagagtggtggtttgagatgagcaagtccgaatctgaaggcgggcagtcgcaggccagtgaagcatccgagattctgaaggagagatcgcgcacgctgagtgaggctgcggccgtgttgtccagggccagcgtgctgaagaatgggcagatgagtagaaacagacatccagactacgagttcttcctctcccggagctgatttggaagtgcctcttcgtactcggatttagttaggtttcagtgtatgtatgtgttgttgacactaaagcttattctgcaaccgatgactggaagctgtttgcttagcttagcttagcaatataataataatgctagtcagttctcatccaagtgtcatgtcactgttattgaagtagatcagagatgaaacaggaaggac

SEQ ID NO: 200345 - DNA, 5337 bp, Zea Mays
gtcgcacaacatgggtgcaaaaaaaaagggagggggcgtatgggcctggacggcggcctcattaggagcggcagttagggttaggaaaccctaaccggccactaccttcccaaacggcggcggtcagcacctggcggcggtgggcgcgaccccggtccccggcctcccctggcggtcgtacgggcagcaccgacgcgaggccactcggtccctcggcgtaggccggcgcacgcccgcggcggcatggcgtcccggtgacgctggcggccagggcgtagctctctggcggcgcgggcgcggctgtgggtgtagccccggcgtcccacggcgtggacacgaggcgtggccggtggagccccggtgcagcgcggtcgcgcacccggctcaggccatcccggcccaaatggcgcggcggcgccccctggtggccggatccgcccggcatggccaccccacaaggggcgggcgcagctcggcggtccccctgcgcaggctcgcgcgaaccggcgcggcttcctggagggcgcgcggctccctggtgcgatgaggggcggcggctggggggcttgggctccctggtggcgcgcaggcgcgggatcagcccgactcgggcggatcggctactgccacggcgcggagggtccggcctcggcggctcggcggcccccagccccggctacctggcgcggacggtccggccacggtggcacagggcgcggagggtccggcctcggcggctcggcggcccccagccccggctacctggcgcggacggtccggccacggtggcacagggcgcggcccctgttgacgcgctagcgcggtcccctgacggcggcgcgcgggctcgcggccctcctgcgcgcgcgagcacggccccccggcggtggtccggttgccaggcgcggcgagcccgctgtgtcctcccggcatcagcgcgggcgtatggcccctcggcatggcggccccctcgacgtgcaggcgcagtggccctgtcaatgcgctgccccgacgaccggtccggcgcgggctaggccagcgcgtgtgcgcagccccgacggggcgcagtaccatgggcaggacgcgtgcgaagcccccgcagaacccctggtggcccgtggccctgatccggcttggaacatggccggtggccccgatgagccatggccgtgaatggcgaagcaaccatcagaaacaagaaagattaaacaaaatagtgataatgcgtaccacataatccttctgcacatttctgtttcttaacttctgtgagcgattccttctctcagcaacttcaacttctctctgtttctcacgagcagtgctgataacgtgttaaactctatcacaacgctcagtggcaaatgaagattaacagagacaaagacaaatcgctgggacaatcctttattgcagagtagtgaagtatatatacaagagttcccaaggggtgtgtcccttgggaaataactgtcactacgacatatggatggattagatcacatgtataaaatgttttataacaatgtgaaaccacatctgtggaactttcagtgtgtgatgactgggtcactggtggaataccgtgttttctgagctggtcgctttcagttcgcggccaaagtcgatagctcaactatcttttgagtttagctcccaggttctttggcttcatttcaacaagcccgatcttcttctgacctctaaggtaaacctgcgaggaaaccattcccaaagagcatggcactctggaacggcataggtcaggtggcaagcatcgcacagttagccggggtcgatgcctatgggctcatctccatgatcgtggaggctgcaaagacggtgaagaggaaccgggagacctgccagctactggcacgccgtgcaaggatgattggggaccttctacatcagcttgaaaggacacagctgatgcagcacatggagacgaggaacccagtggagcatctggaggagacgcttcggcatgcgtatgtcctcatcacatcctgtcgcaacagcagctacctatacaactgctgtatgggagggaagcaggctgatcggcttcgagaggtgcagaatgagattaccttctacctccaacttttcccccttgtcagctttgtcgacaacacccgtacttgggagcggcttctgagtagagcttgtcctctgtgcacaacagaaaacatggatgagttacatgcagcagcacatcatgtggaacatgaagatgggatcagatcagaggccatcaaggcaactaaattcgaaaatctcggaagtcatcctaccctaaaacctgacatagatcaaatggaaggccaagtcatgaggatgggaggattagtaaatctcattggtggtacaaaaggagcagagttatcatgttttaccttttctcatattttggcggcgacagacaacttttcagagaaaaatttggttggtaagggtggatttggttatgtctacaagggcaatcttattaatggtcttaacgttgccattaaaagatttgatgcatgttcatcatatcaaggtccacatgagttcagaactgagattgatgccattccaaatcttcgacacaagaacataattggtctacttgggtactgtgttcaaggagaagaaagcatacttgtctatgaatatatgtcaaataaatgcttggcatctgtcattgctgatgaaacaaaaagggggttgctaaattggtccaagcgtcttcaaataatcaaaggcatagcagatggtcttgcttttctgcatgggcattctcagatgtgcattgtccacagggacataaaaccaagcaacatcctgctggaccatgaaatgaatgccaagattactgattttggtctggcattaatgttggctccaaaatcgactgcagaggttcctgttttgggcacataatcctgaatatattgttactggaaaaatctcggagaaggcagacatatatggatttggcatagtactttttgagataataagtggaaggtcgatccattcttatatgaaggcagagggcactcgagagctaccataccctgcttatgtaagtatttgccttgccgcagcacacaaatacaacccaaagacgctgcacaagcttgttgatccattgttgcgcgtggacgagcatgaacgggctcagattatggaatgcgtgagggtggcgcagttatgcgttgaccatcgtgccaagcatcggcctgtgatgtcagaagttgtcaccatgcttggcatggcagcatcaaagggatagttgtagctttgcaagacccacaaagggatagctgtgaatgatgcaagtgtgaactaattaatgagctctactcaactattttcccccttctcatgcatgattgtgtaaacatcagggagattagtcagtgaaatatttggcatgcaccttacttgagcgctgtggctaataaattgtggttggctggaatgcaaattgctccatggtgttgttaatttggtctaagctggagatgaagtgactgactccatgggcatgtggttcacctccctgctggtggtggacgacaaatatcaggctggcattcacgtagaatgtgcggcaaagactgatgactgatgagtgatgactggtgaggaaccagacaaatgatgagttgaatctttcaaagtttgacagttcagtctccaatttttttttctcaaatcattggtactgtgtacaagcttgaagcttcctggaaacagcccctcctccacgggtttgttcaaccatgtgagcttccacaccagtacaggtcatcagtgtcttggactttctctgccactcccagaccttggtatcctttttaagggcgctcattctgtcattcaccacacctgtctcgttcctcactaccacaggtccaaagcaagcaagaagaaacgaaggacgataatggctctggtcgggcaggtggcgacggtggcgcagctggtgggcgtggacgcgttcagcctcatcacgatgatcgcggaggcggcgcagacggcgcggcggaaccgcgccgtgtgccggcagctggcccggcgcgtggagatgatcggcagcctgctccggcggctgcgcgagcaggacgacaacgacgacatgcggctgctgcggcacgcggagacgcgcggccccgtggaggcgctggaggagacgctccggcgcgcctacctgctggtgcggtcctgccagcggcgcgggtacgcgttccgctgcctgatgggggcgcggcacgcggacgagctccgcgagatgcagggcgagatcggcttctacctcgacctcttccccctcatcagctacgtcgactgggcgaggcgtcgcggcaacggcaacggcaaggccgcctgtggtgacactcgttctttgcaagaggcacctatggtaagaccatgtcttgtgccgttcctgtttctctcgctcctgcgatggatgcaattgttcagggagtacgtcatgcacctgctctgcttatcagcttatgtttactgacgtgtgtatctgtgaaatcattttgcatgttaattttcattaacaatgatctagctagctagctagcaccttaattttcattgctgggaaacaagctagctagctactagtatgcagctgttgttggtcctctgtttttcggactactatctgtcgagttcaggtgaaattgcctttcttttttgaaccagattaaataggtatgttggaataatcctatttttttcctcttgggaacgcaaccagcacacgttcatcaggagtgtttctgtttggcctggctatctgtttcggtttggatacatacagatagcttaccttcttggttcatcaggagtgcaaagttgcaggatctcaggcggcgctgacgatgacgcagcagccctggagccttccacggccgagcaaggacgagtaggaaggagggccacatgcgtcgtggccccgtgacacctgcttcacgttctctcagattttaattttatgacgcacagcgaaaagcccaaaaggaggggggggaagatgctgtcgatacagatcgttcgatccacacgggaagatctgaagcatgagagcatgtctgaaacagtcgagatgtcagacatgtcctgccgccattttattttttacccgctcatgtacgggggttatttttttttcgtatttctttcctcagcggcgctgcagaatagaaccgatcgaggcggagttgtctgtcatctcatcatctctcagtaatattcacacgcgctgcgtctctcccaagggcgccgccaacttgtacattgagcacaccaccaaaatcgagggca

SEQ ID NO: 200346 - DNA, 5548 bp, Zea Mays
aaagtctattatattcataataaacagtcaggtatgtacaatatatgtaatagtttgcagtctaaatatcgaatttagacgcacttatacgagttagaatctgaaattacatataaaacaatcttgtactgaaattcaaaatttaaaatagtaaagtagactattctggatcctggaaaaacggcccaggcagcctgccagaggcggcccattttggcctggtcgcacaacatgggtgcaaaaaaaaagggagggggcgtatgggcctggacggcggcctcattaggagcggcagttagggttaggaaaccctaaccggccactaccttcccaaacggcggcggtcagcacctggcggcggtgggcgcgaccccggtccccggcctcccctggcggtcgtacgggcagcaccgacgcgaggccactcggtccctcggcgtaggccggcgcacgcccgcggcggcatggcgtcccggtgacgctggcggccagggcgtagctctctggcggcgcgggcgcggctgtgggtgtagccccggcgtcccacggcgtggacacgaggcgtggccggtggagccccggtgcagcgcggtcgcgcacccggctcaggccatcccggcccaaatggcgcggcggcgccccctggtggccggatccgcccggcatggccaccccacaaggggcgggcgcagctcggcggtccccctgcgcaggctcgcgcgaaccggcgcggcttcctggagggcgcgcggctccctggtgcgatgaggggcggcggctggggggcttgggctccctggtggcgcgcaggcgcgggatcagcccgactcgggcggatcggctactgccacggcgcggagggtccggcctcggcggctcggcggcccccagccccggctacctggcgcggacggtccggccacggtggcacagggcgcggagggtccggcctcggcggctcggcggcccccagccccggctacctggcgcggacggtccggccacggtggcacagggcgcggcccctgttgacgcgctagcgcggtcccctgacggcggcgcgcgggctcgcggccctcctgcgcgcgcgagcacggccccccggcggtggtccggttgccaggcgcggcgagcccgctgtgtcctcccggcatcagcgcgggcgtatggcccctcggcatggcggccccctcgacgtgcaggcgcagtggccctgtcaatgcgctgccccgacgaccggtccggcgcgggctaggccagcgcgtgtgcgcagccccgacggggcgcagtaccatgggcaggacgcgtgcgaagcccccgcagaacccctggtggcccgtggccctgatccggcttggaacatggccggtggccccgatgagccatggccgtgaatggcgaagcaaccatcagaaacaagaaagattaaacaaaatagtgataatgcgtaccacataatccttctgcacatttctgtttcttaacttctgtgagcgattccttctctcagcaacttcaacttctctctgtttctcacgagcagtgctgataacgtgttaaactctatcacaacgctcagtggcaaatgaagattaacagagacaaagacaaatcgctgggacaatcctttattgcagagtagtgaagtatatatacaagagttcccaaggggtgtgtcccttgggaaataactgtcactacgacatatggatggattagatcacatgtataaaatgttttataacaatgtgaaaccacatctgtggaactttcagtgtgtgatgactgggtcactggtggaataccgtgttttctgagctggtcgctttcagttcgcggccaaagtcgatagctcaactatcttttgagtttagctcccaggttctttggcttcatttcaacaagcccgatcttcttctgacctctaaggtaaacctgcgaggaaaccattcccaaagagcatggcactctggaacggcataggtcaggtggcaagcatcgcacagttagccggggtcgatgcctatgggctcatctccatgatcgtggaggctgcaaagacggtgaagaggaaccgggagacctgccagctactggcacgccgtgcaaggatgattggggaccttctacatcagcttgaaaggacacagctgatgcagcacatggagacgaggaacccagtggagcatctggaggagacgcttcggcatgcgtatgtcctcatcacatcctgtcgcaacagcagctacctatacaactgctgtatgggagggaagcaggctgatcggcttcgagaggtgcagaatgagattaccttctacctccaacttttcccccttgtcagctttgtcgacaacacccgtacttgggagcggcttctgagtagagcttgtcctctgtgcacaacagaaaacatggatgagttacatgcagcagcacatcatgtggaacatgaagatgggatcagatcagaggccatcaaggcaactaaattcgaaaatctcggaagtcatcctaccctaaaacctgacatagatcaaatggaaggccaagtcatgaggatgggaggattagtaaatctcattggtggtacaaaaggagcagagttatcatgttttaccttttctcatattttggcggcgacagacaacttttcagagaaaaatttggttggtaagggtggatttggttatgtctacaagggcaatcttattaatggtcttaacgttgccattaaaagatttgatgcatgttcatcatatcaaggtccacatgagttcagaactgagattgatgccattccaaatcttcgacacaagaacataattggtctacttgggtactgtgttcaaggagaagaaagcatacttgtctatgaatatatgtcaaataaatgcttggcatctgtcattgctgatgaaacaaaaagggggttgctaaattggtccaagcgtcttcaaataatcaaaggcatagcagatggtcttgcttttctgcatgggcattctcagatgtgcattgtccacagggacataaaaccaagcaacatcctgctggaccatgaaatgaatgccaagattactgattttggtctggcattaatgttggctccaaaatcgactgcagaggttcctgttttgggcacatatggctatgcagatcctgaatatattgttactggaaaaatctcggagaaggcagacatatatggatttggcatagtactttttgagataataagtggaaggtcgatccattcttatatgaaggcagagggcactcgagagctaccataccctgcttatgcacacaaatacaacccaaagacgctgcacaagcttgttgatccattgttgcgcgtggacgagcatgaacgggctcagattatggaatgcgtgagggtggcgcagttatgcgttgaccatcgtgccaagcatcggcctgtgatgtcagaagttgtcaccatgcttggcatggcagcatcaaagggatagttgtagctttgcaagacccacaaagggatagctgtgaatgatgcaagtgtgaactaattaatgagctctactcaactattttcccccttctcatgcatgattgtgtaaacatcagggagattagtcagtgaaatatttggcatgcaccttacttgagcgctgtggctaataaattgtggttggctggaatgcaaattgctccatggtgttgttaatttggtctaagctggagatgaagtgactgactccatgggcatgtggttcacctccctgctggtggtggacgacaaatatcaggctggcattcacgtagaatgtgcggcaaagactgatgactgatgagtgatgactggtgaggaaccagacaaatgatgagttgaatctttcaaagtttgacagttcagtctccaatttttttttctcaaatcattggtactgtgtacaagcttgaagcttcctggaaacagcccctcctccacgggtttgttcaaccatgtgagcttccacaccagtacaggtcatcagtgtcttggactttctctgccactcccagaccttggtatcctttttaagggcgctcattctgtcattcaccacacctgtctcgttcctcactaccacaggtccaaagcaagcaagaagaaacgaaggacgataatggctctggtcgggcaggtggcgacggtggcgcagctggtgggcgtggacgcgttcagcctcatcacgatgatcgcggaggcggcgcagacggcgcggcggaaccgcgccgtgtgccggcagctggcccggcgcgtggagatgatcggcagcctgctccggcggctgcgcgagcaggacgacaacgacgacatgcggctgctgcggcacgcggagacgcgcggccccgtggaggcgctggaggagacgctccggcgcgcctacctgctggtgcggtcctgccagcggcgcgggtacgcgttccgctgcctgatgggggcgcggcacgcggacgagctccgcgagatgcagggcgagatcggcttctacctcgacctcttccccctcatcagctacgtcgactgggcgaggcgtcgcggcaacggcaacggcaaggccgcctgtggtgacactcgttctttgcaagaggcacctatggtaagaccatgtcttgtgccgttcctgtttctctcgctcctgcgatggatgcaattgttcagggagtacgtcatgcacctgctctgcttatcagcttatgtttactgacgtgtgtatctgtgaaatcattttgcatgttaattttcattaacaatgatctagctagctagctagcaccttaattttcattgctgggaaacaagctagctagctactagtatgcagctgttgttggtcctctgtttttcggactactatctgtcgagttcaggtgaaattgcctttcttttttgaaccagattaaataggtatgttggaataatcctatttttttcctcttgggaacgcaaccagcacacgttcatcaggagtgtttctgtttggcctggctatctgtttcggtttggatacatacagatagcttaccttcttggttcatcaggagtgcaaagttgcaggatctcaggcggcgctgacgatgacgcagcagccctggagccttccacggccgagcaaggacgagtaggaaggagggccacatgcgtcgtggccccgtgacacctgcttcacgttctctcagattttaattttatgacgcacagcgaaaagcccaaaaggaggggggggaagatgctgtcgatacagatcgttcgatccacacgggaagatctgaagcatgagagcatgtctgaaacagtcgagatgtcagacatgtcctgccgccattttattttttacccgctcatgtacgggggttatttttttttcgtatttctttcctcagcggcgctgcagaatagaaccgatcgaggcggagttgtctgtcatctcatcatctctcagtaatattcacacgcgctgcgtctctcccaagggcgccgccaacttgtacattgagcacaccaccaaaatcgagggca

SEQ ID NO: 200347 - DNA, 5411 bp, Zea Mays
aaagtctattatattcataataaacagtcaggtatgtacaatatatgtaatagtttgcagtctaaatatcgaatttagacgcacttatacgagttagaatctgaaattacatataaaacaatcttgtactgaaattcaaaatttaaaatagtaaagtagactattctggatcctggaaaaacggcccaggcagcctgccagaggcggcccattttggcctggtcgcacaacatgggtgcaaaaaaaaagggagggggcgtatgggcctggacggcggcctcattaggagcggcagttagggttaggaaaccctaaccggccactaccttcccaaacggcggcggtcagcacctggcggcggtgggcgcgaccccggtccccggcctcccctggcggtcgtacgggcagcaccgacgcgaggccactcggtccctcggcgtaggccggcgcacgcccgcggcggcatggcgtcccggtgacgctggcggccagggcgtagctctctggcggcgcgggcgcggctgtgggtgtagccccggcgtcccacggcgtggacacgaggcgtggccggtggagccccggtgcagcgcggtcgcgcacccggctcaggccatcccggcccaaatggcgcggcggcgccccctggtggccggatccgcccggcatggccaccccacaaggggcgggcgcagctcggcggtccccctgcgcaggctcgcgcgaaccggcgcggcttcctggagggcgcgcggctccctggtgcgatgaggggcggcggctggggggcttgggctccctggtggcgcgcaggcgcgggatcagcccgactcgggcggatcggctactgccacggcgcggagggtccggcctcggcggctcggcggcccccagccccggctacctggcgcggacggtccggccacggtggcacagggcgcggagggtccggcctcggcggctcggcggcccccagccccggctacctggcgcggacggtccggccacggtggcacagggcgcggcccctgttgacgcgctagcgcggtcccctgacggcggcgcgcgggctcgcggccctcctgcgcgcgcgagcacggccccccggcggtggtccggttgccaggcgcggcgagcccgctgtgtcctcccggcatcagcgcgggcgtatggcccctcggcatggcggccccctcgacgtgcaggcgcagtggccctgtcaatgcgctgccccgacgaccggtccggcgcgggctaggccagcgcgtgtgcgcagccccgacggggcgcagtaccatgggcaggacgcgtgcgaagcccccgcagaacccctggtggcccgtggccctgatccggcttggaacatggccggtggccccgatgagccatggccgtgaatggcgaagcaaccatcagaaacaagaaagattaaacaaaatagtgataatgcgtaccacataatccttctgcacatttctgtttcttaacttctgtgagcgattccttctctcagcaacttcaacttctctctgtttctcacgagcagtgctgataacgtgttaaactctatcacaacgctcagtggcaaatgaagattaacagagacaaagacaaatcgctgggacaatcctttattgcagagtagtgaagtatatatacaagagttcccaaggggtgtgtcccttgggaaataactgtcactacgacatatggatggattagatcacatgtataaaatgttttataacaatgtgaaaccacatctgtggaactttcagtgtgtgatgactgggtcactggtggaataccgtgttttctgagctggtcgctttcagttcgcggccaaagtcgatagctcaactatcttttgagtttagctcccaggttctttggcttcatttcaacaagcccgatcttcttctgacctctaaggtaaacctgcgaggaaaccattcccaaagagcatggcactctggaacggcataggtcaggtggcaagcatcgcacagttagccggggtcgatgcctatgggctcatctccatgatcgtggaggctgcaaagacggtgaagaggaaccgggagacctgccagctactggcacgccgtgcaaggatgattggggaccttctacatcagcttgaaaggacacagctgatgcagcacatggagacgaggaacccagtggagcatctggaggagacgcttcggcatgcgtatgtcctcatcacatcctgtcgcaacagcagctacctatacaactgctgtatgggagggaagcaggctgatcggcttcgagaggtgcagaatgagattaccttctacctccaacttttcccccttgtcagctttgtcgacaacacccgtacttgggagcggcttctgagtagagcttgtcctctgtgcacaacagaaaacatggatgagttacatgcagcagcacatcatgtggaacatgaagatggatcagaggccatcaaggcaactaaattcgaaaatctcggaagtcatcctaccctaaaacctgacatagatcaaatggaaggccaagtcatgaggatgggaggattagtaaatctcattggtggtacaaaaggagcagagttatcatgttttaccttttctcatattttggcggcgacagacaacttttcagagaaaaatttggttggtaagggtggatttggttatgtctacaagggcaatcttattaatggtcttaacgttgccattaaaagatttgatgcatgttcatcatatcaaggtccacatgagttcagaactgagattgatgccattccaaatcttcgacacaagaacataattggtctacttgggtactgtgttcaaggagaagaaagcatacttgtctatgaatatatgtcaaataaatgcttggcatctgtcattgctggcaagtttttggggttgctaaattggtccaagcgtcttcaaataatcaaaggcatagcagatggtcttgcttttctgcatgggcattctcagatgtgcattgtccacagggacataaaaccaagcaacatcctgctggaccatgaaatgaatgccaagattactgattttggtctggcattaatgttggctccaaaatcgactgcagaggttcctgttttgggcacatatggctatgcagatcctgaatatattgttactggaaaaatctcggagaaggcagacatatatggatttggcatagtactttttgagataataagtggaaggtcgatccattcttatatgaaggcagagggcactcgagagctaccataccctgcttatgcacacaaatacaacccaaagacgctgcacaagcttgttgatccattgttgcgcgtggacgagcatgaacgggctcagattatggaatgcgtgagggtggcgcagttatgcgttgaccatcgtgccaagcatcggcctgtgatgtcagaagttgtcaccatgcttggcatggcagcatcaaagggatagttgtagctttgcaagacccacaaagggatagctgtgaatgatgcaagtgtgaactaattaatgagctctactcaactattttcccccttctcatgcatgattgtgtaaacatcagggagattagtcagtgaaatatttggcatgcaccttacttgagcgctgtggctaataaattgtggttggctggaatgcaaattgctccatggtgttgttaatttggtctaagctggagatgaagtgactgactccatgggcatgtggttcacctccctgctggtggtggacgacaaatatcaggctggcattcacgtagaatgtgcggcaaagactgatgactgatgagtgatgactggtgaggaaccagacaaatgatgagttgaatctttcaaagtttgacagttcagtctccaatttttttttctcaaatcattggtactgtgtacaagcttgaagcttcctggaaacagcccctcctccacgggtttgttcaaccatgtccaaagcaagcaagaagaaacgaaggacgataatggctctggtcgggcaggtggcgacggtggcgcagctggtgggcgtggacgcgttcagcctcatcacgatgatcgcggaggcggcgcagacggcgcggcggaaccgcgccgtgtgccggcagctggcccggcgcgtggagatgatcggcagcctgctccggcggctgcgcgagcaggacgacaacgacgacatgcggctgctgcggcacgcggagacgcgcggccccgtggaggcgctggaggagacgctccggcgcgcctacctgctggtgcggtcctgccagcggcgcgggtacgcgttccgctgcctgatgggggcgcggcacgcggacgagctccgcgagatgcagggcgagatcggcttctacctcgacctcttccccctcatcagctacgtcgactgggcgaggcgtcgcggcaacggcaacggcaaggccgcctgtggtgacactcgttctttgcaagaggcacctatggtaagaccatgtcttgtgccgttcctgtttctctcgctcctgcgatggatgcaattgttcagggagtacgtcatgcacctgctctgcttatcagcttatgtttactgacgtgtgtatctgtgaaatcattttgcatgttaattttcattaacaatgatctagctagctagctagcaccttaattttcattgctgggaaacaagctagctagctactagtatgcagctgttgttggtcctctgtttttcggactactatctgtcgagttcaggtgaaattgcctttcttttttgaaccagattaaataggtatgttggaataatcctatttttttcctcttgggaacgcaaccagcacacgttcatcaggagtgtttctgtttggcctggctatctgtttcggtttggatacatacagatagcttaccttcttggttcatcaggagtgcaaagttgcaggatctcaggcggcgctgacgatgacgcagcagccctggagccttccacggccgagcaaggacgagtaggaaggagggccacatgcgtcgtggccccgtgacacctgcttcacgttctctcagattttaattttatgacgcacagcgaaaagcccaaaaggaggggggggaagatgctgtcgatacagatcgttcgatccacacgggaagatctgaagcatgagagcatgtctgaaacagtcgagatgtcagacatgtcctgccgccattttattttttacccgctcatgtacgggggttatttttttttcgtatttctttcctcagcggcgctgcagaatagaaccgatcgaggcggagttgtctgtcatctcatcatctctcagtaatattcacacgcgctgcgtctctcccaagggcgccgccaacttgtacattgagcacaccaccaaaatcgagggca

SEQ ID NO: 200348 - DNA, 5542 bp, Zea Mays
aaagtctattatattcataataaacagtcaggtatgtacaatatatgtaatagtttgcagtctaaatatcgaatttagacgcacttatacgagttagaatctgaaattacatataaaacaatcttgtactgaaattcaaaatttaaaatagtaaagtagactattctggatcctggaaaaacggcccaggcagcctgccagaggcggcccattttggcctggtcgcacaacatgggtgcaaaaaaaaagggagggggcgtatgggcctggacggcggcctcattaggagcggcagttagggttaggaaaccctaaccggccactaccttcccaaacggcggcggtcagcacctggcggcggtgggcgcgaccccggtccccggcctcccctggcggtcgtacgggcagcaccgacgcgaggccactcggtccctcggcgtaggccggcgcacgcccgcggcggcatggcgtcccggtgacgctggcggccagggcgtagctctctggcggcgcgggcgcggctgtgggtgtagccccggcgtcccacggcgtggacacgaggcgtggccggtggagccccggtgcagcgcggtcgcgcacccggctcaggccatcccggcccaaatggcgcggcggcgccccctggtggccggatccgcccggcatggccaccccacaaggggcgggcgcagctcggcggtccccctgcgcaggctcgcgcgaaccggcgcggcttcctggagggcgcgcggctccctggtgcgatgaggggcggcggctggggggcttgggctccctggtggcgcgcaggcgcgggatcagcccgactcgggcggatcggctactgccacggcgcggagggtccggcctcggcggctcggcggcccccagccccggctacctggcgcggacggtccggccacggtggcacagggcgcggagggtccggcctcggcggctcggcggcccccagccccggctacctggcgcggacggtccggccacggtggcacagggcgcggcccctgttgacgcgctagcgcggtcccctgacggcggcgcgcgggctcgcggccctcctgcgcgcgcgagcacggccccccggcggtggtccggttgccaggcgcggcgagcccgctgtgtcctcccggcatcagcgcgggcgtatggcccctcggcatggcggccccctcgacgtgcaggcgcagtggccctgtcaatgcgctgccccgacgaccggtccggcgcgggctaggccagcgcgtgtgcgcagccccgacggggcgcagtaccatgggcaggacgcgtgcgaagcccccgcagaacccctggtggcccgtggccctgatccggcttggaacatggccggtggccccgatgagccatggccgtgaatggcgaagcaaccatcagaaacaagaaagattaaacaaaatagtgataatgcgtaccacataatccttctgcacatttctgtttcttaacttctgtgagcgattccttctctcagcaacttcaacttctctctgtttctcacgagcagtgctgataacgtgttaaactctatcacaacgctcagtggcaaatgaagattaacagagacaaagacaaatcgctgggacaatcctttattgcagagtagtgaagtatatatacaagagttcccaaggggtgtgtcccttgggaaataactgtcactacgacatatggatggattagatcacatgtataaaatgttttataacaatgtgaaaccacatctgtggaactttcagtgtgtgatgactgggtcactggtggaataccgtgttttctgagctggtcgctttcagttcgcggccaaagtcgatagctcaactatcttttgagtttagctcccaggttctttggcttcatttcaacaagcccgatcttcttctgacctctaaggtaaacctgcgaggaaaccattcccaaagagcatggcactctggaacggcataggtcaggtggcaagcatcgcacagttagccggggtcgatgcctatgggctcatctccatgatcgtggaggctgcaaagacggtgaagaggaaccgggagacctgccagctactggcacgccgtgcaaggatgattggggaccttctacatcagcttgaaaggacacagctgatgcagcacatggagacgaggaacccagtggagcatctggaggagacgcttcggcatgcgtatgtcctcatcacatcctgtcgcaacagcagctacctatacaactgctgtatgggagggaagcaggctgatcggcttcgagaggtgcagaatgagattaccttctacctccaacttttcccccttgtcagctttgtcgacaacacccgtacttgggagcggcttctgagtagagcttgtcctctgtgcacaacagaaaacatggatgagttacatgcagcagcacatcatgtggaacatgaagatggatcagaggccatcaaggcaactaaattcgaaaatctcggaagtcatcctaccctaaaacctgacatagatcaaatggaaggccaagtcatgaggatgggaggattagtaaatctcattggtggtacaaaaggagcagagttatcatgttttaccttttctcatattttggcggcgacagacaacttttcagagaaaaatttggttggtaagggtggatttggttatgtctacaagggcaatcttattaatggtcttaacgttgccattaaaagatttgatgcatgttcatcatatcaaggtccacatgagttcagaactgagattgatgccattccaaatcttcgacacaagaacataattggtctacttgggtactgtgttcaaggagaagaaagcatacttgtctatgaatatatgtcaaataaatgcttggcatctgtcattgctgatgaaacaaaaagggggttgctaaattggtccaagcgtcttcaaataatcaaaggcatagcagatggtcttgcttttctgcatgggcattctcagatgtgcattgtccacagggacataaaaccaagcaacatcctgctggaccatgaaatgaatgccaagattactgattttggtctggcattaatgttggctccaaaatcgactgcagaggttcctgttttgggcacatatggctatgcagatcctgaatatattgttactggaaaaatctcggagaaggcagacatatatggatttggcatagtactttttgagataataagtggaaggtcgatccattcttatatgaaggcagagggcactcgagagctaccataccctgcttatgcacacaaatacaacccaaagacgctgcacaagcttgttgatccattgttgcgcgtggacgagcatgaacgggctcagattatggaatgcgtgagggtggcgcagttatgcgttgaccatcgtgccaagcatcggcctgtgatgtcagaagttgtcaccatgcttggcatggcagcatcaaagggatagttgtagctttgcaagacccacaaagggatagctgtgaatgatgcaagtgtgaactaattaatgagctctactcaactattttcccccttctcatgcatgattgtgtaaacatcagggagattagtcagtgaaatatttggcatgcaccttacttgagcgctgtggctaataaattgtggttggctggaatgcaaattgctccatggtgttgttaatttggtctaagctggagatgaagtgactgactccatgggcatgtggttcacctccctgctggtggtggacgacaaatatcaggctggcattcacgtagaatgtgcggcaaagactgatgactgatgagtgatgactggtgaggaaccagacaaatgatgagttgaatctttcaaagtttgacagttcagtctccaatttttttttctcaaatcattggtactgtgtacaagcttgaagcttcctggaaacagcccctcctccacgggtttgttcaaccatgtgagcttccacaccagtacaggtcatcagtgtcttggactttctctgccactcccagaccttggtatcctttttaagggcgctcattctgtcattcaccacacctgtctcgttcctcactaccacaggtccaaagcaagcaagaagaaacgaaggacgataatggctctggtcgggcaggtggcgacggtggcgcagctggtgggcgtggacgcgttcagcctcatcacgatgatcgcggaggcggcgcagacggcgcggcggaaccgcgccgtgtgccggcagctggcccggcgcgtggagatgatcggcagcctgctccggcggctgcgcgagcaggacgacaacgacgacatgcggctgctgcggcacgcggagacgcgcggccccgtggaggcgctggaggagacgctccggcgcgcctacctgctggtgcggtcctgccagcggcgcgggtacgcgttccgctgcctgatgggggcgcggcacgcggacgagctccgcgagatgcagggcgagatcggcttctacctcgacctcttccccctcatcagctacgtcgactgggcgaggcgtcgcggcaacggcaacggcaaggccgcctgtggtgacactcgttctttgcaagaggcacctatggtaagaccatgtcttgtgccgttcctgtttctctcgctcctgcgatggatgcaattgttcagggagtacgtcatgcacctgctctgcttatcagcttatgtttactgacgtgtgtatctgtgaaatcattttgcatgttaattttcattaacaatgatctagctagctagctagcaccttaattttcattgctgggaaacaagctagctagctactagtatgcagctgttgttggtcctctgtttttcggactactatctgtcgagttcaggtgaaattgcctttcttttttgaaccagattaaataggtatgttggaataatcctatttttttcctcttgggaacgcaaccagcacacgttcatcaggagtgtttctgtttggcctggctatctgtttcggtttggatacatacagatagcttaccttcttggttcatcaggagtgcaaagttgcaggatctcaggcggcgctgacgatgacgcagcagccctggagccttccacggccgagcaaggacgagtaggaaggagggccacatgcgtcgtggccccgtgacacctgcttcacgttctctcagattttaattttatgacgcacagcgaaaagcccaaaaggaggggggggaagatgctgtcgatacagatcgttcgatccacacgggaagatctgaagcatgagagcatgtctgaaacagtcgagatgtcagacatgtcctgccgccattttattttttacccgctcatgtacgggggttatttttttttcgtatttctttcctcagcggcgctgcagaatagaaccgatcgaggcggagttgtctgtcatctcatcatctctcagtaatattcacacgcgctgcgtctctcccaagggcgccgccaacttgtacattgagcacaccaccaaaatcgagggca

SEQ ID NO: 200349 - DNA, 5460 bp, Zea Mays
aaagtctattatattcataataaacagtcaggtatgtacaatatatgtaatagtttgcagtctaaatatcgaatttagacgcacttatacgagttagaatctgaaattacatataaaacaatcttgtactgaaattcaaaatttaaaatagtaaagtagactattctggatcctggaaaaacggcccaggcagcctgccagaggcggcccattttggcctggtcgcacaacatgggtgcaaaaaaaaagggagggggcgtatgggcctggacggcggcctcattaggagcggcagttagggttaggaaaccctaaccggccactaccttcccaaacggcggcggtcagcacctggcggcggtgggcgcgaccccggtccccggcctcccctggcggtcgtacgggcagcaccgacgcgaggccactcggtccctcggcgtaggccggcgcacgcccgcggcggcatggcgtcccggtgacgctggcggccagggcgtagctctctggcggcgcgggcgcggctgtgggtgtagccccggcgtcccacggcgtggacacgaggcgtggccggtggagccccggtgcagcgcggtcgcgcacccggctcaggccatcccggcccaaatggcgcggcggcgccccctggtggccggatccgcccggcatggccaccccacaaggggcgggcgcagctcggcggtccccctgcgcaggctcgcgcgaaccggcgcggcttcctggagggcgcgcggctccctggtgcgatgaggggcggcggctggggggcttgggctccctggtggcgcgcaggcgcgggatcagcccgactcgggcggatcggctactgccacggcgcggagggtccggcctcggcggctcggcggcccccagccccggctacctggcgcggacggtccggccacggtggcacagggcgcggagggtccggcctcggcggctcggcggcccccagccccggctacctggcgcggacggtccggccacggtggcacagggcgcggcccctgttgacgcgctagcgcggtcccctgacggcggcgcgcgggctcgcggccctcctgcgcgcgcgagcacggccccccggcggtggtccggttgccaggcgcggcgagcccgctgtgtcctcccggcatcagcgcgggcgtatggcccctcggcatggcggccccctcgacgtgcaggcgcagtggccctgtcaatgcgctgccccgacgaccggtccggcgcgggctaggccagcgcgtgtgcgcagccccgacggggcgcagtaccatgggcaggacgcgtgcgaagcccccgcagaacccctggtggcccgtggccctgatccggcttggaacatggccggtggccccgatgagccatggccgtgaatggcgaagcaaccatcagaaacaagaaagattaaacaaaatagtgataatgcgtaccacataatccttctgcacatttctgtttcttaacttctgtgagcgattccttctctcagcaacttcaacttctctctgtttctcacgagcagtgctgataacgtgttaaactctatcacaacgctcagtggcaaatgaagattaacagagacaaagacaaatcgctgggacaatcctttattgcagagtagtgaagtatatatacaagagttcccaaggggtgtgtcccttgggaaataactgtcactacgacatatggatggattagatcacatgtataaaatgttttataacaatgtgaaaccacatctgtggaactttcagtgtgtgatgactgggtcactggtggaataccgtgttttctgagctggtcgctttcagttcgcggccaaagtcgatagctcaactatcttttgagtttagctcccaggttctttggcttcatttcaacaagcccgatcttcttctgacctctaaggtaaacctgcgaggaaaccattcccaaagagcatggcactctggaacggcataggtcaggtggcaagcatcgcacagttagccggggtcgatgcctatgggctcatctccatgatcgtggaggctgcaaagacggtgaagaggaaccgggagacctgccagctactggcacgccgtgcaaggatgattggggaccttctacatcagcttgaaaggacacagctgatgcagcacatggagacgaggaacccagtggagcatctggaggagacgcttcggcatgcgtatgtcctcatcacatcctgtcgcaacagcagctacctatacaactgctgtatgggagggaagcaggctgatcggcttcgagaggtgcagaatgagattaccttctacctccaacttttcccccttgtcagctttgtcgacaacacccgtacttgggagcggcttctgagtagagcttgtcctctgtgcacaacagaaaacatggatgagttacatgcagcagcacatcatgtggaacatgaagatgggatcagatcagaggccatcaaggcaactaaattcgaaaatctcggaagtcatcctaccctaaaacctgacatagatcaaatggaaggccaagtcatgaggatgggaggattagtaaatctcattggtggtacaaaaggagcagagttatcatgttttaccttttctcatattttggcggcgacagacaacttttcagagaaaaatttggttggtaagggtggatttggttatgtctacaagggcaatcttattaatggtcttaacgttgccattaaaagatttgatgcatgttcatcatatcaaggtccacatgagttcagaactgagattgatgccattccaaatcttcgacacaagaacataattggtctacttgggtactgtgttcaaggagaagaaagcatacttgtctatgaatatatgtcaaataaatgcttggcatctgtcattgctggcaagtttttggggttgctaaattggtccaagcgtcttcaaataatcaaaggcatagcagatggtcttgcttttctgcatgggcattctcagatgtgcattgtccacagggacataaaaccaagcaacatcctgctggaccatgaaatgaatgccaagattactgattttggtctggcattaatgttggctccaaaatcgactgcagaggttcctgttttgggcacatatggctatgcagatcctgaatatattgttactggaaaaatctcggagaaggcagacatatatggatttggcatagtactttttgagataataagtggaaggtcgatccattcttatatgaaggcagagggcactcgagagctaccataccctgcttatgcacacaaatacaacccaaagacgctgcacaagcttgttgatccattgttgcgcgtggacgagcatgaacgggctcagattatggaatgcgtgagggtggcgcagttatgcgttgaccatcgtgccaagcatcggcctgtgatgtcagaagttgtcaccatgcttggcatggcagcatcaaagggatagttgtagctttgcaagacccacaaagggatagctgtgaatgatgcaagtgtgaactaattaatgagctctactcaactattttcccccttctcatgcatgattgtgtaaacatcagggagattagtcagtgaaatatttggcatgcaccttacttgagcgctgtggctaataaattgtggttggctggaatgcaaattgctccatggtgttgttaatttggtctaagctggagatgaagtgactgactccatgggcatgtggttcacctccctgctggtggtggacgacaaatatcaggctggcattcacgtagaatgtgcggcaaagactgatgactgatgagtgatgactggtgaggaaccagacaaatgatgagttgaatctttcaaagtttgacagttcagtctccaatttttttttctcaaatcattggtactgtgtacaagcttgaagcttcctggaaacagcccctcctccacgggtttgttcaaccatgtccaaagcaagcaagaagaaacgaaggacgataatggctctggtcgggcaggtggcgacggtggcgcagctggtgggcgtggacgcgttcagcctcatcacgatgatcgcggaggcggcgcagacggcgcggcggaaccgcgccgtgtgccggcagctggcccggcgcgtggagatgatcggcagcctgctccggcggctgcgcgagcaggacgacaacgacgacatgcggctgctgcggcacgcggagacgcgcggccccgtggaggcgctggaggagacgctccggcgcgcctacctgctggtgcggtcctgccagcggcgcgggtacgcgttccgctgcctgatgggggcgcggcacgcggacgagctccgcgagatgcagggcgagatcggcttctacctcgacctcttccccctcatcagctacgtcgactgggcgaggcgtcgcggcaacggcaacggcaaggccgcctgtggtgacactcgttctttgcaagaggcacctatggtaagaccatgtcttgtgccgttcctgtttctctcgctcctgcgatggatgcaattgttcagggagtacgtcatgcacctgctctgcttatcagcttatgtttactgacgtgtgtatctgtgaaatcattttgcatgttaattttcattaacaatgatctagctagctagctagcaccttaattttcattgctgggaaacaagctagctagctactagtatgcagctgttgttggtcctctgtttttcggactactatctgtcgagttcaggtgaaattgcctttcttttttgaaccagattaaataggtatgttggaataatcctatttttttcctcttgggaacgcaaccagcacacgttcatcaggagtgtttctgtttggcctggctatctgtttcggtttggatacatacagatagcttaccttcttggttcatcaggagtgcaaagttgcaggatctcaggcggcgctgacgatgacgcagcagccctggagccttccacggccgagcaaggacgagtaggaaggagggccacatgcgtcgtggccccgtgacacctgcttcacgttctctcagattttaattttatgacgcacagcgaaaagcccaaaaggaggggggggaagatgctgtcgatacagatcgttcgatccacacgggaagatctgaagcatgagagcatgtctgaaacagtcgagatgtcagacatgtcctgccgccattttattttttacccgctcatgtacgggggttatttttttttcgtatttctttcctcagcggcgctgcagaatagaaccgatcgaggcggagttgtctgtcatctcatcatctctcagtaatattcacacgcgctgcgtctctcccaagggcgccgccaacttgtacatatagcagcatttttttttgggtttttttaagatggtgccctcgattttggtggtgtgctcagttttacc

SEQ ID NO: 200350 - DNA, 2628 bp, Zea Mays
ttgtgcccccgttcacccgttcacccgttgtttatcttgcgtccggcgtcctctctctctcgtggcgacgactgggcgacctccccgcccccgccgctctacgccaggtgcccagatcttcgtcgggcccttcgccgaagagcagccaacaggtatgcgcaccccttctcttcccttcccgctgtgcgaagctgaggacccaaaccctagctgacactgttttggctatttgcgttcggatcggatctaatttcaggtgtataatgtagtattatgctttctaacttgattttcttgcaaaataaaaacatggggccgctcatctcccctactgggtccgcatggcatatgtaggaattttagctgtcttttagccgattgaatcaacttctagaatcactacataaacttgtattcgttgagatttacttctttaggttggtgacatattttgccagattactgggtatattgtcagctatattagtctactaatggattttgccttctcttggtggtagctttaactgcgatttcggttgtttgtttcgtttctatcagatattaataatctaaaatggtgtgcagcttaggttaaaatcaaaaaaatttgtcgggcggataatacaaggcctacaccagaaggaacaccctttgtgcgacaggcgaacagctgtctctatctctctctgcagtgttatttggtttattatatgcagttgcaggggagaaaactaaggcatgttcactgcagctagaagcacagccgcagcagatgcagcaggcttcttatagtatttgcagcttagaagttggagtggcaactgcagctagctgcagcaaacactcctaacaataatagtggagagagactttcacgctgtttaaatttaggtgatttttgggaattaacttgcagatttattaattattatataggtaaaaagtgtagtatcagttactaggagcaagaacttgccctgatgacacagttattttggtttttctgttcacttctcctaatatttaaccttttgagtaagtgtgcagattaggtcttaaaaagggattgcgattaagattttattgccagagcctgagctgtagaattttccatttacacacgtggctgtacagggggtaaacttgcaggattattacttggtgatcctataagatacacatgctgtgaaccctgatttgttttagctgcttttgttcgtttttgtctacttagccttgcacactgaggacctttattgaggttgccggtctgcgggttgaatcatggcggagcacttggcttcgatcttcggcactgagaaggacagggtcaactgccctttttacttcaagattggggcctgtcgtcatggggatcgctgctctcgtctgcacaacaggccaactatatcaccaactcttgtgcttgctaacatgtatcagcgccctgatatgataacccctggagttgatgctcaaggccaacctattgaccctgagaagatgcaggagcattttgaggacttctatgaggacatctatgaggagttggggaagtttggtgagattgagaatctgaatgtttgtgataaccttgctgaccacatgattgggaatgtctatgtccagttcagggaggaagagcaagcagccgcagcatacaatgctcttcaggggcgcttttactctggccgccctataattgttgagtattctcctgtgaccgacttccgtgaagcaacctgtaggcagtttgaggagaacagctgcaaccgtggtggctactgtaatttcatgcatgtgaagcaaattggcagggatctcaggaggaagctgtatgggcgttctgcttccaggaggtaccatgggagaagccgaagccgaagcccgccaccacaaaggaggggccaccgtgaccgtgatgactaccaccaccgtgaccgtgatgactaccgtggtggcggcggtggtggaaggggaagaggtagcaggtatgacaggtatgatgatggagcaggcagaggcggcagacatgacaggtatgatgatggaggaaggcgcaggcatggtagcccctcaaggcgtgcaaggagcccagtcagggaaagcagcgaggagcgaagggccaagattgagcagtggaaccgtgaacgggagggaaaacagtgagctctccgtggctactgtttgccggacttgttgcttagctccggctctcatcgctatattctaagtatgcttgtgtggattgcattctgcatggctaagtaaaaccttttaagatcaggattcctcggttcattttatggttaaaccagacatcatttgtttccatctgtgttgtgtcggatcctttgctattatgttattttgacaattggtgtcaaatcttttgtggtgtgctattagcttatgatgatgtcagttgtggtttgtcactagatttgccatctggctttcagtcgtgtgttatgctgttccatggcggatttcttgttttccctcttctcatttttgctcaatgctcctagacagtgcttgggctgccgtcattgtactatgtgcagtagcacggagcaggttctattcagtttgagctgtcttttgtcttgggttcatggcaat

SEQ ID NO: 200351 - DNA, 1542 bp, Zea Mays
cacccgttcacccgttgtttatcttgcgtccggcgtcctctctctctcgtggcgacgactgggcgacctccccgcccccgccgctctacgccaggtgcccagatcttcgtcgggcccttcgccgaagagcagccaacaggttgccggtctgcgggttgaatcatggcggagcacttggcttcgatcttcggcactgagaaggacagggtcaactgccctttttacttcaagattggggcctgtcgtcatggggatcgctgctctcgtctgcacaacaggccaactatatcaccaactcttgtgcttgctaacatgtatcagcgccctgatatgataacccctggagttgatgctcaaggccaacctattgaccctgagaagatgcaggagcattttgaggacttctatgaggacatctatgaggagttggggaagtttggtgagattgagaatctgaatgtttgtgataaccttgctgaccacatgattgggaatgtctatgtccagttcagggaggaagagcaagcagccgcagcatacaatgctcttcaggggcgcttttactctggccgccctataattgttgagtattctcctgtgaccgacttccgtgaagcaacctgtaggcagtttgaggagaacagctgcaaccgtggtggctactgtaatttcatgcatgtgaagcaaattggcagggatctcaggaggaagctgtatgggcgttctgcttccaggaggtaccatgggagaagccgaagccgaagcccgccaccacaaaggaggggccaccgtgaccgtgatgactaccaccaccgtgaccgtgatgactaccgtggtggcggcggtggtggaaggggaagaggtagcaggtatgacaggtacgatgacggagcaggcagaggtggcaggcatggcaggtatgatgatggagcaggcagaggcggcagacatgacaggtatgatgatggaggaaggcgcaggcatggtagcccctcaaggcgtgcaaggagcccagtcagggaaagcagcgaggagcgaagggccaagattgagcagtggaaccgtgaacgggagggaaaacagtgagctctccgtggctactgtttgccggacttgttgcttagctccggctctcatcgctatattctaagtatgcttgtgtggattgcattctgcatggctaagtaaaaccttttaagatcaggattcctcggttcattttatggttaaaccagacatcatttgtttccatctgtgttgtgtcggatcctttgctattatgttattttgacaattggtgtcaaatcttttgtggtgtgctattagcttatgatgatgtcagttgtggtttgtcactagatttgccatctggctttcagtcgtgtgttatgctgttccatggcggatttcttgttttccctcttctcatttttgctcaatgctcctagacagtgcttgggctgccgtcattgtactatgtgcagtagcacggagcaggttctattcagtttgagctgtcttttgtcttgggttcatggcaat

SEQ ID NO: 200352 - DNA, 2052 bp, Zea Mays
gttgtttatcttgcgtccggcgtcctctctctctcgtggcgacgactgggcgacctccccgcccccgccgctctacgccaggtgcccagatcttcgtcgggcccttcgccgaagagcagccaacaggtatgcgcaccccttctcttcccttcccgctgtgcgaagctgaggacccaaaccctagctgacactgttttggctatttgcgttcggatcggatctaatttcaggtgtataatgtagtattatgctttctaacttgattttcttgcaaaataaaaacatggggccgctcatctcccctactgggtccgcatggcatatgtaggaattttagctgtcttttagccgattgaatcaacttctagaatcactacataaacttgtattcgttgagatttacttctttaggttggtgacatattttgccagattactgggtatattgtcagctatattagtctactaatggattttgccttctcttggtggtagctttaactgcgatttcggttgtttgtttcgtttctatcagatattaataatctaaaatggtgtgcagcttaggttaaaatcaaaaaaatttgtcgggcggataatacaaggcctacaccagaaggaacaccctttgtgcgacaggcgaacagctgttgccggtctgcgggttgaatcatggcggagcacttggcttcgatcttcggcactgagaaggacagggtcaactgccctttttacttcaagattggggcctgtcgtcatggggatcgctgctctcgtctgcacaacaggccaactatatcaccaactcttgtgcttgctaacatgtatcagcgccctgatatgataacccctggagttgatgctcaaggccaacctattgaccctgagaagatgcaggagcattttgaggacttctatgaggacatctatgaggagttggggaagtttggtgagattgagaatctgaatgtttgtgataaccttgctgaccacatgattgggaatgtctatgtccagttcagggaggaagagcaagcagccgcagcatacaatgctcttcaggggcgcttttactctggccgccctataattgttgagtattctcctgtgaccgacttccgtgaagcaacctgtaggcagtttgaggagaacagctgcaaccgtggtggctactgtaatttcatgcatgtgaagcaaattggcagggatctcaggaggaagctgtatgggcgttctgcttccaggaggtaccatgggagaagccgaagccgaagcccgccaccacaaaggaggggccaccgtgaccgtgatgactaccaccaccgtgaccgtgatgactaccgtggtggcggcggtggtggaaggggaagaggtagcaggtatgacaggtacgatgacggagcaggcagaggtggcaggcatggcaggtatgatgatggagcaggcagaggcggcagacatgacaggtatgatgatggaggaaggcgcaggcatggtagcccctcaaggcgtgcaaggagcccagtcagggaaagcagcgaggagcgaagggccaagattgagcagtggaaccgtgaacgggagggaaaacagtgagctctccgtggctactgtttgccggacttgttgcttagctccggctctcatcgctatattctaagtatgcttgtgtggattgcattctgcatggctaagtaaaaccttttaagatcaggattcctcggttcattttatggttaaaccagacatcatttgtttccatctgtgttgtgtcggatcctttgctattatgttattttgacaattggtgtcaaatcttttgtggtgtgctattagcttatgatgatgtcagttgtggtttgtcactagatttgccatctggctttcagtcgtgtgttatgctgttccatggcggatttcttgttttccctcttctcatttttgctcaatgctcctagacagtgcttgggctgccgtcattgtactatgtgcagtagcacggagcaggttctattcagtttgagctgtcttttgtcttgggttcatggcaat

SEQ ID NO: 200353 - DNA, 1606 bp, Zea Mays
gttgtttatcttgcgtccggcgtcctctctctctcgtggcgacgactgggcgacctccccgcccccgccgctctacgccaggtgcccagatcttcgtcgggcccttcgccgaagagcagccaacagcttaggttaaaatcaaaaaaatttgtcgggcggataatacaaggcctacaccagaaggaacaccctttgtgcgacaggttgccggtctgcgggttgaatcatggcggagcacttggcttcgatcttcggcactgagaaggacagggtcaactgccctttttacttcaagattggggcctgtcgtcatggggatcgctgctctcgtctgcacaacaggccaactatatcaccaactcttgtgcttgctaacatgtatcagcgccctgatatgataacccctggagttgatgctcaaggccaacctattgaccctgagaagatgcaggagcattttgaggacttctatgaggacatctatgaggagttggggaagtttggtgagattgagaatctgaatgtttgtgataaccttgctgaccacatgattgggaatgtctatgtccagttcagggaggaagagcaagcagccgcagcatacaatgctcttcaggggcgcttttactctggccgccctataattgttgagtattctcctgtgaccgacttccgtgaagcaacctgtaggcagtttgaggagaacagctgcaaccgtggtggctactgtaatttcatgcatgtgaagcaaattggcagggatctcaggaggaagctgtatgggcgttctgcttccaggaggtaccatgggagaagccgaagccgaagcccgccaccacaaaggaggggccaccgtgaccgtgatgactaccaccaccgtgaccgtgatgactaccgtggtggcggcggtggtggaaggggaagaggtagcaggtatgacaggtacgatgacggagcaggcagaggtggcaggcatggcaggtatgatgatggagcaggcagaggcggcagacatgacaggtatgatgatggaggaaggcgcaggcatggtagcccctcaaggcgtgcaaggagcccagtcagggaaagcagcgaggagcgaagggccaagattgagcagtggaaccgtgaacgggagggaaaacagtgagctctccgtggctactgtttgccggacttgttgcttagctccggctctcatcgctatattctaagtatgcttgtgtggattgcattctgcatggctaagtaaaaccttttaagatcaggattcctcggttcattttatggttaaaccagacatcatttgtttccatctgtgttgtgtcggatcctttgctattatgttattttgacaattggtgtcaaatcttttgtggtgtgctattagcttatgatgatgtcagttgtggtttgtcactagatttgccatctggctttcagtcgtgtgttatgctgttccatggcggatttcttgttttccctcttctcatttttgctcaatgctcctagacagtgcttgggctgccgtcattgtactatgtgcagtagcacggagcaggttctattcagtttgagctgtcttttgtcttgggttcatggcaat

SEQ ID NO: 200354 - DNA, 2721 bp, Zea Mays
tcccccgtcacaaacacacacactgcggagaggaccgcaacgcgagcccaccccaggccgaacgccgagagcgatccctcccgtccgtgttgccctttgcgctccgccttcctcctcttccaccccgtcacttccgtgccatccgcggctcgcctccccaccccccattcccgccgccccatgcctccggctcgaccgtagccgcccgacgacgaccgccatggccgccgattccggcagcggtgcccgccgttcccccccttaatccttgattgggatggccggcctggagatcgggccggcgtcgccgggctcggagggggcgccatcgccggcgtcgagcgtgggcgcctccgtggagcggcccgagcagtcgtcgccgcgggtgaccaagcgcccaggcctcgtcatgtccttctccgggaagcggctggaccagtcgccggccgggtcgccgtcgccgtcgccgtcgctgtcgcgcccggtgctggtcatgtcccactccagcaaccgcctcgaccagtcgcccgcgcgcccggtgctcgtcatgtcccgctccagcaaccggctggaccagtcctccccggcgtcgtcgccggcgccagtgaaggcgcccgtgctggtcatgtcaggctccagcaatcggcttgacagctcgcatccgtcgccgtcgccgtcgccgtcgccgaccgccgcggccgccgctgcgccggttctggtgctctccaactccggcaagcggatggaccaggtggggcggaagaagtacgtcaagcaggtgacgggccgccacaacgatacggagctccacctcgccgcgcagcgcggggacctcgaggccgtgcgccagatcatcgccgagattgacgcccaaatgaccggcaccggcgaggagtttgacaacgaggtcgccgagatccgcgccgctatagtgaacgaggccaacgagatggaggcgaccgcgctgctcatcgccgccgagaaggggtttcttgacatcgtcgtcgagctgctcaagcactccgacaaggacagcctcaccaggaagaacaagtccggattcgatgctctgcacgtcgctgcaaaagagggccacagagatattgtcaaggtacttctggaccatgatccatcccttgggaaaacgtttggccaatcgaatgtgactcctctcataactgcggcgattagaggccacactgaggtggtgaacctactgctggagcgagtttctgggttggttgagttatcaaaagcgaatggaaagaatgccttgcactttgctgcccggcaggggcatgtggaaatcgtgaaggctttgctagatgctgatacccagcttgctcggaggactgataagaaaggccagactgctctacacatggcagtaaaaggtactaacccggaagttgttcaagcgcttgtgaatgccgatccggcaatagtcatgctacctgacagaaatggcaacttagctctgcatgttgcaaccagaaagaaaagatcagagattgtaaacgtgcttctgcttctcccggatatgaacgtgaatgcgttgactagggaccggaagaccgcattcgacatcgccgagggcctcccactatcagaggagtcccaagaaataaaggagtgcttgtcccgcgctggcgcggtcagagcaaatgagctgaatcagcctcgggatgagctcagaaaaacagttacagagatcaagaaggacgtgcatactcagcttgagcaggcgagaaaaaccaacaagaatgtctacggcatcgcgaaggagctaaggaaactccacagggagggcatcaacaacgcgacgaattcagtcacggtcgtggcggtgctcttcgccacagtggcgttcgccgcaatcttcacggtgcccggcggcaacaccgacgacggcgtagcggtggccgtgcacgcgacatccttcaaggtgttcttcatcttcaacgccgtcgccctcttcacgtcgctagcggtggtggtggtccagataacggtggtcaggggcgagaccaaggcggagaggcgggtggtgggggtcatcaacaagctgatgtggctggcctcggtgtgcacgacggtcgcgttcatatcctcctcgtacatcgtggtggggcggcacttcaagtgggcggcgctcctggtgaccctgatcggcggggtgatcatggccggcgtgctcggcacgatgacgtactacgtggtgaagtccaagcgcgtgcgcaagatcaggaagaaggtgaagtcgacgaggaggagcggctcgaactcgtggcaccacaactcggagctctcggattcggaggtcgaccgcatctacgccatatgagggggccggtgcagctggttccttccttcagaccgtctggccgtgatgcagcacggatgcatactgtaaacatcgaatcacggcccttgagatggagatgcgctagggggtggttaactctgtacattccaataagctggtgtaaactgccattccccttgttcatggatcgggcgggaggcgactgtcttggctgtatactactcacagatagatttgtcatcaggttatatatagtgtattatatatgtgcagcctgctgtgtgctccttgtgcgtgaccttcatcagattcatgtcaggccgctgctgagttcgaatggcagctgcatgacatgtttcgataccggcccttgtggctttgttttgatattctgc

SEQ ID NO: 200355 - DNA, 2794 bp, Zea Mays
cgctcccgttcccccgtcacaaacacacacactgcggagaggaccgcaacgcgagcccaccccaggccgaacgccgagagcgatccctcccgtccgtgttgccctttgcgctccgccttcctcctcttccaccccgtcacttccgtgccatccgcggctcgcctccccaccccccattcccgccgccccatgcctccggctcgaccgtagccgcccgacgacgaccgccatggccgccgattccggcagcggtgcccgccgttcccccccttaatccttgattggtccgtcccgattcgatttctgtcgatcgttcgctgagggatcgctcaccttgagttgcccacagggatggccggcctggagatcgggccggcgtcgccgggctcggagggggcgccatcgccggcgtcgagcgtgggcgcctccgtggagcggcccgagcagtcgtcgccgcgggtgaccaagcgcccaggcctcgtcatgtccttctccgggaagcggctggaccagtcgccggccgggtcgccgtcgccgtcgccgtcgctgtcgcgcccggtgctggtcatgtcccactccagcaaccgcctcgaccagtcgcccgcgcgcccggtgctcgtcatgtcccgctccagcaaccggctggaccagtcctccccggcgtcgtcgccggcgccagtgaaggcgcccgtgctggtcatgtcaggctccagcaatcggcttgacagctcgcatccgtcgccgtcgccgtcgccgtcgccgaccgccgcggccgccgctgcgccggttctggtgctctccaactccggcaagcggatggaccaggtggggcggaagaagtacgtcaagcaggtgacgggccgccacaacgatacggagctccacctcgccgcgcagcgcggggacctcgaggccgtgcgccagatcatcgccgagattgacgcccaaatgaccggcaccggcgaggagtttgacaacgaggtcgccgagatccgcgccgctatagtgaacgaggccaacgagatggaggcgaccgcgctgctcatcgccgccgagaaggggtttcttgacatcgtcgtcgagctgctcaagcactccgacaaggacagcctcaccaggaagaacaagtccggattcgatgctctgcacgtcgctgcaaaagagggccacagaatattgtcaaggtacttctggaccatgatccatcccttgggaaaacgtttggccaatcgaatgtgactcctctcataactgcggcgattagaggccacactgaggtggtgaacctactgctggagcgagtttctgggttggttgagttatcaaaagcgaatggaaagaatgccttgcactttgctgcccggcaggggcatgtggaaatcgtgaaggctttgctagatgctgatacccagcttgctcggaggactgataagaaaggccagactgctctacacatggcagtaaaaggtactaacccggaagttgttcaagcgcttgtgaatgccgatccggcaatagtcatgctacctgacagaaatggcaacttagctctgcatgttgcaaccagaaagaaaagatcagagattgtaaacgtgcttctgcttctcccggatatgaacgtgaatgcgttgactagggaccggaagaccgcattcgacatcgccgagggcctcccactatcagaggagtcccaagaaataaaggagtgcttgtcccgcgctggcgcggtcagagcaaatgagctgaatcagcctcgggatgagctcagaaaaacagttacagagatcaagaaggacgtgcatactcagcttgagcaggcgagaaaaaccaacaagaatgtctacggcatcgcgaaggagctaaggaaactccacagggagggcatcaacaacgcgacgaattcagtcacggtcgtggcggtgctcttcgccacagtggcgttcgccgcaatcttcacggtgcccggcggcaacaccgacgacggcgtagcggtggccgtgcacgcgacatccttcaaggtgttcttcatcttcaacgccgtcgccctcttcacgtcgctagcggtggtggtggtccagataacggtggtcaggggcgagaccaaggcggagaggcgggtggtgggggtcatcaacaagctgatgtggctggcctcggtgtgcacgacggtcgcgttcatatcctcctcgtacatcgtggtggggcggcacttcaagtgggcggcgctcctggtgaccctgatcggcggggtgatcatggccggcgtgctcggcacgatgacgtactacgtggtgaagtccaagcgcgtgcgcaagatcaggaagaaggtgaagtcgacgaggaggagcggctcgaactcgtggcaccacaactcggagctctcggattcggaggtcgaccgcatctacgccatatgagggggccggtgcagctggttccttccttcagaccgtctggccgtgatgcagcacggatgcatactgtaaacatcgaatcacggcccttgagatggagatgcgctagggggtggttaactctgtacattccaataagctggtgtaaactgccattccccttgttcatggatcgggcgggaggcgactgtcttggctgtatactactcacagatagatttgtcatcaggttatatatagtgtattatatatgtgcagcctgctgtgtgctccttgtgcgtgaccttcatcagattcatgtcaggccgctgctgagttcgaatggcagctgcatgacatgtttcgataccggcccttgtggctttgttttgatattctgc

SEQ ID NO: 200356 - DNA, 1950 bp, Zea Mays
aaaatgttgatccccaaggagataagcgggctagtggtgatccatacttgcagcattgtgtggagactgcggttcatctggccaatattggtgcaaacgcaaccgttgtgtctgctggccttctccatgacacaattgatgattcgttcatggactatgatcatatcttcaggatgtttggtgctggtgtggccgatcttgttgaaggggtttcgaagttaagccatttgagcaaacttgctcgggacaacaatactgcaagtaggactgttgaagctgatcgcctgcatacaatgtttcttgcaatggctgatgcacgagctgttcttataaagttagcagatcgtctgcacaacatgaatacgatagaagctttgcctttggttaaacaacaaaggtttgctaaagagactatggaaatatttgtgccattggccaaccgattaggaattgctagctggaaagaccacttggagaatatttgcttcaaacacttgaacccagaggagcacaaggagctttcctctaaacttctgatgtcttttgatgaagcacttcttacatctacgcttcataacttggataaaagccttagagatgaaggcatttcatatcacagtctttctggaaggcacaagagtttgtacagtatatactccaagatgataaagtatgtctttttttttgtttacattatctgcagttcagtaaaatgtcagtatatatagttggcattcacaatccatgctcttaactgtgcttatgattgcttacaggaagaacttaacaatggacgatgtccatgacatccatggtctacggcttgtggttgaaacagaggaagattgttatcgagcacttgacatagtgcacaagctgtggccccgagttaccggaagatttaaagactatatttgtcatccgaagttgaatgggtatcggtcgctgcacactgtcatcatgtgtgagggtgtccatccatttgaaatccagatccgaacaaaggaaatgcacctacaggctgaatatggattcgcagcgcactggaggtacaaagaaggtggctgcaggcattcctttgtgctccaaatggtggaatgggcgaggtgggtgctcacatggcaatgcgagacattgagcaaagagcgtccctcgtctttgagcagttctgttggcataaggccaccatgcccttttcccctgcattcggaagattgctcctactcttacagccgacagtgcaactatgaaggccctatatttgtcatcatgcttgaacatgacaagatgtctgtccaagagctcccagccaactcgactgtagttgatctaatggagcgagtcggggccaacagtccgagatggagcccttgcagcttcccactgaaagaggagctgcgaccgagggttaaccacaagcccataagcgacccaaataggaagctcagcatgggcgacgtggtggagctgacgcctgcgctccctgacaagtcgctgtccgagtaccgggaggagatccagcgcatgtatgagcggggagggtttgcgctcgccaccacccctagaagctgacaccatcgtcgccatgttaacctgctgctgtacaatacacctgtaaatacgaactaatccttgcagcagagaaatcccagatgaacaaaccccccaactgaattggctaatggtgcggggtttgatccaggacgctgctgtgtgtaacgctttttacaagttgaaatgtggccaagttcctccgaagattcatgagaaacatgaagtacttgtgtccttgtacgcttttggtttggtttcaatgtttcatttggactggatcaagtccgacctcttccgcgctctaatcaggacgcgacaactgtgttgattgtggcttctcttccacaccatgtaaataagcaggaaaatatgaaccaacgttatcgtaccttctcg

SEQ ID NO: 200357 - DNA, 1932 bp, Zea Mays
cacaaaccacgcagcggaggcgacccacaaaaaacacgcgcggcaggaggaaggcgaggaagcatccccttgtgcgcgcccccctcatcctctcaatcccacggattcgccggggtaatctcgccacggccgtgctttgacgccgaattcgtgctctgtaggttcaattgaccccaccaccgcccgctgctgcttcgtttctagctcgagagagtttagtgggttgcttgattccgaagctccgagctcgtgggattgaattgagcccccccaagatcagaattggagcagcgggttttggtttcctgcttggtgccgctgattggagtacgcttcttttgtggtggttgagaggctgctcggcttccgccgaccatgtccaatgtttcttgcaatggctgatgcacgagctgttcttataaagttagcagatcgtctgcacaacatgaatacgatagaagctttgcctttggttaaacaacaaaggtttgctaaagagactatggaaatatttgtgccattggccaaccgattaggaattgctagctggaaagaccacttggagaatatttgcttcaaacacttgaacccagaggagcacaaggagctttcctctaaacttctgatgtcttttgatgaagcacttcttacatctacgcttcataacttggataaaagccttagagatgaaggcatttcatatcacagtctttctggaaggcacaagagtttgtacagtatatactccaagatgataaaaagaacttaacaatggacgatgtccatgacatccatggtctacggcttgtggttgaaacagaggaagattgttatcgagcacttgacatagtgcacaagctgtggccccgagttaccggaagatttaaagactatatttgtcatccgaagttgaatgggtatcggtcgctgcacactgtcatcatgtgtgagggtgtccatccatttgaaatccagatccgaacaaaggaaatgcacctacaggctgaatatggattcgcagcgcactggaggtacaaagaaggtggctgcaggcattcctttgtgctccaaatggtggaatgggcgaggtgggtgctcacatggcaatgcgagacattgagcaaagagcgtccctcgtctttgagcagttctgttggcataaggccaccatgcccttttcccctgcattcggaagattgctcctactcttacagccgacagtgcaactatgaaggccctatatttgtcatcatgcttgaacatgacaagatgtctgtccaagagctcccagccaactcgactgtagttgatctaatggagcgagtcggggccaacagtccgagatggagcccttgcagcttcccactgaaagaggagctgcgaccgagggttaaccacaagcccataagcgacccaaataggaagctcagcatgggcgacgtggtggagctgacgcctgcgctccctgacaagtcgctgtccgagtaccgggaggagatccagcgcatgtatgagcggggagggtttgcgctcgccaccacccctagaagctgacaccatcgtcgccatgttaacctgctgctgtacaatacacctgtaaatacgaactaatccttgcagcagagaaatcccagatgaacaaaccccccaactgaattggctaatggtgcggggtttgatccaggacgctgctgtgtgtaacgctttttacaagttgaaatgtggccaagttcctccgaagattcatgagaaacatgaagtacttgtgtccttgtacgcttttggtttggtttcaatgtttcatttggactggatcaagtccgacctcttccgcgctctaatcaggacgcgacaactgtgttgattgtggcttctcttccacaccatgtaaataagcaggaaaatatgaaccaacgttatcgtaccttctcg

SEQ ID NO: 200358 - DNA, 2849 bp, Zea Mays
cccaaccccagattcttctggccacgcacccgaaatccacacctcacaaaccacgcagcggaggcgacccacaaaaaacacgcgcggcaggaggaaggcgaggaagcatccccttgttcaattgaccccaccaccgcccgctgctgcttcgtttctagctcgagagagtttagtgggttgcttgattccgaagctccgagctcgtgggattgaattgagcccccccaagatcagaattggagcagcgggttttggtttcctgcttggtgccgctgattggagtacgcttcttttgtggtggttgagaggctgctcggcttccgccgaccatgtccgtgccggcgatagccgtgtacaccagcccgcccggcgccgtctacgcgccgccggagctcgagtccagctcgcgcggctcggcgccgtgcgcggccgcggcgtccccgtcagcgccgagctcccaccgccacgcggccgtcgcgggcggcttgtcctgcctattttcgtccccgtccgcggccccgcgggcaacggcgcacgaggagctcggcgcgctctggcacgacagatccgatgagccgccctccgtcgccgggggcttcggcggcgggggctactcgtacccccagtcgtcgccgtcgccgctcaagctgcgggaccacctccaccgcagcccggtgtctctgttccacacccctgcctcctccccggcgtccaggagcccctcggtttcctggctcgctggccgtgagcgcgagcgcctcttctctagcttcgtgcgcaacgcgcttggctcctgcattgactacgcaccggtcaccagcttcccgctgggtgtgcgccccgcggccactggtgtcgacgccgcggagctggccttcgagcttgacgaaaacctctctgaggcggagccgtcctgcgaacctgatgctcatgaactcctcgccggcgcccaggctcgccaccacatcttccgcgacgagcttgtcgtcaaggccttcaaggaggccgagcgggcacaccgtggccagaagcgggctagtggtgatccatacttgcagcattgtgtggagactgcggttcatctggccaatattggtgcaaacgcaaccgttgtgtctgctggccttctccatgacacaattgatgattcgttcatggactatgatcatatcttcaggatgtttggtgctggtgtggccgatcttgttgaaggggtttcgaagttaagccatttgagcaaacttgctcgggacaacaatactgcaagtaggactgttgaagctgatcgcctgcatacaatgtttcttgcaatggctgatgcacgagctgttcttataaagttagcagatcgtctgcacaacatgaatacgatagaagctttgcctttggttaaacaacaaaggtttgctaaagagactatggaaatatttgtgccattggccaaccgattaggaattgctagctggaaagaccacttggagaatatttgcttcaaacacttgaacccagaggagcacaaggagctttcctctaaacttctgatgtcttttgatgaagcacttcttacatctacgcttcataacttggataaaagccttagagatgaaggcatttcatatcacagtctttctggaaggcacaagagtttgtacagtatatactccaagatgataaagaagaacttaacaatggacgatgtccatgacatccatggtctacggcttgtggttgaaacagaggaagattgttatcgagcacttgacatagtgcacaagctgtggccccgagttaccggaagatttaaagactatatttgtcatccgaagttgaatgggtatcggtcgctgcacactgtcatcatgtgtgagggtgtccatccatttgaaatccagatccgaacaaaggaaatgcacctacaggctgaatatggattcgcagcgcactggaggtacaaagaaggtggctgcaggcattcctttgtgctccaaatggtggaatgggcgaggtgggtgctcacatggcaatgcgagacattgagcaaagagcgtccctcgtctttgagcagttctgttggcataaggccaccatgcccttttcccctgcattcggaagattgctcctactcttacagccgacagtgcaactatgaaggccctatatttgtcatcatgcttgaacatgacaagatgtctgtccaagagctcccagccaactcgactgtagttgatctaatggagcgagtcggggccaacagtccgagatggagcccttgcagcttcccactgaaagaggagctgcgaccgagggttaaccacaagcccataagcgacccaaataggaagctcagcatgggcgacgtggtggagctgacgcctgcgctccctgacaagtcgctgtccgagtaccgggaggagatccagcgcatgtatgagcggggagggtttgcgctcgccaccacccctagaagctgacaccatcgtcgccatgttaacctgctgctgtacaatacacctgtaaatacgaactaatccttgcagcagagaaatcccagatgaacaaaccccccaactgaattggctaatggtgcggggtttgatccaggacgctgctgtgtgtaacgctttttacaagttgaaatgtggccaagttcctccgaagattcatgagaaacatgaagtacttgtgtccttgtacgcttttggtttggtttcaatgtttcatttggactggatcaagtccgacctcttccgcgctctaatcaggacgcgacaactgtgttgattgtggcttctcttccacaccatgtaaataagcaggaaaatatgaaccaacgttatcgtaccttctcg

SEQ ID NO: 200359 - DNA, 1019 bp, Zea Mays
agcgtgtcatcgccttcccctccctacaagccaaacgcgaataccacccccgtgacttcccgatctccggcgatggccgcgcggcgcctcggatcccccgcatctaggtggctgcgcccgtccgcgctgctcctcctggtcgcctctgctctcctctcggccccgtcgccggcccgggccctccggttcgacctcgagtccggccacaccaagtgcgtctccgacgagatcaaggtcaacgccatggccgtcggaaagtaccacatcgtcgggcccgaccccaactcacccgacgcccagctccccgagtcgcaccgcatctccctcagggtgacgtcgccgtacgggaacagcatgcactacgcggagaacgtgcagtcgggccacttcgccttcacggcggcggaggccggcgactacctggcctgcttctgggctcccgaccacaagccgccggtcaccatcgggttcgagttcgactggaggagcggcgtctccgccaaggactatcccagcgtcgccaagaagggcaaggtcgatatgatggaattggagctgaagaagctagaggaaactataaaaaatatacatgaagagatgctttatctgcgtgaaagaggaaatgcaggacgtgaacaggcgaacgaactcaaggatggcttggctagggttcctctcccttggcgtctgcttatcagtggcaggtttgcagctgtggcacctgaagaccttctttgaaaggaagaagttgttgtagactgtagttggcccatggttcacggtagacctcagcgcaggtgtaacctatttttgggtgaactgccgatctgttacggagcttgaaatcccatgtaacaaacgttatgtcgtacttgagaaaatatgctttagcctgtccagttgaaattataagaaacttgaaatagatactaaattgtcttccattcaatagttcgtgttgcaatttggacttctggagcaccgtgttgactcttcttcaagtgatggttgtgaatctg

SEQ ID NO: 200360 - DNA, 1170 bp, Zea Mays
aaaaatcttatctacccatatgcgataaaataaaatctttcaattacctgcttccggcagcggtacgatggccgctgcgagaatggcgctcgtctcttgcgcccgccgcctcccgtccttaccctctccgctcaccctctcgaggccccgcgccggcgccgtctcatttctggctgcccagccgtcgccggcgacggcaccgagatccggcaggaatcttgctctcttctgttctttatcaccgacgtcgccatcgctaactgaggccgccgtagcactgccgccaccgaaggctgcggtggaagagacgaagccccctgtgccgagcggggacgagaagggggaaccgactgtggaggagctagcgggcctgctggacgtccgggtgggccgagtggtgaaggcgtggaggcacccggaggcggacaccctctacgttgaggaggtggacgtaggtgaggcggagccccggaccatctgcagcggcctcgtcaacttcctccccatcgaagaactccaggacagaaacgtcattgttcttgctaacctcaaaccaaggaacatgcgtggcatcaagtcaaatggcatgctcatggctgcctctgatgcttcccatgagaatgtggagctgctcatcccttcagaaggttcctttcctggtgaaagagtatggttcggttccgaagaagaaaagaaccgtcaatctgaccctgcatcaccaaatcaggatcgtaaaatataaagatagacaatctgtggggaatcttttcattctccttgaggtccatacacacaggtccaaaagaagaagatctgggaagctgttcagcctcatcttagaacaacagataactgcattgcggttcttggtgataaacaaatgcgtacctctgcaggcctagttttctgcaaatcgcttcagggtgcaagagtgtcataaatctttatggccaacatctttcttgtatcatggaatcgtgtgtcatgtatcttccctgcaaataataactaactatatgaggagagcagcagggaaagaattttctttccaactactgagataatcactgtactggaaccattcacatttagttctcacttttcagtgttaaaacaacgtgcttcctgggctgacgcaataatcttgatgccttggggcgagttattaca

SEQ ID NO: 200361 - DNA, 3087 bp, Zea Mays
cacggagcaaaggaggagtgaagtgccgacggacggaccccagagagcacaagtgaacaaagccgccaccaccaccagaccaggggaaaggaaagggactgccgagtgccgacgcccgactgcggctgcggctgcgctgccagagagaagagaaggggcgataaaaatcctgtccgtatcaccctcccttctccagtcccagtcccagtggtgccagtggagtagcggccgctgcgcagtacagtgcagtgcagtgcagggggtcgccggcgtctcccgccgtccgcttcgatcaccgtcggacgcggaggaggaggagaagcgccaagacgaggacaggcgggttgcggcgtcattcgcggaacgatggcggcctgccgcgccggcggttaggcccctccgctccgctccgctcctccgagattgttgccctcttgttcctgtgaccgagataaattcaatagaattttctcctaagctatttaaaggacaactatggctacaattcaagatataggactctctgcggctatcaacataatgggtgctgtactgttcctagttgcatttgctttccttcgactgcagccaatcaatgatagggtttacttcccaaaatggtacctcaaaggtgcaagagagagtccaagtcatgggggtacatttgtccggaagtttgtcaatttggacatgcgttcatacttgaaatttttaagttgggtgcctgctgctctcaaaatgcctgaggatgagttgattagccatgccggtctggattcagctgtgtatctgaggatttacttggtcggacttaaaatatttgctccaatctcagttctagctttcattgttcttgtccctgttaattggaccaatgatactctgcaattctcgaagttagagcacagcaatgttgataagctttcaatatcaaacataccagttggatcaaaaaggtttatagcccacttggcaatggcgtatgttttcacattttggacctgctatgtactgttacgtgagtatgaagtagttgcaaagatgagactgcgatttctttcatcagagaaacgcagaccagatcagttcacggtccttgtgcggaatataccgcctgatccagatgaatcaattagtgagcttgtggaacatttctttcttgtgaatcatcctggtcactatctgacacatcaggtggtttacaatgcaaataaacttgctaaattggtgaaagagaaagcaaagatgcataattggcttgactactatcagctgagatttgaaaggaatgcatctaaaaggcctactactaagactggttttcttggttgttttggtacgaaggtggatgccattgaatactacacatcagaaattgagaggatagaaaatgaagaagcagaagagcgtgaaaaaattgtaaaggatcccaaatccattgtaccagcagcatttgtttccttccgatcacgttggggtgcagcagtttgtgctcagacacagcaaaccagtaacccaactgtttggttgacagaatgggctccagaacctcgtgatgtgtactgggataatttgtctattccatttgtctcccttacagttcgaaggctgataattgcagtggcattcttcttcctgaacttcttttatgtgttcccaatagcatttgttcagtctcttgcaaatcttgaagggattgagaaggcagcgccgtttctgaagcctctgattgaagagcatactattaaatcattcatccaaggtttccttccgggaattgctctgaagatcttccttatattgctcccaagcatattaatgtttatgtctaaggttgaaggattgacctcaatatcttcactggagagaagatctgcatcaaagtattatattttcatattcttcaatgtgtttctggcaagcattattgcaggatctgctttagagcagctaaaaagctatattcatcagtcagcaaatgaaataccaaggacgattggtgaagcaattccaatgaaggcaaccttttttataacatatacaatggttgatggttgggctggggtagctggtgagatattgagattgaagccactagtgatcttccacctgaaaaactttttcttggtcaagactgagaaagacagggaagaggcaatggaccctggaagtattggttttgactcaagcgaacctcaaattcagctgtatttcttacttggtcttgtctatgcggcagtgacaccatttttgctcccttttgtattgatattctttgggtttgcgtacgttgtataccgccaccagataataaatgtgtataatcaagaatacgagagtgcagcagcattttggccaagtgttcatggacgcataatcacagcgttgattgtatcacagctgcttctccttgggttacttagcacaaaaggcgctggccagtcaacacctgtgctccttgttcttcctgtagtgaccttctatttccacaagtactgcaacaaccgctacaaaccgacttttgtgaaatgcccattgcaggaggcgatgaagaaggataccctggaacgtgccagagagccaggatttgacctcaaaggatacctaatgaatgcctacatccacccggtgttcaaaggtgatggggacgacgacaagttctcagtcgcagatgaaccagaagccgagcaagtcctggtggcaaccaagcggcagtccaggcggaacacccccgtgcccagtaaatacaatgggtcggaatcaccttcgcttcctgaaattgtaaatgaccaacggctataaagatgtctacagttttcctatgtatactaggtatatgcccgtgcgttgccacggaagttaaaaaatagtataaaacatgtataccgaacaccatgttctagacaatgctagtgaaactgaaataaaaatagctacataattgcttaaatagttatacagctcgtagcacaaacaaaacaaagttgggcataacgttaagtgacacttttcctgtatcagacttggactatgtcccggctaatgcttgtagcctttgaatattatcgggacccattgatcactaca

SEQ ID NO: 200362 - DNA, 829 bp, Zea Mays
gtgccgacgcccgactgcggctgcggctgcgctgccagagagaagagaaggggcgataaaaatcctgtccgtatcaccctcccttctccagtcccagtcccagtggtgccagtggagtagcggccgctgcgcagtacagtgcagtgcagtgcagggggtcgccggcgtctcccgccgtccgcttcgatcaccgtcggacgcggaggaggaggagaagcgccaagacgaggacaggcgggttgcggcgtcattcgcggaacgatggcggcctgccgcgccggcggaggcgatgaagaaggataccctggaacgtgccagagagccaggatttgacctcaaaggatacctaatgaatgcctacatccacccggtgttcaaaggtgatggggacgacgacaagttctcagtcgcagatgaaccagaagccgagcaagtcctggtggcaaccaagcggcagtccaggcggaacacccccgtgcccagtaaatacaatgggtcggaatcaccttcgcttcctgaaattgtaaatgaccaacggctataaagatgtctacagttttcctatgtatactaggtatatgcccgtgcgttgccacggaagttaaaaaatagtataaaacatgtataccgaacaccatgttctagacaatgctagtgaaactgaaataaaaatagctacataattgcttaaatagttatacagctcgtagcacaaacaaaacaaagttgggcataacgttaagtgacacttttcctgtatcagacttggactatgtcccggctaatgcttgtagcctttgaatattatcgggacccattgatcactaca

SEQ ID NO: 200363 - DNA, 997 bp, Zea Mays
gtttttgttataaaagtcgccacagaagcgttgagatggcacattgcgcgcaatgaccacctaaacctaaccagaaatcgtaaggtaggtgggacggtggtgcttaggaactgtctaggtggctgaggtcatcaccttctaaagcagcacagtcaatcatttgaaataacccgctgaacccttataagccctacctgtgttctcgcatgtttacacatcctcgaactattctacttatatattataagtcatttattttaaataatatgtatctgattttatgtatattttcctgagtaatctcatcatgtgtataaactgtgtctatcatctctgcagactatatgccgctgcaacctcttgaagacgagaatgacactgttatcagtttcttatatcctctagaacccccgatagtagatgagtttgactgggaaatggacgattacgaggattttgctgatcagaaagttcaagaaggtggcctgccagaggatgagaaagaaaaattcaaggagttcctgaaggagaaggttagagaaaggaagagagagcttaaacaggctaaagaagccaggaggaaagctattgatgatatggatcctaaggtgaaagaggcattcgagaacatcaaattttacaaattttatcctgtgaaaaccccagacacgcctgatgtaaacaatgtaaaggcgaggtacatcaacagatactacaggaatgcccattatctgatgtgatggctttccttatcgcacgtgcttggcgagcttgtcacttgagaggagttgatatgaaaacagttcggtgttgtactagagttggccccagtttttcaccccccctgggcatcttttgctctccggtgtatacaatcctgaggatagattattgtgtagcactaagaggggcaaagtagtttgagactaaacaaatcattaaggaacaatttgttcccttttcatcatctattttgtggttgttttaacatctacaa

SEQ ID NO: 200364 - DNA, 1251 bp, Zea Mays
cctgactccctcgtggctcgtcccattcccgcaccatctcgacaaaccacaccaactgtcatcggacggcccaaaactgtgccgcgtgttccgttcaacggctatttcagcccgcagaacgcacatcagaagggaggatctatggttatctgcttttcctgtcggtactgagtgggaaaacattgataagataaaggagttcaactggagctttgaaaatttagagaaagccttagaagaagggggcgagcttcatggtaaaacagtttatctgtttggaagcactgagccccaactattggatgttaatggcgaatcaaagatagtgcttattccaatcgtagttgctgtagactgccctttccctccatcagacaaaattggcataaactctgtccaaagggaaaatgaggaaatagtgccaatgaaggcgatgaagatggcatgggtgccttatgttccccttgaggaccggcttagcaggattgacagtttgaaaacaaaaatattcactctcggatgcacgcagcggaggtctgcactgaagcatctcaaaattgagagagtcaagaagtttgactactgcatgccttactatatgccgctgcaacctcttgaagacgagaatgacactgttatcagtttcttatatcctctagaacccccgatagtagatgagtttgactgggaaatggacgattacgaggattttgctgatcagaaagttcaagaaggtggcctgccagaggatgagaaagaaaaattcaaggagttcctgaaggagaaggttagagaaaggaagagagagcttaaacaggctaaagaagccaggaggaaagctattgatgatatggatcctaaggtgaaagaggcattcgagaacatcaaattttacaaattttatcctgtgaaaaccccagacacgcctgatgtaaacaatgtaaaggcgaggtacatcaacagatactacaggaatgcccattatctgatgtgatggctttccttatcgcacgtgcttggcgagcttgtcacttgagaggagttgatatgaaaacagttcggtgttgtactagagttggccccagtttttcaccccccctgggcatcttttgctctccggtgtatacaatcctgaggatagattattgtgtagcactaagaggggcaaagtagtttgagactaaacaaatcattaaggaacaatttgttcccttttcatcatctattttgtggttgttttaacatctacaa

SEQ ID NO: 200365 - DNA, 1556 bp, Zea Mays
cctgactccctcgtggctcgtcccattcccgcaccatctcgacaaaccacaccaactgtcatcggacggcccaaaactgtgccgcgtgttccgttcaacggctatttcagcccgcagaacgcacatcagaagggtaaagccacgaaccccccggtccgcgcctgcgccgccttccctctcctgccttctccgcttcaaatttgcgtagcgttgatttcacgcccggatctcacaacgctcaatccaaacgctagccgcaaccctaaccctagcaaccggtgagtaatggcgcgccctaggggcaagaagcgcacggcgccccgggcggccgccactgattctgtccagccggaggcggcggcgacggagacagcggcggcggagccggcaaatcgggggcggtggaagcgcgtcaaggcgccgcccaagcccaagcccgagacggattacttcgccgagaaaagaaatctggaggatctatggttatctgcttttcctgtcggtactgagtgggaaaacattgataagataaaggagttcaactggagctttgaaaatttagagaaagccttagaagaagggggcgagcttcatgcccaactattggatgttaatggcgaatcaaagatagtgcttattccaatcgtagttgctgtagactgccctttccctccatcagacaaaattggcataaactctgtccaaagggaaaatgaggaaatagtgccaatgaaggcgatgaagatggcatgggtgccttatgttccccttgaggaccggcttagcaggattgacagtttgaaaacaaaaatattcactctcggatgcacgcagcggaggtctgcactgaagcatctcaaaattgagagagtcaagaagtttgactactgcatgccttactatatgccgctgcaacctcttgaagacgagaatgacactgttatcagtttcttatatcctctagaacccccgatagtagatgagtttgactgggaaatggacgattacgaggattttgctgatcagaaagttcaagaaggtggcctgccagaggatgagaaagaaaaattcaaggagttcctgaaggagaaggttagagaaaggaagagagagcttaaacaggctaaagaagccaggaggaaagctattgatgatatggatcctaaggtgaaagaggcattcgagaacatcaaattttacaaattttatcctgtgaaaaccccagacacgcctgatgtaaacaatgtaaaggcgaggtacatcaacagatactacaggaatgcccattatctgatgtgatggctttccttatcgcacgtgcttggcgagcttgtcacttgagaggagttgatatgaaaacagttcggtgttgtactagagttggccccagtttttcaccccccctgggcatcttttgctctccggtgtatacaatcctgaggatagattattgtgtagcactaagaggggcaaagtagtttgagactaaacaaatcattaaggaacaatttgttcccttttcatcatctattttgtggttgttttaacatctacaa

SEQ ID NO: 200366 - DNA, 1357 bp, Zea Mays
ccactgtgcaacgagcaaggtgaaatcaactatgagtgtgcagcccatccgaggccattttgacgcaggcctagctgggccacaggtggttggaaatcatgtaggctcaaaggtaaaagtagtccagttcatagccgagccgcaggagagaagagaagcaccgcaaccctaggtcgccgcctcttttcctctccactcgtccgcgggacgcgacgcgacgacaccggagggttttctgcggggatttgtttgtcgccaactcgccggcagccaagatgaggccggtcttcgtggggaacctggactatgacacccgccactcggagctcgaccgcctcttctaccgctacggcagggtcgagcgcatcgacatcaagtcaggctatgcttttgtctactttgaggatgaacgtgatggcaatgatgctatacgggctcttgatggttatccatttggccctggcagacgcaggctttcagtagagtggtcacggggtgagcaagctggtagacgtgatggcaacaaaccagaagcaaatactaagccaactaggacactgtttgtcattaactttgatccaatgaacacaagagtcagtgacatcgaaaggcacttcacaccatttgggaacatatcaagtgttcggataaggaagaactttgcttttgttcagtttgaaactatggaagaagcaagaaaggctcttgaagctactcatgctaccacccttttggacagggtgatttctgtcgagtacgccttcagggatgatagtgaagtgagtgataggtacggcagcccaagaagaggtggtggctatggtaggcggggtgatagcccagtgtaccggtcacgtcctagtccagactatggtcgcccagcaagtcctgtatatggttcatatgacggtcctggtcctgttcgtgatcgctatcggagatctcctgcttatcgatcaaggtccccacctgcgaaacgaagagcatatgactaatcgagaaccctctgttatgccatatatggcctaggaacaccctgtagcaagaacttactgtacctgtaccggagcgtcaccttaatgtccttaaattcccgtgtttaatggtctgtacatggttatgctatgcgactgtcaggtttcactgcatgcaatattgtcatttggctgctaccctttgtttggccttgggatgctcgatctctattttcagatttttaccgtccttgtcatccgctgctatctgttaatagagtgcattggcgatttcatataccggccaagcgtgctagttccaggtttgttaatgggagaaaaatcatgcactcggctgtagggtagccctgttgccttctgat

SEQ ID NO: 200367 - DNA, 1735 bp, Zea Mays
ccactgtgcaacgagcaaggtgaaatcaactatgagtgtgcagcccatccgaggccattttgacgcaggcctagctgggccacaggtggttggaaatcatgtaggctcaaaggtaaaagtagtccagttcatagccgagccgcaggagagaagagaagcaccgcaaccctaggtcgccgcctcttttcctctccactcgtccgcgggacgcgacgcgacgacaccggagggttttctgcggggatttgtttgtcgccaactcgccggcagccaagatgaggccggtcttcgtggggaacctggactatgacacccgccactcggagctcgaccgcctcttctaccgctacggcagggtcgagcgcatcgacatcaagtcaggaactaccagggcaaaacatagcttccccagggctcttcaactccttccattcaataacctggccatcatttccttcacttgaaaccatctgttcatgtgccctgatgcaaactgttactgctgctcgagcatgtttagcgggatcgtgccatcagtaccatcatgccttaccatgccacgactagaagtatcaccaacatgacaacatgctatgtgtactacattgataagcaagagttctatttatggcgaagcatgtccaatgtctccggtcattctttcttactttggatataagttgttcaacaccatgcttaggtcttatcatgaatggaatctaccactctagtgctcttcataccatcagaactatgcaggctatgcttttgtctactttgaggatgaacgtgatggcaatgatgctatacgggctcttgatggttatccatttggccctggcagacgcaggctttcagtagagtggtcacggggtgagcaagctggtagacgtgatggcaacaaaccagaagcaaatactaagccaactaggacactgtttgtcattaactttgatccaatgaacacaagagtcagtgacatcgaaaggcacttcacaccatttgggaacatatcaagtgttcggataaggaagaactttgcttttgttcagtttgaaactatggaagaagcaagaaaggctcttgaagctactcatgctaccacccttttggacagggtgatttctgtcgagtacgccttcagggatgatagtgaagtgagtgataggtacggcagcccaagaagaggtggtggctatggtaggcggggtgatagcccagtgtaccggtcacgtcctagtccagactatggtcgcccagcaagtcctgtatatggttcatatgacggtcctggtcctgttcgtgatcgctatcggagatctcctgcttatcgatcaaggtccccacctgcgaaacgaagagcatatgactaatcgagaaccctctgttatgccatatatggcctaggaacaccctgtagcaagaacttactgtacctgtaccggagcgtcaccttaatgtccttaaattcccgtgtttaatggtctgtacatggttatgctatgcgactgtcaggtttcactgcatgcaatattgtcatttggctgctaccctttgtttggccttgggatgctcgatctctattttcagatttttaccgtccttgtcatccgctgctatctgttaatagagtgcattggcgatttcatataccggccaagcgtgctagttccaggtttgttaatgggagaaaaatcatgcactcggctgtagggtagccctgttgccttctgat

SEQ ID NO: 200368 - DNA, 1954 bp, Zea Mays
atgagtgtgcagcccatccgaggccattttgacgcaggcctagctgggccacaggtggttggaaatcatgtaggctcaaaggtaaaagtagtccagttcatagccgagccgcaggagagaagagaagcaccgcaaccctaggtcgccgcctcttttcctctccactcgtccgcgggacgcgacgcgacgacaccggagggttttctgcggggatttgtttgtcgccaactcgccggcagccaagatgaggccggtcttcgtggggaacctggactatgacacccgccactcggagctcgaccgcctcttctaccgctacggcagggtcgagcgcatcgacatcaagtcaggtctgcctgcccttgcattccctccttttgcccacccccttgtttatcttcgtcttcggccggttttagattcgatctcatcttattgtgtacctagccacttggtatatcttcatgtttaaatttcaacgaattgaagaaaaaaaaggtggtggagtaagatactctgatactttgcggttgttgtgctgctccatgcgatgtaactgcagttgcaggcacagatgtttaaatctttactctggcgcaggaactaccagggcaaaacatagcttccccagggctcttcaactccttccattcaataacctggccatcatttccttcacttgaaaccatctgttcatgtgccctgatgcaaactgttactgctgctcgagcatgtttagcgggatcgtgccatcagtaccatcatgccttaccatgccacgactagaagtatcaccaacatgacaacatgctatgtgtactacattgataagcaagagttctatttatggcgaagcatgtccaatgtctccggtcattctttcttactttggatataagttgttcaacaccatgcttaggtcttatcatgaatggaatctaccactctagtgctcttcataccatcagaactatgcaggctatgcttttgtctactttgaggatgaacgtgatggcaatgatgctatacgggctcttgatggttatccatttggccctggcagacgcaggctttcagtagagtggtcacggggtgagcaagctggtagacgtgatggcaacaaaccagaagcaaatactaagccaactaggacactgtttgtcattaactttgatccaatgaacacaagagtcagtgacatcgaaaggcacttcacaccatttgggaacatatcaagtgttcggataaggaagaactttgcttttgttcagtttgaaactatggaagaagcaagaaaggctcttgaagctactcatgctaccacccttttggacagggtgatttctgtcgagtacgccttcagggatgatagtgaagtgagtgataggtacggcagcccaagaagaggtggtggctatggtaggcggggtgatagcccagtgtaccggtcacgtcctagtccagactatggtcgcccagcaagtcctgtatatggttcatatgacggtcctggtcctgttcgtgatcgctatcggagatctcctgcttatcgatcaaggtccccacctgcgaaacgaagagcatatgactaatcgagaaccctctgttatgccatatatggcctaggaacaccctgtagcaagaacttactgtacctgtaccggagcgtcaccttaatgtccttaaattcccgtgtttaatggtctgtacatggttatgctatgcgactgtcaggtttcactgcatgcaatattgtcatttggctgctaccctttgtttggccttgggatgctcgatctctattttcagatttttaccgtccttgtcatccgctgctatctgttaatagagtgcattggcgatttcatataccggccaagcgtgctagttccaggtttgttaatgggagaaaaatcatgcactcggctgtagggtagccctgttgccttctgat

SEQ ID NO: 200369 - DNA, 1265 bp, Zea Mays
agagaagcaccgcaaccctaggtcgccgcctcttttcctctccactcgtccgcgggacgcgacgcgacgacaccggagggttttctgcggggatttgtttgtcgccaactcgccggcagccaagatgaggccggtcttcgtggggaacctggactatgacacccgccactcggagctcgaccgcctcttctaccgctacggcagggtcgagcgcatcgacatcaagtcaggtcttatcatgaatggaatctaccactctagtgctcttcataccatcagaactatgcaggctatgcttttgtctactttgaggatgaacgtgatggcaatgatgctatacgggctcttgatggttatccatttggccctggcagacgcaggctttcagtagagtggtcacggggtgagcaagctggtagacgtgatggcaacaaaccagaagcaaatactaagccaactaggacactgtttgtcattaactttgatccaatgaacacaagagtcagtgacatcgaaaggcacttcacaccatttgggaacatatcaagtgttcggataaggaagaactttgcttttgttcagtttgaaactatggaagaagcaagaaaggctcttgaagctactcatgctaccacccttttggacagggtgatttctgtcgagtacgccttcagggatgatagtgaagtgagtgataggtacggcagcccaagaagaggtggtggctatggtaggcggggtgatagcccagtgtaccggtcacgtcctagtccagactatggtcgcccagcaagtcctgtatatggttcatatgacggtcctggtcctgttcgtgatcgctatcggagatctcctgcttatcgatcaaggtccccacctgcgaaacgaagagcatatgactaatcgagaaccctctgttatgccatatatggcctaggaacaccctgtagcaagaacttactgtacctgtaccggagcgtcaccttaatgtccttaaattcccgtgtttaatggtctgtacatggttatgctatgcgactgtcaggtttcactgcatgcaatattgtcatttggctgctaccctttgtttggccttgggatgctcgatctctattttcagatttttaccgtccttgtcatccgctgctatctgttaatagagtgcattggcgatttcatataccggccaagcgtgctagttccaggtttgttaatgggagaaaaatcatgcactcggctgtagggtagccctgttgccttctgat

SEQ ID NO: 200370 - DNA, 1715 bp, Zea Mays
gagaagcaccgcaaccctaggtcgccgcctcttttcctctccactcgtccgcgggacgcgacgcgacgacaccggagggttttctgcggggatttgtttgtcgccaactcgccggcagccaagatgaggccggtcttcgtggggaacctggactatgacacccgccactcggagctcgaccgcctcttctaccgctacggcagggtcgagcgcatcgacatcaagtcaggtctgcctgcccttgcattccctccttttgcccacccccttgtttatcttcgtcttcggccggttttagattcgatctcatcttattgtgtacctagccacttggtatatcttcatgtttaaatttcaacgaattgaagaaaaaaaaggtggtggagtaagatactctgatactttgcggttgttgtgctgctccatgcgatgtaactgcagttgcaggcacagatgtttaaatctttactctggcgcaggaactaccagggcaaaacatagcttccccagggctcttcaactccttccattcaataacctggccatcatttccttcacttgaaaccatctgttcatgtgccctgatgcaaactgttactgctgctcgagcatgtttagcgggatcgtgccatcagtaccatcatgccttaccatgccacgactagaagtatcaccaacatgacaacatgctatgtgtactacattgataagcaagagttctatttatggcgaagcatgtccaatgtctccggtcattctttcttactttggatataagttgttcaacaccatgcttaggtcttatcatgaatggaatctaccactctagtgctcttcataccatcagaactatgcaggctatgcttttgtctactttgaggatgaacgtgatggcaatgatgctatacgggctcttgatggttatccatttggccctggcagacgcaggctttcagtagagtggtcacggggtgagcaagctggtagacgtgatggcaacaaaccagaagcaaatactaagccaactaggacactgtttgtcattaactttgatccaatgaacacaagagtcagtgacatcgaaaggcacttcacaccatttgggaacatatcaagtgttcggataaggaagaactttgcttttgttcagtttgaaactatggaagaagcaagaaaggctcttgaagctactcatgctaccacccttttggacagggtgatttctgtcgagtacgccttcagggatgatagtgaagtgagtgataggtacggcagcccaagaagaggtggtggctatgatctcctgcttatcgatcaaggtccccacctgcgaaacgaagagcatatgactaatcgagaaccctctgttatgccatatatggcctaggaacaccctgtagcaagaacttactgtacctgtaccggagcgtcaccttaatgtccttaaattcccgtgtttaatggtctgtacatggttatgctatgcgactgtcaggtttcactgcatgcaatattgtcatttggctgctaccctttgtttggccttgggatgctcgatctctattttcagatttttaccgtccttgtcatccgctgctatctgttaatagagtgcattggcgatttcatataccggccaagcgtgctagttccaggtttgttaatgggagaaaaatcatgcactcggctgtagggtagccctgttgccttctgat

SEQ ID NO: 200371 - DNA, 1565 bp, Zea Mays
ccgcaaccctaggtcgccgcctcttttcctctccactcgtccgcgggacgcgacgcgacgacaccggagggttttctgcggggatttgtttgtcgccaactcgccggcagccaagatgaggccggtcttcgtggggaacctggactatgacacccgccactcggagctcgaccgcctcttctaccgctacggcagggtcgagcgcatcgacatcaagtcagggcaaaacatagcttccccagggctcttcaactccttccattcaataacctggccatcatttccttcacttgaaaccatctgttcatgtgccctgatgcaaactgttactgctgctcgagcatgtttagcgggatcgtgccatcagtaccatcatgccttaccatgccacgactagaagtatcaccaacatgacaacatgctatgtgtactacattgataagcaagagttctatttatggcgaagcatgtccaatgtctccggtcattctttcttactttggatataagttgttcaacaccatgcttaggtcttatcatgaatggaatctaccactctagtgctcttcataccatcagaactatgcaggctatgcttttgtctactttgaggatgaacgtgatggcaatgatgctatacgggctcttgatggttatccatttggccctggcagacgcaggctttcagtagagtggtcacggggtgagcaagctggtagacgtgatggcaacaaaccagaagcaaatactaagccaactaggacactgtttgtcattaactttgatccaatgaacacaagagtcagtgacatcgaaaggcacttcacaccatttgggaacatatcaagtgttcggataaggaagaactttgcttttgttcagtttgaaactatggaagaagcaagaaaggctcttgaagctactcatgctaccacccttttggacagggtgatttctgtcgagtacgccttcagggatgatagtgaagtgagtgataggtacggcagcccaagaagaggtggtggctatggtaggcggggtgatagcccagtgtaccggtcacgtcctagtccagactatggtcgcccagcaagtcctgtatatggttcatatgacggtcctggtcctgttcgtgatcgctatcggagatctcctgcttatcgatcaaggtccccacctgcgaaacgaagagcatatgactaatcgagaaccctctgttatgccatatatggcctaggaacaccctgtagcaagaacttactgtacctgtaccggagcgtcaccttaatgtccttaaattcccgtgtttaatggtctgtacatggttatgctatgcgactgtcaggtttcactgcatgcaatattgtcatttggctgctaccctttgtttggccttgggatgctcgatctctattttcagatttttaccgtccttgtcatccgctgctatctgttaatagagtgcattggcgatttcatataccggccaagcgtgctagttccaggtttgttaatgggagaaaaatcatgcactcggctgtagggtagccctgttgccttctgat

SEQ ID NO: 200372 - DNA, 969 bp, Zea Mays
gactgcttggtgtcgtatcttattagggaggagataagaaacatgattgagcacgatggttctgccaaagggattgtcttcagccagttcacatcattcttggatttgattcagttttccttggagaggtccggcattaagtgtgtccagttgaatggagccatgaacattaccgaaaagggaagagccatagacaccttcacccatgatgcagactgcagggtcttcttgatgagcttaaaagctggaggagtcgctctgaatctcactgtagcatctcatgtgttcctgatggacccttggtggaatccagcggtcgagaaccaagcgcaggaccgtatccaccgaattgggcagttcaagccaatcaagagcactaggtttgtgataaaggacacggttgaagagcgcatactgcaactgcaacagaagaagcagctggtgtttgaaggcaccgtgggggactcgccggatgccatgtcgaagcttacagaggcggacctcaagtttctgtttcagatctaaatgctgacgtagttaagcatgagtagggagggccaggctatgctaggactaggagcactgacttgttggaagttggaaccctgacgctgccataacaccaggacggacggggtcggcggtgcgtagatcgactgctgctgtgcctgttggaactgatgtacttttgcagtgtgtgtaacatcgatggcagcgactagcgaggctttccgttggagtagcccgtttgggaaagaacagaacagggtgttgtaggcctgtgtagtgtggggggcgtgcagcgtgctggtgccgcaagaggtgcggtggggtgggggtacagtctcagtacagggtactggtgtgcgctgagtgagcacttgagcccaacgcgctcaattgtttgcaggcggtcccccgcccccgtatctcgtggacaggcaggtgggtaggggaattgtagcagcg

SEQ ID NO: 200373 - DNA, 1842 bp, Zea Mays
ttcgtacctcaacttcgtgctgatatgtgacatggtgactatagcacgccatctaaatctaacgcttgtggtccctgaactggataaaaggtctttttgggctgacccaagtgattttggagatattttcgacgtggaccacttcattaattccttgagagatgagctgatgatagttaaagagcttcctttgaaactacagttaagaactaagaagagactgtactcgatgcctcctgtcagctggtcgaatgaaacatactacctaaagcggatattacctcttgcgaggaagcacaaggtaattcatttcgataaatcagacgcccgccttgcaaacaatggccttccgattcagctgcagatgctgcgttgccgagtgaactttgaggctctgagattcacaccacagatcgaggcccttggcagaaagctcatctccactctccagagacgaagtgggcagtttgttgtgcttcacttgcgctacgaaatggacatgctctccttttcaggctgcacacatggctgctctggtaaagaaactgaggagctcactaagatgagatatgcttatccatggtggaaagagaaagagatcgattcggaagtgaagaggctccaaggactctgtcccctcacaccagaggagatcactctagtgcttaaagctctagggttcacaaaggacactctgatatacattgcttccggtgaaatctatggcggtgaaaggcgcctggccgtgctcaaggctgcgtaccctaaactagtaaggaaggagaagattttatctcccgatgaactgcggccgttccagaaccattcgacccagatggcagcgctggattacatggtctctctagcaagcgacattttcattcccagctacgacggaaatatggcaagggttgtcgaaggccaccgcaggtatatggatttccgcaagaccatcgtcttggacagaaagaagctcgtcgagctgttggaccttttccaagggggcgctctatcctgggacgaattctcggacgcagtgaaggaggcacacaggagccgcacgggccagcctgcggaaagaaaggtcgtcccagggcagcccaaggaagaggactacttctacgctaatcctctagaatgcctcggctccaacgggggactacgggacgtctcctgacgacgctttcctggaaacacgccgccgatgaacgatgacaccacctcagccctacagcacaccgtgtgtgttcgtgttcatcctcaccagtcaccgccaccgccacctttgtacagctgaccaaaggccctgcccatctaccacaagtgcatgcaggttcaccagatcagaacgcctgcgaccacatttcctcctcacagaataaagcaggaaaagaagctgggaaccctacggggttcttcagaaagaagagatgccgctcgtgcatccagtctgctcctttcctaccatctgtcgtagttgttgttgtaacccttctgtcagttttttcattctattgttcggttgctccccttcaactgctccagttttcagttcttctagccggggcgggtagctcatgcaaaagtaggagtccagctttctggaagtttcttgtactaggtccgcgatgcataacagagatttctgaatcctgacagaaccttattactttcccttgagggatcaaatttcggcgacggaataattgtttggtttccagcatctcatctatggacggctgtggttgctgaacggagagcaaactctatttataagacgtattgactttttttttacatatattgattttgttatatatctaggcatatggtatatttagg

SEQ ID NO: 200374 - DNA, 1946 bp, Zea Mays
gtcataccataccatgcagtgattaggggacttcttcgttcggtacacgggagattgagaatttacaaaagcaatggctacctactagtgacttgcaatggtggcctcaatcaaatgcgagccgggatatgtgacatggtgactatagcacgccatctaaatctaacgcttgtggtccctgaactggataaaaggtctttttgggctgacccaagtgattttggagatattttcgacgtggaccacttcattaattccttgagagatgagctgatgatagttaaagagcttcctttgaaactacagttaagaactaagaagagactgtactcgatgcctcctgtcagctggtcgaatgaaacatactacctaaagcggatattacctcttgcgaggaagcacaaggtaattcatttcgataaatcagacgcccgccttgcaaacaatggccttccgattcagctgcagatgctgcgttgccgagtgaactttgaggctctgagattcacaccacagatcgaggcccttggcagaaagctcatctccactctccagagacgaagtgggcagtttgttgtgcttcacttgcgctacgaaatggacatgctctccttttcaggctgcacacatggctgctctggtaaagaaactgaggagctcactaagatgagatatgcttatccatggtggaaagagaaagagatcgattcggaagtgaagaggctccaaggactctgtcccctcacaccagaggagatcactctagtgcttaaagctctagggttcacaaaggacactctgatatacattgcttccggtgaaatctatggcggtgaaaggcgcctggccgtgctcaaggctgcgtaccctaaactagtaaggaaggagaagattttatctcccgatgaactgcggccgttccagaaccattcgacccagatggcagcgctggattacatggtctctctagcaagcgacattttcattcccagctacgacggaaatatggcaagggttgtcgaaggccaccgcaggtatatggatttccgcaagaccatcgtcttggacagaaagaagctcgtcgagctgttggaccttttccaagggggcgctctatcctgggacgaattctcggacgcagtgaaggaggcacacaggagccgcacgggccagcctgcggaaagaaaggtcgtcccagggcagcccaaggaagaggactacttctacgctaatcctctagaatgcctcggctccaacgggggactacgggacgtctcctgacgacgctttcctggaaacacgccgccgatgaacgatgacaccacctcagccctacagcacaccgtgtgtgttcgtgttcatcctcaccagtcaccgccaccgccacctttgtacagctgaccaaaggccctgcccatctaccacaagtgcatgcaggttcaccagatcagaacgcctgcgaccacatttcctcctcacagaataaagcaggaaaagaagctgggaaccctacggggttcttcagaaagaagagatgccgctcgtgcatccagtctgctcctttcctaccatctgtcgtagttgttgttgtaacccttctgtcagttttttcattctattgttcggttgctccccttcaactgctccagttttcagttcttctagccggggcgggtagctcatgcaaaagtaggagtccagctttctggaagtttcttgtactaggtccgcgatgcataacagagatttctgaatcctgacagaaccttattactttcccttgagggatcaaatttcggcgacggaataattgtttggtttccagcatctcatctatggacggctgtggttgctgaacggagagcaaactctatttataagacgtattgactttttttttacatatattgattttgttatatatctaggcatatggtatatttagg

SEQ ID NO: 200375 - DNA, 4464 bp, Zea Mays
caaaatagcaaaatagctctcgataaaccccccaaccccatcccccaactccgcacgcatccgacttgaaagttgaaaccctagtgcaggcacacgacctccgtgtgcaacgcgtcgccgccatggcggcccccctgcactccagctccggccacaacgccgccgcaggcggcggggccaagaccatcgaggagatgtaccagaagaaaacgcagctggagcacatcctgctgcgccctgacacctacatcggctccgtggagaagcacacccaggcgctttggatatacgaggacggtgccatggtgaaccgctcggtcacctacgtccctggactctacaagatcttcgacgagatcctcgtcaacgccgccgacaacaagcagcgggatcccaagatggacgcgctccgcgtcgagattgacgtcgacagctgctgcatctccgtatacaacaacggcgacgggatccccgtcgaggtccaccaggaggagggcgtctacgtgccagagatgatattgggccacctcctcaccagtagcaactacaacgacaacgagaagaagaccaccggcgggaggaacggatacggcgccaaactcactaacatcttctccactgagttcgtcatcgagaccgccgatgggcgtcgccagaagaagtacaagcaggttttctatgagaacatggggaagaagtcagagccccagattaccaagtgcaagcagggcgagaactggaccagggtcactttcaagcctgatcttgccaagttcaacatgacccatctcgaagatgatgttgtagccctcatgaggaagagagttgttgatatggcaggcactctcggcaaaacggtgaaggtcgagttggatggccagagggtgcccataaagagcttctgtgactatgtcgacctgtatatgaagagtgctaactgcgacagacctgataatttcaaaaggatttatgagcaagtaaatgatcggtgggaagtgtgtgttagtcaaagtgaagggcaatttcagcaggtcagctttgtcaacagaattgcaaccatacgaggtggaagtcatgttgattatgttaccaaccaaattgccaaccatgtggtggccattgtgaataagaaaaacaagaatgcaaacatgaagctgcacaacgtgaagagccatctatgggtctttgttaatgcgctcattgacaatccggcttttgattcacaaaccaaggagaccttgaccactcgtcagggaagctttgggtcaaagtgtgagctttctagtgatttcctcaagaaagttgagaaatctggtgtaattgagaatgtcctctcttgggctgatttcaaacttagcaaagaattaaagaagactgatggaagcaaaaagtcaagaatttctggcatccctaagcttgaggatgcaaatgaagctggtgggaaggactctgacaagtgcactttgatcctgactgaaggcgactccgcaaaagcacttgctatgtctggcatagctgtcgtagggagagattactatggcgtatttcctctcaggggaaaactgttgaatgtcagagaggcaaaccacaagcaaataatggacaacgctgaaattcagcacataaagcaaatacttggtttgcagcatggaaagcagtatgagagcaccaaaggtttgagatatggtcatctcatgataatgacagatcaggatcatgatggctcccacattaaagggttgctgatcaacttcatccactcattctggccgtctcttcttaaagttccatcttttttggttgagttcattactccaatcatcaaggcaaccagaggtcaaactacgaaatcattttacacaatgccagagtatgaagaatggagaaagaatttaggagcaagtgcaagttcgtggactataaaatactacaaggggttggggacaagcacagccaaagaaggccggaagtactttgaagatattattgatcacaaaaaggattttgtctgggtagatgaccaagatggcaaccatattgagttagcattcagcaagaaacggattgctgataggaaacagtggcttacaaattttcagcctggaacatacatagaccaacgtgagaaacaagtcaagtatagtgatttcatcaacaaagagctgatactcttctcaatggcggacctgcagcgatcaataccttcaatggttgatggccttaaaccaggccagaggaagattctgttttgttcattcaagaggaattttgtcaaggaagctaaggtggctcagttctctggttatgtgtcagaacactccgcataccaccatggtgagcagagtttagcaagtacaattattggcatggcccagaattttgttggcagcaataacatcaaccttatgtcccctaatggtcagtttggcacaagagctcagggaggcaaggacgctgcaagtcctcggtatatcttcaccaagctgtctaatattacacgttcaattttcccgaaggatgacgatattcttcttaattatctgaatgaggatgggcagtcaattgaacccacctggtatatgccaatccttcccatggtattggtcaatggaagtgaaggaattggaactggatggagcacatatattccaaactacaatccaagagacattgttgctaacgtcaggcggttgttgaatgaagagtctactgtaccaatgcatccttggtataggggattcaaggggtctatagagaagacagtcaatacgaaggtagctggttccacgtataccgtcaccggaatcattgaggttgttgacaacactacactgaggatcactgagctgccaatccgccgatggactcaggattacaaagattttctcgaaagtttagctccagatcctaagaacaaggacaaagtaacattcatagaggatgtcacatcacaaggtgataatgaagacgtctacattcaactcaaattaagtgaggcaaatgtgaatgtagctaaggaagaaggactagtgaagaagtttaagttgacaacaacaattggtacaacaaacatgcacttgtttgattcagatggtaaaattcggaaatatgacactcctgagcaaatacttgaggaattctttcaattaaggcttgaattctattgtaagagaaaggaagcattgttgaagaatatcaagctggacttaaagaagcttgaaaacaaagtgctatagaagaggaggaaaatgaagagtctcctgaaactgcagcaggagtggatcctagtgactatgagtatctcctctccatgtcaattggtaccttgactttggagaagatacaagagctcaatgctgagaaacaaaagttggtggacgatgttgtggaactgatgaacacatcgccaaaatcactttggttgaaagatcttgatgcttttgagaaagaactggatgtgcttgatcaaatggatctagcagaggaggtgcaaagggaaaagaggataaaggaaggcaaaaaaggcggatcaaaagctgcacccaagaaacaacctaaaaaggctgcacctataaagctggaaagcagtacagaagacaatgctgctgaaccagtagtcgcaaagcgtggagctcaacagaagaaagcacccaaaaaggctcccgtggacgaagaggaagttgatatgccttcactgaaagaccgtcttgctgcctttaatataaatgactcatctcctcctgatcactctgctatggaaactgaaacaacagaacagccggctcagaagaaagggagaggaaagaagcctgccgccgccgctgtgaagccgaaggctcctgccgccaggaaaagggcgccgactcaagggggcaaggcaacgcagaagaaaatagatgagatgctcaaggtcactgaggataacaccagcagtgctttgtcccctgagaagaaggtccggaagatgaggccctctcccttcaacaagaagagtggctcaatcttacagagaggctcgactgccgcttctgcaagctctgaaactatcgctgaagcttcaccaccctctggtagctctgaagagccagttgctgcagcaaaacctagaaggacagccagggctacgaagaaacatgtctatattagtgaaagcgatcctgaggatgaagtggtggagttgagtgatgattcggactttgatttggatgctgactctgactagtgagggtaactgtcatccgtagcatgtgctacctttattgatgatgcatttcttgtgcatgtgctactttaattgacgagtgcgggtaactgtcaatctgtcatccgtgttgttctgttgactgttgtatgtgtgttttctgttgactgttgtcgggaacccaagacattgtctggttaactgatttgtctgtctataattttggcattcaagtgtgcttgtggtatgctctgcagcagtac

SEQ ID NO: 200376 - DNA, 2227 bp, Zea Mays
ttctattatgttatctagtattcatcacgtgtgagaccatatgtatttatgatttatgagtgtgatagtaaactaaataagctcacaactaaggctgacaaaatagcaaaatagctctcgataaaccccccaaccccatcccccaactccgcacgcatccgacttgaaagttgaaaccctagtgcaggcacacgacctccgtgtgcaacgcgtcgccgccatggcggcccccctgcactccagctccggccacaacgccgccgcaggcggcggggccaagaccatcgaggagatgtaccagaagaaaacgcagctggagcacatcctgctgcgccctgacacctacatcggctccgtggagaagcacacccaggcgctttggatatacgaggacggtgccatggtgaaccgctcggtcacctacgtccctggactctacaagatcttcgacgagatcctcgtcaacgccgccgacaacaagcagcgggatcccaagatggacgcgctccgcgtcgagattgacgtcgacagctgctgcatctccgtatacaacaacggcgacgggatccccgtcgaggtccaccaggaggagggcgtctacgtgccagagatgatattgggccacctcctcaccagtagcaactacaacgacaacgagaagaagaccaccggcgggaggaacggatacggcgccaaactcactaacatcttctccactgagttcgtcatcgagaccgccgatgggcgtcgccagaagaagtacaagcaggttttctatgagaacatggggaagaagtcagagccccagattaccaagtgcaagcagggcgagaactggaccagggtcactttcaagcctgatcttgccaagttcaacatgacccatctcgaagatgatgttgtagccctcatgaggaagagagttgttgatatggcaggcactctcggcaaaacggtgaaggtcgagttggatggccagagggtgcccataaagagcttctgtgactatgtcgacctgtatatgaagagtgctaactgcgacagacctgataatttcaaaaggatttatgagcaagtaaatgatcggtgggaagtgtgtgttagtcaaagtgaagggcaatttcagcaggtcagctttgtcaacagaattgcaaccatacgaggtggaagtcatgttgattatgttaccaaccaaattgccaaccatgtggtggccattgtgaataagaaaaacaagaatgcaaacatgaagctgcacaacgtgaagagccatctatgggtctttgttaatgcgctcattgacaatccggcttttgattcacaaaccaaggagaccttgaccactcgtcagggaagctttgggtcaaagtgtgagctttctagtgatttcctcaagaaagttgagaaatctggtgtaattgagaatgtcctctcttgggctgatttcaaacttagcaaagaattaaagaagactgatggaagcaaaaagtcaagaatttctggcatccctaagcttgaggatgcaaatgaagctggtgggaaggactctgacaagtgcactttgatcctgactgaaggcgactccgcaaaagcacttgctatgtctggcatagctgtcgtagggagagattactatggcgtatttcctctcaggggaaaactgttgaatgtcagagaggcaaaccacaagcaaataatggacaacgctgaaattcagcacataaagcaaatacttggtttgcagcatggaaagcagtatgagagcaccaaaggtttgagatatggtcatctcatgataatgacagatcaggatcatgatggctcccacattaaagggttgctgatcaacttcatccactcattctggccgtctcttcttaaagttccatcttttttggttgagttcattactccaatcatcaaggcaaccagaggtcaaactacgaaatcattttacacaatgccagagtatgaagaatggagaaagaatttaggagcaagtgcaagttcgtggactataaaatactacaaggggttggggacaagcacagccaaagaaggccggaagtactttgaagatattattgatcacaaaaaggattttgtctgggtagatgaccaagatggcaaccatattgagttagcattcagcaagaaacggattgctgataggaaacagtggcttacaaattttcaggatcaacactaaatgtgcaaactgattttc

SEQ ID NO: 200377 - DNA, 836 bp, Zea Mays
gatccgtggcattggcgtcgatgggcgaattgtcctgccatgacagcagcatctcccacacccacaacgtctgtcgcatctgcggtgtcggtcaggtgtcctgaaggggcatcgtcggagccttcaccggcggtggacccttttgcatagaggatgccctttgtccgggcgcgctcttcctgattgtggagactcaagaaaacactaaggatattgagacgtatcagcggtataagtacccaactgtgagcaaacatagggaaatttcaagcttactgttgttcaggggaatttatgattcctggattggtgttatgctcggtgaaaatgggttagggaaaactacattcatcagaatgttgggaaaatggttgcttctcttttgtcttctagagcaaatccaagtttggttgcagatactactcatgatgtccttggtggacaaactgctagtgatctggttgcatgacaaggttatcatggcttagctacatatctttgtgagaaagggttgactgctcattctaaggctatgtcactgtccaaggataagcgaccaacatcaagaatagagtcatcaaaacaaaataccaaggaatttgataaacatagtgaacaagatttgttcttatgggtagctttaatagcctaccgtagtgatgctggtgctaccaacattcaagccacactcatggagttgctagcaacatacaagatcctaacaaccattctctatgtaggttgaaatgatcaatagatgaatttgtagatttggatgcacaatagatgggatccagaagcaatgaattccaagaatatttcttattcatagttac

SEQ ID NO: 200378 - DNA, 822 bp, Zea Mays
tataagaaaggtccctctccgtttcttcaaactttagttctagagcccaccaaagaaaaaacaaataccggatagatattaaagcattttcctcgtcgacttaaaaaatagaacaaaaaggttcttccttttcgcagctccatcgtccaccaacctcctccgattcggccgtcgtagcgtatagccgaattgccccactccaggactctcgccagcttctccggccgactagaggctgtttccggcgagtgctcggctgatctcctccgcgcggctgaggagatcacgcggtctcgctcgggggggctggggcgtgcatgatgggactttggttgattccgacgatggagactccggcgaggcttctgtggagcaccagcttcttccgccacaaaatcgccgacatgcttgcatcctcctcctgcttcttatagatcccacccctcgacgtcgtcgccggcagctagctcgctagcttctgtacatacgtcgacgccatatctagctagtctcttcatccagtcccgataagtgataactaataattaggagcttgcttcgacgaccttgcattggtccatggagtccggacggctcatcttcaacgcgcccggctccggcgccgggcagatgctcttcctggactgcggcgcaggcggtggtcccggcggcggcttgttgcatcgaggcgggagaccgatgcttggccttgaagaagggcgcggcgtaaaacggcccttctacacctcgcccgacgagctcctcgaggaggagtactacgacgagcagctgccggagaagaagcgccgcctgacgccggtg

SEQ ID NO: 200379 - DNA, 1093 bp, Zea Mays
aatgacagcggcgagcgaggtgcggaggggcatcaacctcgtctatggcggcggcagcatcggtctgatgggcgtgattgctcggacggttcgtcacggcggctgccatgtcctcggggtgattcctaaagcgctcatgcctattgagatatcaggtgaaagcgtgggagaggtgagggtcgtggacgacatgcaccagaggaaagccgagatggctcgtcagtcccaagccttcatcgctctcccaggggggtacgggacgatggaggagctgctggagatgatcacctggtgccagctcgggatccatgacaaaccagttgggttgctgaacgtggacggctactacgaccccctgctcgccctgttcgagaaaggcgccgccgagggtttcatcagcaccgactgcagccagatattcgtctcggcgccaaccgcgagcgagctgctcacaaagatggaggtggcgagctagctagctagtacatgtacatcttcgatatacatacgctttttttgttcacgtacgctagctgttgtggctctttgcctgtgtccagcaatacacgcgggtgcaccaggaggtagccccagcgacgagctgggagatctcggagctcggctacggcagaggaggagacgccggcgccgccacgccgccagcagcagcagcaggaggagcagaagagggaaaaggcggctcgtagcacccacatccatctcctgaagcgttaccttcctccacctactgcttgctgatgtgatgacgcgtctgttacggtttcctggcaaatttgtttcgtcaaagtcgacctctccaaagtccaaaacccggttgaaccaggtgccgggtcgggacgtactggggagacgacgatgatatctctgtgttgggtgcttggattgtgtaagcttgctgctgctggtactattcttgttttctttactttttccccggtgtgtggtgcttgtggaaatggaatctgtgctggtgcattgcagtgcagctaccctaccccgtccccggccccggggacgcacgcgacgacgtcacacacaggtgcgcccggccactgattgggctcctactcat

SEQ ID NO: 200380 - DNA, 2081 bp, Zea Mays
atcgattacagcactagcccccccgccggccttaatgcccgcgcgccatcacttgctggggggagctctgccgagacacgcacgctgctggagataggcatccagacacggcaccaccagtccaccaccaccaccaccaccaccgtgacgtgagtgcccgagcgcgcggccgccatcaggctcccccgtcgtcctcgccgggcggctaggtcagagccgggagaggcgggggccggcggcgctaggctaggctaggctaggcagcggcgtacgtgcgtggccgccgcgcgatcggcatgggcgacggcgaggcggcggtgccgagcaggttccgcacggtctgcgtcttctgcggcagcaacgccggccgccgcaaggtgtacgccgacgccgccctcgagctcggccacgagctggtgcggaggggcatcaacctcgtctatggcggcggcagcatcggtctgatgggcgtgattgctcggacggttcgtcacggcggctgccatgtcctcggggtgattcctaaagcgctcatgcctattgaggtaagtacatgtggattctcctcgctccaagatctgttcatgcacgcacatgatttgtcgctgggttaaattcaagcatgtcccatattcatgcataattcagaaaagcttcacctacaactagtcaactacgatggggattcagtgaacgactgctgagcttcttgtctgtccaccagtcgttcggttttgtcatgtcacccttgttggtgaaagattttggcaagctaggactgctagtattgattttctctctctctctttctcttcctactagcagaaggttcctgtctagctagttatatatatagactttactactttaggtgtgacaatttggagtctcggttcagctgccgtctgaattcagtactactacaacacacgtgccaggtagactctgtcaagtagaggatgcttttctagtcctttttttcctttgtatgtataactagggttctgtactcctgcactacactagtacagagtggttccctattcgaggcgagtggcgtggtggtgttttcacctctctttttgccctcccttttccatcgttaatcctcctgttgctgtcctctttgttcgtttgtgtgtgtgttgtctggggctggctctgtcaagtgtcaggaaccggaacagcgtgtgtgtgtgtccaagccactgagacagaaatgcagatctcacaatatcaggtgaaagcgtgggagaggtgagggtcgtggacgacatgcaccagaggaaagccgagatggctcgtcagtcccaagccttcatcgctctcccaggggggtacgggacgatggaggagctgctggagatgatcacctggtgccagctcgggatccatgacaaaccagttgggttgctgaacgtggacggctactacgaccccctgctcgccctgttcgagaaaggcgccgccgagggtttcatcagcaccgactgcagccagatattcgtctcggcgccaaccgcgagcgagctgctcacaaagatggagcaatacacgcgggtgcaccaggaggtagccccagcgacgagctgggagatctcggagctcggctacggcagaggaggagacgccggcgccgccacgccgccagcagcagcagcaggaggagcagaagagggaaaaggcggctcgtagcacccacatccatctcctgaagcgttaccttcctccacctactgcttgctgatgtgatgacgcgtctgttacggtttcctggcaaatttgtttcgtcaaagtcgacctctccaaagtccaaaacccggttgaaccaggtgccgggtcgggacgtactggggagacgacgatgatatctctgtgttgggtgcttggattgtgtaagcttgctgctgctggtactattcttgttttctttactttttccccggtgtgtggtgcttgtggaaatggaatctgtgctggtgcattgcagtgcagctaccctaccccgtccccggccccggggacgcacgcgacgacgtcacacacaggtgcgcccggccactgattgggctcctactcat

SEQ ID NO: 200381 - DNA, 1038 bp, Zea Mays
ttgttggtgaaagattttggcaagctaggactgctagtattgattttctctctctctctttctcttcctactagcagaaggttcctgtctagctagttatatatatagactttactactttaggtgtgacaatttggagtctcggttcagctgccgtctgaattcagtactactacaacacacgtgccagatatcaggtgaaagcgtgggagaggtgagggtcgtggacgacatgcaccagaggaaagccgagatggctcgtcagtcccaagccttcatcgctctcccaggggggtacgggacgatggaggagctgctggagatgatcacctggtgccagctcgggatccatgacaaaccagttgggttgctgaacgtggacggctactacgaccccctgctcgccctgttcgagaaaggcgccgccgagggtttcatcagcaccgactgcagccagatattcgtctcggcgccaaccgcgagcgagctgctcacaaagatggagcaatacacgcgggtgcaccaggaggtagccccagcgacgagctgggagatctcggagctcggctacggcagaggaggagacgccggcgccgccacgccgccagcagcagcagcaggaggagcagaagagggaaaaggcggctcgtagcacccacatccatctcctgaagcgttaccttcctccacctactgcttgctgatgtgatgacgcgtctgttacggtttcctggcaaatttgtttcgtcaaagtcgacctctccaaagtccaaaacccggttgaaccaggtgccgggtcgggacgtactggggagacgacgatgatatctctgtgttgggtgcttggattgtgtaagcttgctgctgctggtactattcttgttttctttactttttccccggtgtgtggtgcttgtggaaatggaatctgtgctggtgcattgcagtgcagctaccctaccccgtccccggccccggggacgcacgcgacgacgtcacacacaggtgcgcccggccactgattgggctcctactcat

SEQ ID NO: 200382 - DNA, 2456 bp, Zea Mays
gaccgccttatcgtcaccatcttcttcggtccggtcccagccaaaccttcctcttcttcggtctcctcgtcgccatctcgtttgtggccgccaccgcgccccatccctaccctacccgggacatacatttgctatttaaaagcctagcgacagagccgagtgtgcctctgcttcctcctccctccccccctcgtctgccctcgagatcccacaccgcgcgcgtgccacgttgtcttcgtcctctgcgcgccttcggtcaccccgccgcctgtactgtacatgcggtagtacggcgcaggaacaagaaggatttgccagcatgagcggggagctgcaggtgcatgcatctatcgttgggttcttggcttggttggggggtgaactgagtctggatgcgccgaacgggatgttgggggaggcgagagtgagagcacggtcgctcgcttgaggtgcggcgccgtctgccgtgcggtgtcgtggcggtctagtagaggaagctaggaagaggatgatgggagctctgcagctgcagagcaatggcgacggcgctgctgagggactcttaccggacccgggctacgtcgaggttgatcctaccgggaggtatggcaggtacaacgagattctcggcaaggggtcctcaaagactgtgtaccgggccttcgacgagcaccggggcatggaggtggcgtggaaccaggtgcagctgcacgacttcctgcgcggcccggcggagctggagcgcctctacggcgagatccacctgctcaagtccctccgccaccgcgccgtcatgcggctccacgcgtcctgggccgacgccgccgcgccccgcctcgccgtcaacttcgtcaccgagctcttcacctccggcacgctgcgccagtaccgcctccggcacccgcgggccggcgccgccgcggtccggcgctggtgccggcagatcctcgacggcctcgcctacctccacgcgcgcggcgtcatccaccgcgacctcaagtgcgacaacatcttcgtcaacggcagccagggccaggtcaagatcggcgacttcggcctcgccaccgtggcccgccgccgcggctcgccgcacgcggcgcgctgcgtcgtgggcacgccggagttcatggcgcccgaggtgtacgcggagggctacgacgagcgcgccgacgtctactcgttcggcatgtgcgtcctcgagatggtcacgctcgagtacccctacagcgagtgcgtgcaccccgtgcacatctacaagaaagtcacctccgggataaagccggcggctctgtacaaggtgaaagaccccgcggtgaggcggttcatcgacaggtgcctggcgccggcgtcgcggcggccgagcgcggccgagctgctcagcgacccgttcctgcagctggaagacggctgcggcctcggctacggagacgacgcggactacagcgccatgtacaactacctgcaccagcccgcgtgcctggaccaccaccaccatgccggcagcattggctccacggcgagcaacggggtggtgtccaatggcggcggcggcggcggcggcagatgggacgacgagtccgaggacgaggacgacgatggcagcatgttccaaggcatcgaccagctgttcaacgagcacgaagacgacgagctgcacgttgctggtgtcgacatcaccatcaagggcaagaggatgcaggacggacgcatcttcctccggctgcgtatcgccgacaaagatggcacagggagggtccggaacatctacttccccttcgacgcggacgcggacacggcgctgagcgtggccaccgagatggttgcggagctggacatcaccgaccacgaggtgacccacatcgccgagatgatcgacggcgaggtgggcgcgctgctgccgcactggaggccgggtcctggcatggacgacgacgacggcggcggcgccggtccggacacgtcgggcgctaccgaccgctgcaagaactgccggtccagcgcgtcctccgccgggtcgctggacgactacatgtcggcggcggcggcggcgcggcgcggctgccggtgcgcggagctgcacggccggttcgaggagatcacgttccaggccgacgaagagcaggtgcggttccagggctctgggtgcagctccgacgacggaggcgggcaggctgagcagtgcgccggggacggaggcagtactgtaactgaacgttcagaccagccatgacctggttcctcgcaggagcaactcctgttttaaaaatctgaaaatgtcaccagtgcagccgcacagctgcttgtaagtgaacttttttgtggctctggttgagcatacgatcgttaagacggatatagtttgaagtttcaacaggcaggtgctttccctgatctttgttgttgtttttttttccactctaaaactgttttgtagaactcacacagaatgacagaat

SEQ ID NO: 200383 - DNA, 1747 bp, Zea Mays
caggtgccgatagctgatcctccctgccgcgcacgcgcgtcaatggcgccgccagtcgccggcgtcgtgcgtcttgccgcggcctcccgcgtattagttctgtccctctacctgctcgcccgcctcctcttgcgcccctacgacacctccgctactctccacccaccctgcctctcctctttctcctcttccccggatcccaacacgcccgtctccgccgctatctcgtcgctggccgtgtgggacggtgtccacttcgcccgccccgctgagtgcggctacgagtacgagcagtccttcgccttcctcccactcctccccgcctccctcgtgctcctcgcacgattgttgttcgcgccgctagtaccgatactagggtacagggccgtgctcgtgctctccggctatgtcctcaacaacgtcgcattcgttgctgctgcggcctacttctacagattgtctgtgctgattttgaaggaccagaaagctgcttaccgagcatctgttctgttttgtttcaaccctgcttctgtgttctactcatcattgtattcagaaagtctttatgcacttttttctcttgggggcatcttctacgtgttttccggtgctaatactgttgcagtgataatgctcgctctgtctggttcagctaggtcaaatggagcacttaatgctggctatttctgttttcaggccttgctacaagcatatgatgctactgtacaaaagaaaaggcccttgttggcaattcatgcccttgtggctggagctttgcgctccattttcatatttctacctttctttgctttccaagcatatggatatttgaacatatgtgtacatgggagctcagacgaattgaggccatggtgcaaagcaaaagttcccttattgtatggcttcatccaaagccactactggggagttggtttcttgaggtacttccaagtgaagcagctgccgaactttctcttggcttcaccagtgctttctctcgcggtttattctattgtccattacgcaaaactgcttcaccggtgttttcaaagaactagcgtccacaagcagattatcactgctctagagaaaaggccagttgtgtcgtatagaagatctgatgacgcgacaattttgagtgaacctcctgctggactcaccaagaaagcacaagggagctctaaggctaaacagagaaaaccagttgctaccgagatagctcctgcgacattccatgacagtaccacgccagctaaccaaaacatcgaagaggatcaggacacgtgctccatactactactcccattcgttctgcatctggccttcatggcattcacagccttgttcgtgatgcacgtccaggtgtccacacggttcctatccgctagccccccggtttactgggctgccgcgcacgttctggcttctccgagccgcgccaacagacgatggggctacctgatctgtgtctatttcatcgcgtacattcttctaggtggattttctcgaccagctttgcctgaaggtttccctaggtttgctaggtgcttcctttggttcagtaattgagcgttggctactcgaatcgcttggaatctggtgggctgattaatcagaagttggagagcagaagacataataacatcagtcccaactcggaagcagcaaagcgaggtagatatcacaaactcgttcttctcagagcaacatgtatgcaaacagcttggggggggtcgatcttctccaa

SEQ ID NO: 200384 - DNA, 1104 bp, Zea Mays
caccggtcagaggttcgtctctatcaagggagtaccaaacccttttatctgcttcgtcccctcccctgtgcgtgggggtataaagcaccgggctctgcttccgtcacgcgagacggcgagagcacaacattagcagcggttgtaccttgggggccgctaaagcagcttggtccaagctgtctgtagaacttaagcaactccgatcccagccacgggacacggcagattgaagccatcagctccggtttctggcgccggatttgggatccgcgcgatgtcttggtccgcgcccgacgacatcctcctctccacctcactcgcgggcttcctggacaagaaacttattgtcctgctaagagatggacggaaacttcttggcaccctctgctcatttgatcagtttgcaaatgttgttcttcagggtgcttgtgaacgagtaattgtaggggaacaatattgtgatgttcctcttggtctgtatgtgatccggggagagaacgttgttttaatcggagaattggatcacgaaaaggatgaactccccgctcacatgacatgtgttttagaagcagaaattagaaagtgatacagattgttcatgaacaaccctgtgttttcccgaagataattctaactgtggctctaaaaagtttgttgtcttgctcctttactgggtgtttcactggctgagaaggcggagcgggaagcaagggatctgaaaggcacgatgaggaaacggatggagttcctagacttcgactgataataaacccgttcccgtggtggttgctgctcccctcccattgcggccgcggagtttttagtggcggcctgtgccatacctgatgactagcagtgatgttttctacgtacttttgatgccacatcagatcctttgagcgcctcctgatacggctgtcacttctctctgattattactactgcctggggagatgccatgtgctctcctccgtcgtcgtttgcaacagtgcattcgccctatctcgtgatttatttatttatttatttatataactggtattactgtactacacctgactggattggatctgctgggggccggaggccggagcccggagctag

SEQ ID NO: 200385 - DNA, 2962 bp, Zea Mays
ccgaaaccaagttgccaaattgggacgtcgtctccgactccgacgctgctcgatcgagcaaaccgacaaccccctctccgccgccgcgcacctacgctgccctccgtttggtcgtccgcccgcttcgacgggactggtccggccgtcggcgctcggcctgtcgacccaccagcccgctcccgtggcaggcgagttcgtccatcctccgaccccatccgtcggtcgccgggatggcggcgtcgggcgggaacgagccggaactcgccgtggtaacagatgtttgtaatgcttcaagcacacctcaagaaaataggcttgctggtgacagcaacaccatttcagaaaatgcccaggaatcattgagttctttaccagaacaagagtcaaatgatgctagtgttaacacagaaaagcaggaacctggcatttcaaaatgcaaatctgtggacgaaattccaaaaacagtaactgtaaagagatgcaagaacgttgattcaaaaaaagtctcctcaaataacaataataatccaagatttactggcagtccagctctgaaaaagcatcccacaaagggggaccatctttttgaactatgtgaaaatggcatggctcaagacacaaagcctcctagcacaaggatatgcataaattcagcctgcaaagctgtcttcaactcagataacacattttgattgctgtggatcatccttccacgttgagtgtgcactcaagcaccgaaaggcaggatgcatagaacttgcacaatctatacagcttgatggtaactactgctgtgctgcatgcggcaaggttattggaatacttgggtgagtgattttgcatctaccttggggaattatcttaggttcagatgaaaaaggttttatatgtggcttgtttgtaagtagacatgcatgctacatgaagcattgctggctactctaacctccatatgtcattttacctatattatccttacccctcattgaactggtgggctttaaaatacatattgtggatgttcttcatataggtgaaccttgttgcattcaaaacattggttgaaccatttatcaaattgatatttcatatctgtagttacttacagcattatgtgcatatgatgtctgctatgtttaactcttattcctgtctccttttccttttttttttgtttttggcaaacactctttgttatattttggatctaacagtgtctttgagtattttgagcaggttctggaagaggcagctagtagttgctaaagatgctcgtagagttgatagtctctgttcccgcatatatctgagccatagacttttggatggcacaacacgttttaaagagttgcatcagatcgtagaggatgcaaaagcaaagttggaaagtgaagttggcccccttgatggtacgtcatccaagatggctcgtggtattgtaggccggctgcctgttgctgctgatgtgcagcaactttgctctttagcaattgaaaaagctgatgagtggcttagttcaaacattcaatctgaaactaaacaaaatgatacacttccttctgcctgcaggtttaaatttgaagatattacagcttcatctttggtgttggttctcaaggaagctgtttcctcgcagtatcatgctatcaaaggctataaactctggtactggaatagcagagaagcgccttacacaggggagcctgctgttttccccaaagaccaaagaaggattctaatatccaatcttcagccctgcacagagtattccttccgtattatttcatttactgaggatggtgaactgggccattctgaatcaaagatctttaccaagagtgtggaaatcattcataagaacacagagcatggagcagaaggttgctcatcttctgccaagagagctggtaagagacaaaatgctaggtcatcaggcttccaggtgcgccagttgggtaatgtcttccgaagagcacagactgagaatggttaccccagtacgttgtgtaaatatgagattgaagattcatgtgatcagagtgagtccgtgataccagataaggaccagtttcgatgtggtgcctcccgcaaactcgatcttaatgagacctcagtcccggacctaaatgcagaggtagtcatgccaacagagtgctgccagaatgagaacggctgtacttctggaaagaatgcattcacaaagtcgaacggttgtggtgactctgagacctgtgcagaggggcatgtaggggatgcaccagccatggaatcccggtcccagagtcgcaagcaggcatcagatttggagcaggagacctgtcttgatgacagcaatttggtggcccgtgcagctaggctcttcgccccgaggttaggacagttagatgacaactacgagtactgcgtgaagattatccgttggttggaatgttcaggcctcattgagaaggatttcaggatgaaatttctaacatggttcagtttgagatcgacagagcaggagcgaagagttgttatcaccttcatccgcaccctaattgatgaacccagtagtctggctgcgcagcttttggattcctttgaagaaattgttaccagtaagaggccaagaacaggtttctgtactaagttgtggcactagccaggtagagaaagcatggaactgatatctaatgatactctagcgttcttacatcagcaagattaactgggatgacagtgtaatagtaattttatttattttctgataaatgtagttaaactgatgttgctgagctttgatatttgccatgatgatatattcttcagggctagtttagaaacttaaaccccctccaggattcctagggattgagtggaaaattagcttatttccccctcaattcttgggaatcttggagtagatttaagtttccaaactagcccttaggggatttaagcttccaaactaagtgtaatggtg

SEQ ID NO: 200386 - DNA, 2975 bp, Zea Mays
ccgaaaccaagttgccaaattgggacgtcgtctccgactccgacgctgctcgatcgagcaaaccgacaaccccctctccgccgccgcgcacctacgctgccctccgtttggtcgtccgcccgcttcgacgggactggtccggccgtcggcgctcggcctgtcgacccaccagcccgctcccgtggcagtggtaacagatgtttgtaatgcttcaagcacacctcaagaaaataggcttgctggtgacagcaacaccatttcagaaaatgcccaggaatcattgagttctttaccagaacaagagtcaaatgatgctagtgttaacacagaaaagcaggaacctggcatttcaaaatgcaaatctgtggacgaaattccaaaaacagtaactgtaaagagatgcaagaacgttgattcaaaaaaagtctcctcaaataacaataataatccaagatttactggcagtccagctctgaaaaagcatcccacaaagggggaccatctttttgaactatgtgaaaatggcatggctcaagacacaaagcctcctagcacaaggatatgcataaattcagcctgcaaagctgtcttcaactcagataacacattttgtaagaggtgttcatgttgtatttgccatggttttgatgataacaaagatcctagtctttggctggtatgctcatcagagactggtgatcaggattgctgtggatcatccttccacgttgagtgtgcactcaagcaccgaaaggcaggatgcatagaacttgcacaatctatacagcttgatggtaactactgctgtgctgcatgcggcaaggttattggaatacttgggtgagtgattttgcatctaccttggggaattatcttaggttcagatgaaaaaggttttatatgtggcttgtttgtaagtagacatgcatgctacatgaagcattgctggctactctaacctccatatgtcattttacctatattatccttacccctcattgaactggtgggctttaaaatacatattgtggatgttcttcatataggtgaaccttgttgcattcaaaacattggttgaaccatttatcaaattgatatttcatatctgtagttacttacagcattatgtgcatatgatgtctgctatgtttaactcttattcctgtctccttttccttttttttttgtttttggcaaacactctttgttatattttggatctaacagtgtctttgagtattttgagcaggttctggaagaggcagctagtagttgctaaagatgctcgtagagttgatagtctctgttcccgcatatatctgagccatagacttttggatggcacaacacgttttaaagagttgcatcagatcgtagaggatgcaaaagcaaagttggaaagtgaagttggcccccttgatggtacgtcatccaagatggctcgtggtattgtaggccggctgcctgttgctgctgatgtgcagcaactttgctctttagcaattgaaaaagctgatgagtggcttagttcaaacattcaatctgaaactaaacaaaatgatacacttccttctgcctgcaggtttaaatttgaagatattacagcttcatctttggtgttggttctcaaggaagctgtttcctcgcagtatcatgctatcaaaggctataaactctggtactggaatagcagagaagcgccttacacaggggagcctgctgttttccccaaagaccaaagaaggattctaatatccaatcttcagccctgcacagagtattccttccgtattatttcatttactgaggatggtgaactgggccattctgaatcaaagatctttaccaagagtgtggaaatcattcataagaacacagagcatggagcagaaggttgctcatcttctgccaagagagctggtaagagacaaaatgctaggtcatcaggcttccaggtgcgccagttgggtaatgtcttccgaagagcacagactgagaatggttaccccagtacgttgtgtaaatatgagattgaagattcatgtgatcagagtgagtccgtgataccagataaggaccagtttcgatgtggtgcctcccgcaaactcgatcttaatgagacctcagtcccggacctaaatgcagaggtagtcatgccaacagagtgctgccagaatgagaacggctgtacttctggaaagaatgcattcacaaagtcgaacggttgtggtgactctgagacctgtgcagaggggcatgtaggggatgcaccagccatggaatcccggtcccagagtcgcaagcaggcatcagatttggagcaggagacctgtcttgatgacagcaatttggtggcccgtgcagctaggctcttcgccccgaggttaggacagttagatgacaactacgagtactgcgtgaagattatccgttggttggaatgttcaggcctcattgagaaggatttcaggatgaaatttctaacatggttcagtttgagatcgacagagcaggagcgaagagttgttatcaccttcatccgcaccctaattgatgaacccagtagtctggctgcgcagcttttggattcctttgaagaaattgttaccagtaagaggccaagaacaggtttctgtactaagttgtggcactagccaggtagagaaagcatggaactgatatctaatgatactctagcgttcttacatcagcaagattaactgggatgacagtgtaatagtaattttatttattttctgataaatgtagttaaactgatgttgctgagctttgatatttgccatgatgatatattcttcagggctagtttagaaacttaaaccccctccaggattcctagggattgagtggaaaattagcttatttccccctcaattcttgggaatcttggagtagatttaagtttccaaactagcccttaggggatttaagcttccaaactaagtgtaatggtg

SEQ ID NO: 200387 - DNA, 5209 bp, Zea Mays
cacgccgcgccctcgtgcgtccagcgtcctcgcttctttccaccgaactaccagcccccacccccctcccctgtcaaactagcgaagtcgcacgctcggctcgacggctcgagtaaataatacttcgtaaaaaataaactactaaaacgcgcacaaaaaccattccgagaggagaactaaaaaaatataaaaaatccccaaagctacctttcctcctgctctccctcccacgcctcttctcctcgccgccgccgccgccgccaccgctgagagaactaggactacgggcgggcgaagcacactggcttcctgcggacccgccgccgctccacgggcacaggcgttagccgtcgcgcggttgccctgtcagccctgatcggtgctgggcgggggtccgcggcgggctggtcgacgggcggtggcgggcgatggcgccggcgaagaggaagcgcgcagcagctgccgccgcggccgcggccgcggccaagtggaaggtgggcgacctcgtgctcgccaagatgaagggcttcccggcctggccggctatgattagtgaaccagagcagtggaagatgccttctactaaaaagaaaccgctggtttatttctatggtactaaacagattgctttctgcaattatgctgatctcgaggcattcaccgaagagaaaaaaagatccctacttgctaaaagacatggtaaaggggctgatttcctgagagcagttgatgagataattgaagtttatgattctctaaaggatataggtagcaacaaggttgacttgcctgccgaagaagtaaagccaggtgtagaaaagtttgctgaaaataatagccgcatggatactgaagatctgttgacgagcgatgtgttgtaaattctgctcctgatgagcctattgaaaatgtatccatccttgatgaaatgagggatatttctttgcgtactaattcattttcaaataagcaaagggatgcacagccacaaaattgctacacacgtactagggttccatctctgcggaagtcaagaagttcattaagtctggaatcaagaaaggctcaaggttctgataatgtctggttgcattctggtgaaggcacttccaaccaacctgtaactttgggggctagtaacggcaacagaatgttgaatactcctgctgaagtggatagtactagtaaccgtgaagcatctgaaaatggaactacagagacagaactgaaatcaaatggcacatcagatcttcccatgaacacagcagtaaatttcaagagaaaaagaaaatcagatagaaaacctggacctcattatagagattgtacaacaccaaataaagatgaccaattatgtgctgagtacagtgaaatccttccagattctccgaattcaaagaatgaagtaagcaagtcagatggagatgagcacttgccattggtcaaaagggcaagggtccgaatgggaaggtctcagttggaggattcaccagttgatgaaattgatgtttctaataagaagccagagcttgcaacagccttggaccaatgtgataggaatggtaaacctgcaagtcccgccaatgattactcagctgatcaggtgtctgcagtcgtaagttctgctcctaatctgtcctgcaaattggacacaactatcttgtcaaaggaaggtcatcttccttggaagaataaagaataccatccaaaaattttagcattagatgtggaagctgctttgcctccttcaaaacgcctgcatcgcgccttagaagcgatgtctgctaatgttgctgagaataccaagaatatacctgaagtgacaggaccaaatgaaatgactctaaatggctctttgttgacagcaagcagcctttctaataaatctgcagatgcagtggtcacagtatctaatagacctgtaatagttcaaagccctgaaccttctttagacacacagtttgtgcataacccatcaggcaaatgtacctcagaatcaattctacaaaataacagcattcctgattctgcttcagttccttcaaaagaaaatgatcatatcgtgttaaaaggtgatatttgtgaagaaaccctcatggatactaaaactgctaatggttcttgggattgtagtgaactaaataatgattcctgtgggaaaacttcagccctttgcatgaaattgaatcggcctgcacttaatgttacacaagccacatctgtacctgaccgattatcttcgtctttggagaaagccagtgaaaatgtggccgcaagtggtgtcaaagagacaaaaacatttggctcagctgtttgtgatgttgacagaagtgcagaaccaattgaccgttcaaacaacaatgtgacgagcaacacaatgcgacatagtgagactattgtagcggattcagtgaacaatgtgggggatacagcaagcaactcttcactggctactaaatcatccagtatacaatctgatgcagacacccggacgtctgaattgcatacattctcatctttggcattgaaagaactgaaccatagaaaaattaaagacaggagcacttctccagattcaatgccaatgaaagaacttatagctgttgcacaagctagaaggttttctcgatcaacttcctttccagataacttcctaaatgccaagtatattcctgaaacatcaataaatataccttctaaggaaggcccacacaggcagttgtcaccctcaaatcggataatcaggtctacttctggaaatgataatgttaattctaggagtccgtttgataatattcagcagaagaaattagcagcacatggagccaatgcagcgcgaaggtctttcaaagatttcctcagtacattgacaagaaccaaagaaagtatatcgcgcgcgacacgtcttgctatggaatgtgctaaatttggcattgctggtgaggcaattgacattatcgttgaacatctggaaaaggaatcaaatttgtataagagggtggatctcttctttcttgtagattcaataacacaatgctcccgcaatcagaaaggcggagctggagatgtatatccctctctcattcaggcagttctacctcgaatactctatgctgctgcacctcctggaaactcagcttgggagaatcgaaagcaatgtctcaaggttttgaaactttggcttgaaaggaaaacactttcagaatatatcatccgtcaccatattagagaaattgagactatcaacgaggcatcatttggaagttctcgccgtccttcaagaacagagagagctctaaatgaccctttgcgtgacaatgaaggaatgcttgttgatgagtatgggagtaatgctggttttcagctacccaacttaatttgcacaaaagtacttgaagaagaggaagaaaactcttctgaaggcaggagcttgagctttgaagctgttacacctgaacaggatgccccatataatgatgacaatgaagaatctcaaatgcctgttgagaagcatcaccatattctggaagaggttgatggtgagcttgagatggaggatgtagctccaccatctgatattggggcaaccaccaagtgccaaccagagcaaagtgacaccaatcgtgcaccatctgaccaacgcccttcagatgctggccctccacttcctgtggaccggcctccatctcctccgccattgccatcatctcctccacctgtccccgttcctcagagtgcacagatgcagcctaaattacaaatggcatctgatcccatggcgccacatcctcaaagagctacatatagtgttcaaagtcaacaacagcattctattgcagagcacccagttcaggatatggagggcaacaaaatcagataccacctcccccaccaatggcaccactcaatcctcctggtccccatggcagtttccctgctcccccagcaccttaccatgggaacaactatcatcggcctccaaccacatccatgcctaacgagggatatcatcagcaaccaccaccccctccaccgcctccaaatcaattcccttctgtgccaccagaacaccaacataggccacatcactggggtaataactgtccaccgtatcccgagagatatcggtacaatggacatgatcgaggtaatcacagacatgatagaaggcatcatggacatgacagacaacaccattatgatgatagaggataccactacgatgatagaggatatcactatgatgatagaggccattactttgatgatagaagacatcattttgacgatagaggacatcactttgatgagagagctattagggggccaatgcacaatgatgccgctgaccagggaagatattcttttcctccaggtcctcctcggattcctgaccattttgaagctccaccagccccaatgcactatgggcgaccatcagatcctccgccaaggccttgtgcaggctggtctaggccgcctaggatatctgataactattctccctcgagacattctgtggagcctccagtttcacatacagctggaggtcatggtggatggagacctagataacctttttcggtatcgaagcggtgctctgatgctttccttggtctgtgggggcttaacctgtgggagagtctgtctggtgtctctgcttcaggttgaaggcacccacggaggtggagcactccaggaaagtgggagctggtacctgcctccttgtacagatgtatctcatggattctacggcggtcgggctgcctgaactgctgtttgtaccctagtaggggtttagactgcgcgaccacacgcagagctgagttgtaggggtgtagggtgtcttctatcaaccgatcgtagtcttacattgtactgtttgttagtgcaacagtcctcgattccattgctgaattcctcctggcctcatcagacgacagccagctgctctgatgtcttgccgaaactgtttgagcacagcgtacatatatgcctaaaaaagagaaatataaatcattttgcccgttgcacctgcttatatataagagcatggtcgaactaaggggtgtttggtttctaggttcgctcaattttattttatttaatatggaaattttagttaacctagaaattagtctctagaaactaaacatcttctaatgatgacttgtggttgatcatttctgtttctctagaataaaaaaat

SEQ ID NO: 200388 - DNA, 5256 bp, Zea Mays
cgcgccctcgtgcgtccagcgtcctcgcttctttccaccgaactaccagcccccacccccctcccctgtcaaactagcgaagtcgcacgctcggctcgacggctcgagtaaataatacttcgtaaaaaataaactactaaaacgcgcacaaaaaccattccgagaggagaactaaaaaaatataaaaaatccccaaagctacctttcctcctgctctccctcccacgcctcttctcctcgccgccgccgccgccgccaccgctgagagaactaggactacgggcgggcgaagcacactggcttcctgcggacccgccgccgctccacgggcacaggcgttagccgtcgcgcggttgccctgtcagccctgatcggtgctgggcgggggtccgcggcgggctggtcgacgggcggtggcgggcgatggcgccggcgaagaggaagcgcgcagcagctgccgccgcggccgcggccgcggccaagtggaaggtgggcgacctcgtgctcgccaagatgaagggcttcccggcctggccggctatgattagtgaaccagagcagtggaagatgccttctactaaaaagaaaccgctggtttatttctatggtactaaacagattgctttctgcaattatgctgatctcgaggcattcaccgaagagaaaaaaagatccctacttgctaaaagacatggtaaaggggctgatttcctgagagcagttgatgagataattgaagtttatgattctctaaaggatataggtagcaacaaggttgacttgcctgccgaagaagtaaagccaggtgtagaaaagtttgctgaaaataatagccgcatggatactgaagatctggccttcagttgacgagcgatgtgttgtaaattctgctcctgatgagcctattgaaaatgtatccatccttgatgaaatgagggatatttctttgcgtactaattcattttcaaataagcaaagggatgcacagccacaaaattgctacacacgtactagggttccatctctgcggaagtcaagaagttcattaagtctggaatcaagaaaggctcaaggttctgataatgtctggttgcattctggtgaaggcacttccaaccaacctgtaactttgggggctagtaacggcaacagaatgttgaatactcctgctgaagtggatagtactagtaaccgtgaagcatctgaaaatggaactacagagacagaactgaaatcaaatggcacatcagatcttcccatgaacacagcagtaaatttcaagagaaaaagaaaatcagatagaaaacctggacctcattatagagattgtacaacaccaaataaagatgaccaattatgtgctgagtacagtgaaatccttccagattctccgaattcaaagaatgaagtaagcaagtcagatggagatgagcacttgccattggtcaaaagggcaagggtccgaatgggaaggtctcagttggaggattcaccagttgatgaaattgatgtttctaataagaagccagagcttgcaacagccttggaccaatgtgataggaatggtaaacctgcaagtcccgccaatgattactcagctgatcaggtgtctgcagtcgtaagttctgctcctaatctgtcctgcaaattggacacaactatcttgtcaaaggaaggtcatcttccttggaagaataaagaataccatccaaaaattttagcattagatgtggaagctgctttgcctccttcaaaacgcctgcatcgcgccttagaagcgatgtctgctaatgttgctgagaataccaagaatatacctgaagtgacaggaccaaatgaaatgactctaaatggctctttgttgacagcaagcagcctttctaataaatctgcagatgcagtggtcacagtatctaatagacctgtaatagttcaaagccctgaaccttctttagacacacagtttgtgcataacccatcaggcaaatgtacctcagaatcaattctacaaaataacagcattcctgattctgcttcagttccttcaaaagaaaatgatcatatcgtgttaaaaggtgatatttgtgaagaaaccctcatggatactaaaactgctaatggttcttgggattgtagtgaactaaataatgattcctgtgggaaaacttcagccctttgcatgaaattgaatcggcctgcacttaatgttacacaagccacatctgtacctgaccgattatcttcgtctttggagaaagccagtgaaaatgtggccgcaagtggtgtcaaagagacaaaaacatttggctcagctgtttgtgatgttgacagaagtgcagaaccaattgaccgttcaaacaacaatgtgacgagcaacacaatgcgacatagtgagactattgtagcggattcagtgaacaatgtgggggatacagcaagcaactcttcactggctactaaatcatccagtatacaatctgatgcagacacccggacgtctgaattgcatacattctcatctttggcattgaaagaactgaaccatagaaaaattaaagacaggagcacttctccagattcaatgccaatgaaagaacttatagctgttgcacaagctagaaggttttctcgatcaacttcctttccagataacttcctaaatgccaagtatattcctgaaacatcaataaatataccttctaaggaaggcccacacaggcagttgtcaccctcaaatcggataatcaggtctacttctggaaatgataatgttaattctaggagtccgtttgataatattcagcagaagaaattagcagcacatggagccaatgcagcgcgaaggtctttcaaagatttcctcagtacattgacaagaaccaaagaaagtatatcgcgcgcgacacgtcttgctatggaatgtgctaaatttggcattgctggcaattgacattatcgttgaacatctggaaaaggaatcaaatttgtataagagggtggatctcttctttcttgtagattcaataacacaatgctcccgcaatcagaaaggcggagctggagatgtatatccctctctcattcaggcagttctacctcgaatactctatgctgctgcacctcctggaaactcagcttgggagaatcgaaagcaatgtctcaaggttttgaaactttggcttgaaaggaaaacactttcagaatatatcatccgtcaccatattagagaaattgagactatcaacgaggcatcatttggaagttctcgccgtccttcaagaacagagagagctctaaatgaccctttgcgtgacaatgaaggaatgcttgttgatgagtatgggagtaatgctggttttcagctacccaacttaatttgcacaaaagtacttgaagaagaggaagaaaactcttctgaaggcaggagcttgagctttgaagctgttacacctgaacaggatgccccatataatgatgacaatgaagaatctcaaatgcctgttgagaagcatcaccatattctggaagaggttgatggtgagcttgagatggaggatgtagctccaccatctgatattggggcaaccaccaagtgccaaccagagcaaagtgacaccaatcgtgcaccatctgaccaacgcccttcagatgctggccctccacttcctgtggaccggcctccatctcctccgccattgccatcatctcctccacctgtccccgttcctcagagtgcacagatgcagcctaaattacaaatggcatctgatcccatggcgccacatcctcaaagagctacatatagtgttcaaagtcaacaacagcattctattgcagagcacccaggtaacatgaattcttctgttgcaccattgccacccccaccgtttaacagttcaggatatggagggcaacaaaatcagataccacctcccccaccaatggcaccactcaatcctcctggtccccatggcagtttccctgctcccccagcaccttaccatgggaacaactatcatcggcctccaaccacatccatgcctaacgagggatatcatcagcaaccaccaccccctccaccgcctccaaatcaattcccttctgtgccaccagaacaccaacataggccacatcactggggtaataactgtccaccgtatcccgagagatatcggtacaatggacatgatcgaggtaatcacagacatgatagaaggcatcatggacatgacagacaacaccattatgatgatagaggataccactacgatgatagaggatatcactatgatgatagaggccattactttgatgatagaagacatcattttgacgatagaggacatcactttgatgagagagctattagggggccaatgcacaatgatgccgctgaccagggaagatattcttttcctccaggtcctcctcggattcctgaccattttgaagctccaccagccccaatgcactatgggcgaccatcagatcctccgccaaggccttgtgcaggctggtctaggccgcctaggatatctgataactattctccctcgagacattctgtggagcctccagtttcacatacagctggaggtcatggtggatggagacctagataacctttttcggtatcgaagcggtgctctgatgctttccttggtctgtgggggcttaacctgtgggagagtctgtctggtgtctctgcttcaggttgaaggcacccacggaggtggagcactccaggaaagtgggagctggtacctgcctccttgtacagatgtatctcatggattctacggcggtcgggctgcctgaactgctgtttgtaccctagtaggggtttagactgcgcgaccacacgcagagctgagttgtaggggtgtagggtgtcttctatcaaccgatcgtagtcttacattgtactgtttgttagtgcaacagtcctcgattccattgctgaattcctcctggcctcatcagacgacagccagctgctctgatgtcttgccgaaactgtttgagcacagcgtacatatatgcctaaaaaagagaaatataaatcattttgcccgttgcacctgcttatatataagagcatggtcgaactaaggggtgtttggtttctaggttcgctcaattttattttatttaatatggaaattttagttaacctagaaattagtctctagaaactaaacatcttctaatgatgacttgtggttgatcatttctgtttctctagaataaaaaaat

SEQ ID NO: 200389 - DNA, 5302 bp, Zea Mays
cgcgccctcgtgcgtccagcgtcctcgcttctttccaccgaactaccagcccccacccccctcccctgtcaaactagcgaagtcgcacgctcggctcgacggctcgagtaaataatacttcgtaaaaaataaactactaaaacgcgcacaaaaaccattccgagaggagaactaaaaaaatataaaaaatccccaaagctacctttcctcctgctctccctcccacgcctcttctcctcgccgccgccgccgccgccaccgctgagagaactaggactacgggcgggcgaagcacactggcttcctgcggacccgccgccgctccacgggcacaggcgttagccgtcgcgcggttgccctgtcagccctgatcggtgctgggcgggggtccgcggcgggctggtcgacgggcggtggcgggcgatggcgccggcgaagaggaagcgcgcagcagctgccgccgcggccgcggccgcggccaagtggaaggtgggcgacctcgtgctcgccaagatgaagggcttcccggcctggccggctatgattagtgaaccagagcagtggaagatgccttctactaaaaagaaaccgctggtttatttctatggtactaaacagattgctttctgcaattatgctgatctcgaggcattcaccgaagagaaaaaaagatccctacttgctaaaagacatggtaaaggggctgatttcctgagagcagttgatgagataattgaagtttatgattctctaaaggatataggtagcaacaaggttgacttgcctgccgaagaagtaaagccaggtgtagaaaagtttgctgaaaataatagccgcatggatactgaagatctggtcagtagctcctatatgcacaatgatagaaagatagaagatcattatgtcactaccaggagtcatgacatggtcaattctgacaggccttcagttgacgagcgatgtgttgtaaattctgctcctgatgagcctattgaaaatgtatccatccttgatgaaatgagggatatttctttgcgtactaattcattttcaaataagcaaagggatgcacagccacaaaattgctacacacgtactagggttccatctctgcggaagtcaagaagttcattaagtctggaatcaagaaaggctcaagataatgtctggttgcattctggtgaaggcacttccaaccaacctgtaactttgggggctagtaacggcaacagaatgttgaatactcctgctgaagtggatagtactagtaaccgtgaagcatctgaaaatggaactacagagacagaactgaaatcaaatggcacatcagatcttcccatgaacacagcagtaaatttcaagagaaaaagaaaatcagatagaaaacctggacctcattatagagattgtacaacaccaaataaagatgaccaattatgtgctgagtacagtgaaatccttccagattctccgaattcaaagaatgaagtaagcaagtcagatggagatgagcacttgccattggtcaaaagggcaagggtccgaatgggaaggtctcagttggaggattcaccagttgatgaaattgatgtttctaataagaagccagagcttgcaacagccttggaccaatgtgataggaatggtaaacctgcaagtcccgccaatgattactcagctgatcaggtgtctgcagtcgtaagttctgctcctaatctgtcctgcaaattggacacaactatcttgtcaaaggaaggtcatcttccttggaagaataaagaataccatccaaaaattttagcattagatgtggaagctgctttgcctccttcaaaacgcctgcatcgcgccttagaagcgatgtctgctaatgttgctgagaataccaagaatatacctgaagtgacaggaccaaatgaaatgactctaaatggctctttgttgacagcaagcagcctttctaataaatctgcagatgcagtggtcacagtatctaatagacctgtaatagttcaaagccctgaaccttctttagacacacagtttgtgcataacccatcaggcaaatgtacctcagaatcaattctacaaaataacagcattcctgattctgcttcagttccttcaaaagaaaatgatcatatcgtgttaaaaggtgatatttgtgaagaaaccctcatggatactaaaactgctaatggttcttgggattgtagtgaactaaataatgattcctgtgggaaaacttcagccctttgcatgaaattgaatcggcctgcacttaatgttacacaagccacatctgtacctgaccgattatcttcgtctttggagaaagccagtgaaaatgtggccgcaagtggtgtcaaagagacaaaaacatttggctcagctgtttgtgatgttgacagaagtgcagaaccaattgaccgttcaaacaacaatgtgacgagcaacacaatgcgacatagtgagactattgtagcggattcagtgaacaatgtgggggatacagcaagcaactcttcactggctactaaatcatccagtatacaatctgatgcagacacccggacgtctgaattgcatacattctcatctttggcattgaaagaactgaaccatagaaaaattaaagacaggagcacttctccagattcaatgccaatgaaagaacttatagctgttgcacaagctagaaggttttctcgatcaacttcctttccagataacttcctaaatgccaagtatattcctgaaacatcaataaatataccttctaaggaaggcccacacaggcagttgtcaccctcaaatcggataatcaggtctacttctggaaatgataatgttaattctaggagtccgtttgataatattcagcagaagaaattagcagcacatggagccaatgcagcgcgaaggtctttcaaagatttcctcagtacattgacaagaaccaaagaaagtatatcgcgcgcgacacgtcttgctatggaatgtgctaaatttggcattgctggtgaggcaattgacattatcgttgaacatctggaaaaggaatcaaatttgtataagagggtggatctcttctttcttgtagattcaataacacaatgctcccgcaatcagaaaggcggagctggagatgtatatccctctctcattcaggcagttctacctcgaatactctatgctgctgcacctcctggaaactcagcttgggagaatcgaaagcaatgtctcaaggttttgaaactttggcttgaaaggaaaacactttcagaatatatcatccgtcaccatattagagaaattgagactatcaacgaggcatcatttggaagttctcgccgtccttcaagaacagagagagctctaaatgaccctttgcgtgacaatgaaggaatgcttgttgatgagtatgggagtaatgctggttttcagctacccaacttaatttgcacaaaagtacttgaagaagaggaagaaaactcttctgaaggcaggagcttgagctttgaagctgttacacctgaacaggatgccccatataatgatgacaatgaagaatctcaaatgcctgttgagaagcatcaccatattctggaagaggttgatggtgagcttgagatggaggatgtagctccaccatctgatattggggcaaccaccaagtgccaaccagagcaaagtgacaccaatcgtgcaccatctgaccaacgcccttcagatgctggccctccacttcctgtggaccggcctccatctcctccgccattgccatcatctcctccacctgtccccgttcctcagagtgcacagatgcagcctaaattacaaatggcatctgatcccatggcgccacatcctcaaagagctacatatagtgttcaaagtcaacaacagcattctattgcagagcacccagttcaggatatggagggcaacaaaatcagataccacctcccccaccaatggcaccactcaatcctcctggtccccatggcagtttccctgctcccccagcaccttaccatgggaacaactatcatcggcctccaaccacatccatgcctaacgagggatatcatcagcaaccaccaccccctccaccgcctccaaatcaattcccttctgtgccaccagaacaccaacataggccacatcactggggtaataactgtccaccgtatcccgagagatatcggtacaatggacatgatcgaggtaatcacagacatgatagaaggcatcatggacatgacagacaacaccattatgatgatagaggataccactacgatgatagaggatatcactatgatgatagaggccattactttgatgatagaagacatcattttgacgatagaggacatcactttgatgagagagctattagggggccaatgcacaatgatgccgctgaccagggaagatattcttttcctccagccatgtgcaggtcctcctcggattcctgaccattttgaagctccaccagccccaatgcactatgggcgaccatcagatcctccgccaaggccttgtgcaggctggtctaggccgcctaggatatctgataactattctccctcgagacattctgtggagcctccagtttcacatacagctggaggtcatggtggatggagacctagataacctttttcggtatcgaagcggtgctctgatgctttccttggtctgtgggggcttaacctgtgggagagtctgtctggtgtctctgcttcaggttgaaggcacccacggaggtggagcactccaggaaagtgggagctggtacctgcctccttgtacagatgtatctcatggattctacggcggtcgggctgcctgaactgctgtttgtaccctagtaggggtttagactgcgcgaccacacgcagagctgagttgtaggggtgtagggtgtcttctatcaaccgatcgtagtcttacattgtactgtttgttagtgcaacagtcctcgattccattgctgaattcctcctggcctcatcagacgacagccagctgctctgatgtcttgccgaaactgtttgagcacagcgtacatatatgcctaaaaaagagaaatataaatcattttgcccgttgcacctgcttatatataagagcatggtcgaactaaggggtgtttggtttctaggttcgctcaattttattttatttaatatggaaattttagttaacctagaaattagtctctagaaactaaacatcttctaatgatgacttgtggttgatcatttctgtttctctagaataaaaaaat

SEQ ID NO: 200390 - DNA, 2893 bp, Zea Mays
gtggagtggagttattgcagtcattgcacttcatttttttctttaaaaatatacaaacatttttgtgatggacaaacattttgagacactgcttcctgaagatttgagttttgacaaaattgtaaaacgcatggagggcatacattctcatctttggcattgaaagaactgaaccatagaaaaattaaagacaggagcacttctccagattcaatgccaatgaaagaacttatagctgttgcacaagctagaaggttttctcgatcaacttcctttccagataacttcctaaatgccaagtatattcctgaaacatcaataaatataccttctaaggaaggcccacacaggcagttgtcaccctcaaatcggataatcaggtctacttctggaaatgataatgttaattctaggagtccgtttgataatattcagcagaagaaattagcagcacatggagccaatgcagcgcgaaggtctttcaaagatttcctcagtacattgacaagaaccaaagaaagtatatcgcgcgcgacacgtcttgctatggaatgtgctaaatttggcattgctggtgaggcaattgacattatcgttgaacatctggaaaaggaatcaaatttgtataagagggtggatctcttctttcttgtagattcaataacacaatgctcccgcaatcagaaaggcggagctggagatgtatatccctctctcattcaggcagttctacctcgaatactctatgctgctgcacctcctggaaactcagcttgggagaatcgaaagcaatgtctcaaggttttgaaactttggcttgaaaggaaaacactttcagaatatatcatccgtcaccatattagagaaattgagactatcaacgaggcatcatttggaagttctcgccgtccttcaagaacagagagagctctaaatgaccctttgcgtgacaatgaaggaatgcttgttgatgagtatgggagtaatgctggttttcagctacccaacttaatttgcacaaaagtacttgaagaagaggaagaaaactcttctgaaggcaggagcttgagctttgaagctgttacacctgaacaggatgccccatataatgatgacaatgaagaatctcaaatgcctgttgagaagcatcaccatattctggaagaggttgatggtgagcttgagatggaggatgtagctccaccatctgatattggggcaaccaccaagtgccaaccagagcaaagtgacaccaatcgtgcaccatctgaccaacgcccttcagatgctggccctccacttcctgtggaccggcctccatctcctccgccattgccatcatctcctccacctgtccccgttcctcagagtgcacagatgcagcctaaattacaaatggcatctgatcccatggcgccacatcctcaaagagctacatatagtgttcaaagtcaacaacagcattctattgcagagcacccaggtaacatgaattcttctgttgcaccattgccacccccaccgtttaacagttcaggatatggagggcaacaaaatcagataccacctcccccaccaatggcaccactcaatcctcctggtccccatggcagtttccctgctcccccagcaccttaccatgggaacaactatcatcggcctccaaccacatccatgcctaacgagggatatcatcagcaaccaccaccccctccaccgcctccaaatcaattcccttctgtgccaccagaacaccaacataggccacatcactggggtaataactgtccaccgtatcccgagagatatcggtacaatggacatgatcgaggtaatcacagacatgatagaaggcatcatggacatgacagacaacaccattatgatgatagaggataccactacgatgatagaggatatcactatgatgatagaggccattactttgatgatagaagacatcattttgacgatagaggacatcactttgatgagagagctattagggggccaatgcacaatgatgccgctgaccagggaagatattcttttcctccaggtcctcctcggattcctgaccattttgaagctccaccagccccaatgcactatgggcgaccatcagatcctccgccaaggccttgtgcaggctggtctaggccgcctaggatatctgataactattctccctcgagacattctgtggagcctccagtttcacatacagctggaggtcatggtggatggagacctagataacctttttcggtatcgaagcggtgctctgatgctttccttggtctgtgggggcttaacctgtgggagagtctgtctggtgtctctgcttcaggttgaaggcacccacggaggtggagcactccaggaaagtgggagctggtacctgcctccttgtacagatgtatctcatggattctacggcggtcgggctgcctgaactgctgtttgtaccctagtaggggtttagactgcgcgaccacacgcagagctgagttgtaggggtgtagggtgtcttctatcaaccgatcgtagtcttacattgtactgtttgttagtgcaacagtcctcgattccattgctgaattcctcctggcctcatcagacgacagccagctgctctgatgtcttgccgaaactgtttgagcacagcgtacatatatgcctaaaaaagagaaatataaatcattttgcccgttgcacctgcttatatataagagcatggtcgaactaaggggtgtttggtttctaggttcgctcaattttattttatttaatatggaaattttagttaacctagaaattagtctctagaaactaaacatcttctaatgatgacttgtggttgatcatttctgtttctctagaataaaaaaat

SEQ ID NO: 200391 - DNA, 2227 bp, Zea Mays
ccaacctctgcatattatgcgggcggagctggagatgtatatccctctctcattcaggcagttctacctcgaatactctatgctgctgcacctcctggaaactcagcttgggagaatcgaaagcaatgtctcaaggttttgaaactttggcttgaaaggaaaacactttcagaatatatcatccgtcaccatattagagaaattgagactatcaacgaggcatcatttggaagttctcgccgtccttcaagaacagagagagctctaaatgaccctttgcgtgacaatgaaggaatgcttgttgatgagtatgggagtaatgctggttttcagctacccaacttaatttgcacaaaagtacttgaagaagaggaagaaaactcttctgaaggcaggagcttgagctttgaagctgttacacctgaacaggatgccccatataatgatgacaatgaagaatctcaaatgcctgttgagaagcatcaccatattctggaagaggttgatggtgagcttgagatggaggatgtagctccaccatctgatattggggcaaccaccaagtgccaaccagagcaaagtgacaccaatcgtgcaccatctgaccaacgcccttcagatgctggccctccacttcctgtggaccggcctccatctcctccgccattgccatcatctcctccacctgtccccgttcctcagagtgcacagatgcagcctaaattacaaatggcatctgatcccatggcgccacatcctcaaagagctacatatagtgttcaaagtcaacaacagcattctattgcagagcacccaggtaacatgaattcttctgttgcaccattgccacccccaccgtttaacagttcaggatatggagggcaacaaaatcagataccacctcccccaccaatggcaccactcaatcctcctggtccccatggcagtttccctgctcccccagcaccttaccatgggaacaactatcatcggcctccaaccacatccatgcctaacgagggatatcatcagcaaccaccaccccctccaccgcctccaaatcaattcccttctgtgccaccagaacaccaacataggccacatcactggggtaataactgtccaccgtatcccgagagatatcggtacaatggacatgatcgaggtaatcacagacatgatagaaggcatcatggacatgacagacaacaccattatgatgatagaggataccactacgatgatagaggatatcactatgatgatagaggccattactttgatgatagaagacatcattttgacgatagaggacatcactttgatgagagagctattagggggccaatgcacaatgatgccgctgaccagggaagatattcttttcctccaggtcctcctcggattcctgaccattttgaagctccaccagccccaatgcactatgggcgaccatcagatcctccgccaaggccttgtgcaggctggtctaggccgcctaggatatctgataactattctccctcgagacattctgtggagcctccagtttcacatacagctggaggtcatggtggatggagacctagataacctttttcggtatcgaagcggtgctctgatgctttccttggtctgtgggggcttaacctgtgggagagtctgtctggtgtctctgcttcaggttgaaggcacccacggaggtggagcactccaggaaagtgggagctggtacctgcctccttgtacagatgtatctcatggattctacggcggtcgggctgcctgaactgctgtttgtaccctagtaggggtttagactgcgcgaccacacgcagagctgagttgtaggggtgtagggtgtcttctatcaaccgatcgtagtcttacattgtactgtttgttagtgcaacagtcctcgattccattgctgaattcctcctggcctcatcagacgacagccagctgctctgatgtcttgccgaaactgtttgagcacagcgtacatatatgcctaaaaaagagaaatataaatcattttgcccgttgcacctgcttatatataagagcatggtcgaactaaggggtgtttggtttctaggttcgctcaattttattttatttaatatggaaattttagttaacctagaaattagtctctagaaactaaacatcttctaatgatgacttgtggttgatcatttctgtttctctagaataaaaaaat

SEQ ID NO: 200392 - DNA, 984 bp, Zea Mays
cacatccggttcagtttagaggttcatgtttcatcataaggaatgaacagtagtcgacaaatggaactccactacataaacactggatttccatacacaatcaccgagagcttcatggatttctttgagggtctcacttatgctcatgctgactttgctctcacggatggctttcaagatcagggtaatccatactgggcaatgatgcatacaaactcgtacaagtatggatactctggtcctgggaactattacagttatgctcatgtctatgacatagacgattacatgcgtagagcggatggtgggcgcagaatatgggataacactacacctgtaaacaatgttgattctgccaatgttgtcctgcagggtggtgaagctccccacacaacgacaaatactattaacaaggaatgcatccaacaggtacaccaaagtccaggtagtcctcaggttgtttggcaagataacattgagcctgataatatgacatatgaggaactgttggatttgggtgaggcagttggaacccagagccgtggtctctcccaagaacgcatttcatcgcttcctgtcacgaagtataagtgtgggtttttttcaaggaagaaaacacgccgtgagaggtgtgtgatttgccaaatggagtacaggagaggaaatttgcagatgacacttccatgcaagcatgtataccatgccagctgcgtgacaagatggcttggcataaacaaggtatgccctgtttgctttgctgaagttcctggcgaggatcctgaggcaatgagtcaacagttatgaggccactgggaagttgttgcactttgaagctgagtactgcccccaatgaatgcatgatgttgcttgaaggcagcttattgtccccactttataatgtgtattagcacgtatacaaatataggtattgtagatcagatgtatttagtgttgggtcagcgttttgtacgtaatcaatcagga

SEQ ID NO: 200393 - DNA, 948 bp, Zea Mays
  misc_feature (1)..(1): n is a, c, g, or t
ntccgacctctacatctccatccgcggaagcagaccacctccaatccttctctttcacgcagtcattgcttgcctccttagcccaactgttggtaccagaggttcatgtttcatcataaggaatgaacagtagtcgacaaatggaactccactacataaacactggatttccatacacaatcaccgagagcttcatggatttctttgagggtctcacttatgctcatgctgactttgctctcacggatggctttcaagatcagggtaatccatactgggcaatgatgcatacaaactcgtacaagtatggatactctggtcctgggaactattacaggtggtgaagctccccacacaacgacaaatactattaacaaggaatgcatccaacaggtacaccaaagtccaggtagtcctcaggttgtttggcaagataacattgagcctgataatatgacatatgaggaactgttggatttgggtgaggcagttggaacccagagccgtggtctctcccaagaacgcatttcatcgcttcctgtcacgaagtataagtgtgggtttttttcaaggaagaaaacacgccgtgagaggtgtgtgatttgccaaatggagtacaggagaggaaatttgcagatgacacttccatgcaagcatgtataccatgccagctgcgtgacaagatggcttggcataaacaaggtatgccctgtttgctttgctgaagttcctggcgaggatcctgaggcaatgagtcaacagttatgaggccactgggaagttgttgcactttgaagctgagtactgcccccaatgaatgcatgatgttgcttgaaggcagcttattgtccccactttataatgtgtattagcacgtatacaaatataggtattgtagatcagatgtatttagtgttgggtcagcgttttgtacgtaatcaatcagga

SEQ ID NO: 200394 - DNA, 916 bp, Zea Mays
  misc_feature (1)..(1): n is a, c, g, or t
ntccgacctctacatctccatccgcggaagcagaccacctccaatccttctctttcacgcagtcattgcttgcctccttagcccaactgttggtaccagaggttcatgtttcatcataaggaatgaacagtagtcgacaaatggaactccactacataaacactggatttccatacacaatcaccgagagcttcatggatttctttgagggtctcacttatgctcatgctgactttgctctcacggatggctttcaagatcagggtaatccatactgggcaatgatgcatacaaactcgtacaaggtggtgaagctccccacacaacgacaaatactattaacaaggaatgcatccaacaggtacaccaaagtccaggtagtcctcaggttgtttggcaagataacattgagcctgataatatgacatatgaggaactgttggatttgggtgaggcagttggaacccagagccgtggtctctcccaagaacgcatttcatcgcttcctgtcacgaagtataagtgtgggtttttttcaaggaagaaaacacgccgtgagaggtgtgtgatttgccaaatggagtacaggagaggaaatttgcagatgacacttccatgcaagcatgtataccatgccagctgcgtgacaagatggcttggcataaacaaggtatgccctgtttgctttgctgaagttcctggcgaggatcctgaggcaatgagtcaacagttatgaggccactgggaagttgttgcactttgaagctgagtactgcccccaatgaatgcatgatgttgcttgaaggcagcttattgtccccactttataatgtgtattagcacgtatacaaatataggtattgtagatcagatgtatttagtgttgggtcagcgttttgtacgtaatcaatcagga

SEQ ID NO: 200395 - DNA, 716 bp, Zea Mays
ctggagtggacatcttctcttctctcaaacgaatactcaagtgaccatttgacaatccaaaaagaattggtttggtgatgcagctgtttgttggcacatatggtttggcatgctacaacaacgcctacttcgccagggtcggcggcatcagcctgtcggagatgaactacctggaggtggacttcctcttcgccgtcgggttcgacctcaacgtgtcgccggagacgttcggccactactgcacggtcctccgggccgagatgctgtacctggagctggagggtcctcctcctccagccgccagtacaagtctgcacaggtgctgcttgtcagaagacgacgacggtagcagcagcaccagcagcagctagctgcatagagacaggtacagcggttgcttccaagcaagcaaccatgtatgaatgtgtccgtgtacactgtacagtacagacatgcttgcttgaaagcaaacacggagtacgtgacgtaggcatctgcgtgtgatcggtttgctatctggcggctggcgcttagttgtttttagctttgttattaggtaatctgttgctcttgtagtcttgtatagctgcattgctgttgttcatgtggaaatcggaaaaccgtaaggaacggtataaattgcagtcttggggcagtgtaattgttttcttgtccagcagtttatccatagtttatctaaaatattgtttttgctc

SEQ ID NO: 200396 - DNA, 3174 bp, Zea Mays
ccagcatgcagataagcaaactgcgttcagtttcaaatttttctggcaactaaaaagaagaacttgtataaggacaaaaccgcaacataccaccttatcatcattatctaacacagcagtgctgttttatggtcttcagaggatgaacaagacttgattctgagttctagatgccgccgtgcactgaaataagccacacagctgtaccactaatttgcttcccccaagcatatctatcttagtaaaagcggtaccaagtgaattaaagaaatcgttatgttgggagcaggcagagaacaagtgtcgataaaatctcttaccactttttatcgttgaagtctaatattcccatcaaataatgtttcgcttgaggccctccaccatttgtaatgagaaggcaatcttcatcacagcaacattagagtggaagctttaatgagcacgctctaagttctagcctgtacatatcaaagacatagaagattaccaaccaagtactagggaattccggctcgctttcctcattcacctagtttattgaaagggtgagggaatgttcatgctgcaaggaaagaggatgaggtgtcaatctgacagacaagtcaaaaggcagaccacttttcaggagcatatcatgtctagctagggtaacactgtaacagatatagggaataagtgagtgcagtcatcagattttattcaccaatgtggggttaccatggacactcctgtttttttttctgtaagcccagatagtggacatacaggcctacactgtccagtagtgacgaccgatataaatatatgcatcttaaagctgagattctaaggcatctagagcacacgactcctgatatcatgaaagccttcagcacttcaggttacaagtataaataggacacgtacctgcacccatcagtgcacccaacttcacatttgaggccaaatcagcttctttgttctctagagagcgggcctcaaaatagcattcttgactaaccatgtcaagggacccactagtagtaggacatgtagtaggtgacattctggacccatttattaaaacagcctcacttaaggttctgtacaacaacaaggaactgaccaatggatctgacctcaagccatcacaagtagcaagtgaaccaagggttgaaattggtgggcgcgacatgaggaacctttacactctggtaagtccataactagttcattacgacattgagcagtattaagtttagttaaagtgaatacaaggtatcagggtaaataaacaatcatatgcctagctgcacaagatctctgtttttataaaactaagtacacaatctcttacttgtaacatctgcttttggagttcatcacctttaattgttttcagtgcccacatagcaatgaaaacaaagaatctcaactttccataagttgtacaattttttttatggattgaaaaggacctctgcacttgcatttaatttcatgcaccatccgtatgttcgacagcatcggcacatgtacctgcatcttgtacatggtgctgactagaataaaaagttatgtcatcaacaactacaggaagtttgaattactatagtaagatgcataaatacatgtcatatgatatgagttttcgcattttagtagtgttatgacgattgacgaagacctttagagacaccagtgtgtagttggattctaaagagcgataataataaaaaaagagacaaagaaaggtcaaaattgacatgaaaaaagacaataaaatgagacttgaaaggataaaatataccaaagatttagtcttaaataggagcgaatgaaaaacagctatctatgtgactgaaccttgatttatggcttcttttgactttcaactctagcctactccaatttacttgggactaaaagactttattgttatatgacgaggttattgtagtagtaacattaaaataagtctgcattagagactttctttttgtgtttgagaaaaaaggctttatttcattcatcagggttaacaggtaccttaaaaaagaatgcctagattgcgctggttaatcaaatagtatctttgtaattctctgaataaaagataaggaagtgtggtaacaatttcagagaacaaatgctaagcacctgctactgaataagggaactattatgtttagttctgagatatttcctcaagataacaagctaacccttgctactaggtgatggtggatccagactccccaagtccaagtaacccaacaaatagagaatatcttcattggttggtgacagacatcccggaatcagcaaatgctagctatagaaatgaaattgtcagctatgaaaacccaaagccatctgctggaatacatcgctttgtctttgtactcttccgccagtctgtccagcaaaccgtttatgcaccaggatggagacaaaatttcaacacgagagacttttctgcgctctataatcttggacctccagtggctgcagttttcttcaattgtcaaagggagaatgggtgtggaggaagacgatatattagataaataccatctcactgactgtgcactgcaagaaggaatattaattaaattttaaaaaaaacatggccagccacttcacaaagccatgataaatgctgggccttgaaatgtagcttcatttgaaaattacttcgccacatctgcaagtgcaatgaatttagcttacagtttcaccatcttgaacaatggtctgtcccaagtgaggcaaacctgcatattaaaattattgttctggtcgtgttcaaaagcatatacccccttcatcaaactaataagttaactacattgtagtagcgacaaaataaatcatgcttttgttttaatgtaactgcataaccattggctgacactcgccgggtgttttatatgcactttctcatcatagaaaaaaatacagaggaaagagcttacatagtcacatgtactccatataagaaaaacttctcaacaatagaaaatggcatacccgttcacatatgcacagacgattctagctgacgcccgaaatggcgtcactgaatcaccaacacatgggtgcacctttaaacgtgtacaaaaaaaaagtatcacaaattatgaatggatagtaccggatgcagaatttgagggggaaaatcagcacacaaag

SEQ ID NO: 200397 - DNA, 1567 bp, Zea Mays
gactgcagaactgaacatcccaacccaagtcccgaaccctccctcaccactcccccgatctccgccactccaaaatgtggcgccgccaccacctcctccggctacttccgcctccggccaccgccgctaccgccgcggccccttcccacttcctgcgctacctctctacctcaagcaccccgaccccggccgcctccctggcctcgtccctcgcgtcggcgctcactgcgctctccacgaccccgccccccgccaccaccccggacgcttacttctccctccacttctccgacgtgcggcctaccaacgcgctcctcgccgaggcgctcgcgctctccccgcccgccacctcccgcgccgctgccgatctcttccgcttcctcgtccgccgccgctcgctccacccctccgacggcgcgctcgcgcccatcgttcgccacctcgcccgccgccgcgacttccccgccgtgcgcgcgctcatccaggagtttccaaccgctctcgggcccaccacgctcgacgcctatctccagcagctcaccagagccgggcgcccaacggacgctgtcaaggtgttcgacgaattgccggagcagctccgtaaccgcgaggctctcactttgctggtctcctcgctttcttccgagggattcccctcgcacgcagagcgagctgccaagaaggtcgccagtgagatcttcccagatgataatatctgcactttgcttgtatctggttatgccaatgctggtaagctcgaccatgcgctaaggttgattggtgagacacgtagaggtgggttccatccaggattggatgcgtataatgctgttcttgattgtgtctgccggctctgtcgcaagaaggatccactgaggatgccaatagaagcggagaagttcttagttgacatggaagcaaatgggattcctcgtgatgcaggcacatttcgggttctgatcacaaatttttgcaagatccgcaagacaggggatgccatgaatctgttccagcgtatgggtgagtggggctgctcaccggatgctgacacgtacttggtgctcattaggagcttgtaccaagctgcccgaacttcagagggggatgaaatgataacgtggatgcggtctgcaggatttggagataaacttgataggaaggcatattatggattcatcaagattttatgtgggattgagagggttgagcatgctgtcaaggtattccgtatgatgaaaggttatgggcatgctcctggagtaaaatcatataccttgctcattgagaagctggccagacacaatttaggggatcgttctaatgcacttttcagggaggcagttgcacgtggtgtacctgtggcacaaggagagtacaatgttgacaaaaggtatgtcaagacaaagaaggagaagacggtgaagaagaggctgactttgccagagaagatgagattgaagagcaagaggttatacaagctcagaatgagctttgtcaagaagcccaagcgtcgaatgctccgggtttaagcataattttggctttcaaaagtcgaagaactttggca

SEQ ID NO: 200398 - DNA, 1568 bp, Zea Mays
gactgcagaactgaacatcccaacccaagtcccgaaccctccctcaccactcccccgatctccgccactccaaaatgtggcgccgccaccacctcctccggctacttccgcctccggccaccgccgctaccgccgcggccccttcccacttcctgcgctacctctctacctcaagcaccccgaccccggccgcctccctggcctcgtccctcgcgtcggcgctcactgcgctctccacgaccccgccccccgccaccaccccggacgcttacttctccctccacttctccgacgtgcggcctaccaacgcgctcctcgccgaggcgctcgcgctctccccgcccgccacctcccgcgccgctgccgatctcttccgcttcctcgtccgccgccgctcgctccacccctccgacggcgcgctcgcgcccatcgttcgccacctcgcccgccgccgcgacttccccgccgtgcgcgcgctcatccaggagtttccaaccgctctcgggcccaccacgctcgacgcctatctccagcagctcaccagagccgggcgcccaacggacgctgtcaaggtgttcgacgaattgccggagcagctccgtaaccgcgaggctctcactttgctggtctcctcgctttcttccgagggattcccctcgcacgcagagcgagctgccaagaaggtcgccagtgagatcttcccagatgataatatctgcactttgcttgtatctggttatgccaatgctggtaagctcgaccatgcgctaaggttgattggtgagacacgtagaggtgggttccatccaggattggatgcgtataatgctgttcttgattgtgtctgccggctctgtcgcaagaaggatccactgaggatgccaatagaagcggagaagttcttagttgacatggaagcaaatgggattcctcgtgatgcaggcacatttcgggttctgatcacaaatttttgcaagatccgcaagacaggggatgccatgaatctgttccagcgtatgggtgagtggggctgctcaccggatgctgacacgtacttggtgctcattaggagcttgtaccaagctgcccgaacttcagagggggatgaaatgataacgtggatgcggtctgcaggatttggagataaacttgataggaaggcatattatggattcatcaagattttatgtgggattgagagggttgagcatgctgtcaaggtattccgtatgatgaaaggttatgggcatgctcctggagtaaaatcatataccttgctcattgagaagctggccagacacaatttaggggatcgttctaatgcacttttcagggaggcagttgcacgtggtgtacctgtggcacaaggagagtacaatgttgacaaaaggtatgtcaagacaaagaaggagaagacggtgaagaagaggctgactttgccagagaagatgagattgaagagcaagaggttatacaagctcagaatgagctttgtcaagaagcccaagcgtcgaatgctccgggtttaagcataattttggatacttgtgtcaaaataaatactggaa

SEQ ID NO: 200399 - DNA, 2514 bp, Zea Mays
ctcgctttaaaagcccggaggctccgctcaacgctcggctccagcgagaaactcacgaaaagagaggagccgggaagcaaagcgccgacgactacgccgcaagtcccaacccaacccaccctatccagaatccaggtatatcagatgactcgacatgtcagttctcgatgtttcaaatgctacagtatgttaaataacaggcaaaaggttgagtggaacaataggggtttctctacactccatgcattggtagctgctgccgtttctttctacctggtcatgatctctgacctcttcaatgaagatgcgcacaatagcataataattgacagaaaatcatggctatccgattgcatgtttggggtctcgatcggttactttttgacagacttgacgatgatcatgctgtattttccttctttaggtggaaatgagtatctcttgcatcacggactttctatgtatgcaattggtcttgctttattgagtggcaaagcacacatgtacatcctcatggtcctcttcaccgaaatcacgactccctttgtgaacctcagatggtatttggacgttgctggtcagaagacttgcaatctttacttatacaatggtgtggctctatttgttggatggctggtacaacaactgctctcacgagtcatcaatttcttttaaagaacaaatttctatacagtcataatgcacatggttcaggaaagttgtctctaaatgctagaacattgcatagttaggttacctggcagctgtagttgctacttttactatttctgctgcttactcacaccagactgcacacagaaatatcccacactgtcaactgcaggattatccttttttaggtttttgaccagattaagtgaaaaatgtaccaattttttatatattttttcatttacaaatcaaatggaaatctaaaacttctgatggaggagcagcttccttgatatgatttgttttgaagatgtgatagctgggggtaatgattagtgatggcttcactatacaaattggtaaggatcattttggatttcttttttttatggaacacaagaagagtcattttgaattttggaatacgggtttttgtcgtaaaaaacttttatgatcttgtttgaattaaccataagcgaacagatgtgtagtctagttggtagtaccttaggtcttaaggttctaatccctacggtagcaaatttaaattaaaaaacatccctcatcggttgtgttccctgatgagccgctttcagcgaaatgcacatggtccgatggccgcagacatgtctcgtaggcacttggtggcgtctagcgcagccgacttttgaggtgtttcttgatatatgtgggagaagtttcttcctgatgcaatgccgtggggacagtttcccctggtattcgagttctttttttgaattaaccataagtatttggatgccgcttctcagttttcaaatataccctaaacattctctttaagtgacccgtttgctctgatggatagttttgattaacttgtctttcgtctgatacagattgctcggataatcttattcatatatatgttcacccatatgtattttcatcttgatcaggtatgggtatttgaattttccaccccgagaggtactaccagttagcctgggcatctgtggaaatccattgacttctgacaatgtatatttttagaataagatccacagtgttttttttctgttaacattaaaggtagttcatcaatgttccgcaaaaaaataatgtagaaattgtgaaacactgaatgaagctaataaactatcaaaagttatggttgtttcagcgctttatgattatggtattttgcagctgaaaaaactggcagctacagaattatttgtacataaggtttcatcattaaaacggcttgccacagaaaacatatcttgctgtagcggcatggctgcacgcaactgctggaaaaaaatatatgacatcttgtgttatgctgctacggtgcttctgcagcagcatgaagttttttttcttcttgttaaaataggttttggtgcactcatgaattcatgaagtgtgatcgttttctattgccgttgccacccttgtttcccaggcgagatccatcttcagcttagggttctacagcttggtggcagtgccgtcggtggttgcggtgatgaacgtattttggttctggaagatactcaaggggatggtgaaaaccctttctaggaggaagcacagcgaaaatgggagaacagattagaaggaatgaaggaaggatgctactgaactgtacacatgttcatctcaacgcacttacggcactcgcattcatttctcacacagatgtaattatcttgtcttgccgtcaaagattcaaagtcggaatcccgcaactcttaaattgttgcaacagtgccacatgcaccgttactgaatatatattggccactgtcagtgtcagcgtgctcgcttgggagctgattacacgcgcaaattttg

SEQ ID NO: 200400 - DNA, 2316 bp, Zea Mays
accgaacgagtcgcgcacggcgcaccgcaccgactgacgacaccacaccatggctccagcagcaggcaccgccaccggcagcgcttccggcggctcagccgtacacgacgatgccgaggccgtggaactaggccacaacaacctgatccgccggcgccaccccggcgccgacgtcgaagacgaagccgacgacaggaacgtcggcgccagtgccgccgccggtaaggagctggccccgtcgtcggtggagcaggccttcgcggatcagcccgtgccgtcgtggcgggagcagctgacggtgcgcgccttcgtggtgggggccctcctctccgtcgtgttcaacgtcatcctcatgaagatcgacctgaccacgggcatcaacccgtcgctcaacgtctgcgccagcctcctcagctacttcctcctccgcacctggaccagggccatcgggtgcatgggcttgctcaggcagcccttcacgcgccaggagaacaccatgatccagacctgcgtcgtctccgcctacggcatcaccttcactggtggatttagcagttatctgtttggtatgagtgcaaaaattgctaacaaaacagaggtgaacgatcctcaggatatcaaggatccccatcttggatggatgatggggtttatgtttctcgtcagctttcttggtcttttcgctctggtgcctctgagaaaggttatgatcgtggattacaaactgacttatccaagtggcgctgcgactgcttacctcatcaatggattccatgcacctgagggttctgaacgtgcaaagaaacaggttaggacgttaggcaagtacttctcccttagtttcctttgggcgttcttccagtggttctacaccgccgggaatcactgcggatttggttctttcccaacgctcggccttgaagcctataaaaataggttcttttttgatttctcacctacttatattggagttggaatgatctgcccctatattgtaaatgtgtctcttcttcttggaggcatcatgtcctggggaataatgtggccattgatcagcacaaagaaaggaagttggtaccccgagactcttccggatagcagcctgcatggactgcacggctacagagtgtttctaaccatatcagtaattcttggggatggcctgtacaacatcttgaaggtactttatagcacaatcgaagccttcgtatcaaggtacaggaatagaaaagcaaacacgcttcctgtgtcgaacgatggcacccctgctgatgccaccactgaaaccgagtctttcgacgacaagcgtcgtcttgagctattcacgaaggatcagattcccaagacagttgcgttgggaggctatgtcgttctggcagctataacaatcggttgtctccctctcataatcccacagctcaaatggtaccatattttggttgcgtacatcgtttcacctgcactggccttctgcaatgcctatggatgtggcctaacaaactggtccttcgcaagtgcctatggtaaacttgcgatctttagcttcggtgcgtgggcaggtgcttcacatagtggtgtgattgtggcactggctgcgtgtggtgtgatgatgagcattgtgggaacagctgctgatctaatgcaagacttcaagactgggtacctgacactggcctcaccaaggtccatgttcataagccaagtgataggcactgccatgggctgtgttattgccccctgcgtcttctggctgttttacaagtcgttcgatgttggagccaccaatggcgcttacccagcaccttacacatttatgtaccgtaacatggcgatcatgggcgtcgatggattgtcccttccaaagcattgcctgacattatcctacatcttctttgcggccgccttcgctgtcaatatggtcaaggacctggtgccgaagaaggtggcgaagttcatccccatccccatggcagtagccattcctttctatgttggagcatacttcaccattgacatgttcttgggctgcacaatactcttcatttgggagatgagaaataaagctgaagcagactcgttcggaccggccgttgcatcaggctgcatgtgtggtgatggtctctgggcactacccgaggctattctttctcttgcaaatgtgaaacctcccatttgcatgaagtttctgtcaagggtatggagtagatcagttgttcgtggcggacggatgtccaagagtagccaacatctccgcgcaaagttgcatctgaaaaaaagatggagagtcgtttcttccagctgaaaaatacagttgtc

SEQ ID NO: 200401 - DNA, 890 bp, Zea Mays
attttatcccaggagaggtcgctgcgggcgagctggctcgctcacccacccttgcccgccgtttacggtttagccgcgtgctctctctgtctccctccctccctgtcggggacaattcggctaccgctgccgccctacgccaggttcccagctcttcgccaggcccttctccggcgacgagcacccaccaggccaccaggcattcctggtgatggaagatgcctgtttcgttctgtggttcacggtgcctacattaggtcaaggaagcccatacctaatgaggatcatcaaagaaggctagctgatgagttgagaacaaaggtcgcagatgaatttatcaagaggcgggcagagactgaatggtttgttgagggggacttcgacacgtacgtatctcagattaggaagccacatgtctggggaggcgagccagagctgttgatggcttcacatgttcttcagatgccaatcaccgtctacatgcacgataaagccgctggtggtctaatagcgatcgcggaatacggccaagagcacgggacggaagctcccgtccaagttctttaccatggctatggccattatgatgcgctgcagataccaggagagggtggtccgaggtcaagactgtaacgttagtggctctgaatctaaatggcaagttccggttcgatactttcttcctttgtacatgtacgtgcatacatacatactagtcactaacgcgcgcctagcgcgcgataggttgtataattttattaaaatgtgtgtatagcatgtattcgtaagagaaaaaaagattaagttatcagaaagtaagtaactatgttgggattcataagaaaacaaaaaaaagtatcttgtcataagaaaacagacatgaattaatt

SEQ ID NO: 200402 - DNA, 2022 bp, Zea Mays
cctctattcgcctgctgtgtaaaaccgagtacccccaagcctaacctaagctattttggctatttgtaatcggatctagtctactgcaagtgtataaatatgtgttattatgcctcctaatttcattaatttgggaaaaatatcgggtgtagtcttttactgggtccaacctaagtcttgtttagtggcttaggcctttctaaacctctaaaactaatagttagcagctaaaattacttcagaggtttagaacaggtcagttaatagaccaactaattgttagttttcctctcaaatagctatactccaacccagataaaactagctaataacttattacctgactaacaattagtgctaggggccttagtatgcacgaattataatgatataaggagtcacctggatgtaggtttagtggcttagtatgcacgaattctaatgatataagctgtctatgattttatatatctgggatttggggatgctttttagcatattttgtatccttaaaagttcataaaggtagcaaaggtgaatcctatacggaagggtgtaacaggtcatttctatcttggtgtttgtcgttaaaaataaaatggttatttgccaaagtttggtgtggccttctggacagacttcaatccttaaagcttttttattttattaccttacctatagcttcattgagtgtaatataaccttctttccacttgtatgtggtgtcttattttatttggccaaataatcctatgttccacactacgactgattattaattatgattccctgtaaatacttttcagttgacacttaatactacctgaatctaatgcttatcaatatgcctaatatttgctggcggagctttactttgtgcaacacatattctccatctaatcaactacaaggaggttgtactcaaagaatggatttatggattacttcttgctcacaagcagcgagacatcatgcaaggataggttcagttgattttcctgttaagaagaacgtgaagtcatcccaagtgcaaaacgcgacatgttttgttggtttagtgcggcagttgcagtgcagacggtcagcaaaaagccatatcctgaatgtaaagtctgatacagtagcccaccaaaaggtttctggtgtaagctggagtttggaaaatatgccacgaagaataggatgtgtagtctctggactaggttttgcagcgtatgggctggcgagtgctgagggtcctgttaacaacaacatagatagcactgaatctgccatgtcatcaacaaatttatctcatgggaaagaagttcacacagactattctgttactggcattcctggtgatggaagatgcctgtttcgttctgtggttcacggtgcctacattaggtcaaggaagcccatacctaatgaggatcatcaaagaaggctagctgatgagttgagaacaaaggtcgcagatgaatttatcaagaggcgggcagagactgaatggtttgttgagggggacttcgacacgtacgtatctcagattaggaagccacatgtctggggaggcgagccagagctgttgatggcttcacatgttcttcagatgccaatcaccgtctacatgcacgataaagccgctggtggtctaatagcgatcgcggaatacggccaagagcacgggacggaagctcccgtccaagttctttaccatggctatggccattatgatgcgctgcagataccaggagagggtggtccgaggtcaagactgtaacgttagtggctctgaatctaaatggcaagttccggttcgatactttcttcctttgtacatgtacgtgcatacatacatactagtcactaacgcgcgcctagcgcgcgataggttgtataattttattaaaatgtgtgtatagcatgtattcgtaagagaaaaaaagattaagttatcagaaagtaagtaactatgttgggattcataagaaaacaaaaaaaagtatcttgtcataagaaaacagacatgaattaatt

SEQ ID NO: 200403 - DNA, 2226 bp, Zea Mays
cctctattcgcctgctgtgtaaaaccgagtacccccaagcctaacctaagctattttggctatttgtaatcggatctagtctactgcaagtgtataaatatgtgttattatgcctcctaatttcattaatttgggaaaaatatcgggtgtagtcttttactgggtccaacctaagtcttgtttagtggcttaggcctttctaaacctctaaaactaatagttagcagctaaaattacttcagaggtttagaacaggtcagttaatagaccaactaattgttagttttcctctcaaatagctatactccaacccagataaaactagctaataacttattacctgactaacaattagtgctaggggccttagtatgcacgaattataatgatataaggagtcacctggatgtaggtttagtggcttagtatgcacgaattctaatgatataagctgtctatgattttatatatctgggatttggggatgctttttagcatattttgtatccttaaaagttcataaaggtagcaaaggtgaatcctatacggaagggtgtaacaggtcatttctatcttggtgtttgtcgttaaaaataaaatggttatttgccaaagtttggtgtggccttctggacagacttcaatccttaaagcttttttattttattaccttacctatagcttcattgagtgtaatataaccttctttccacttgtatgtggtgtcttattttatttggccaaataatcctatgttccacactacgactgattattaattatgattccctgtaaatacttttcagttgacacttaatactacctgaatctaatgcttatcaatatgcctaatatttgctggcggagctttactttgtgcaacacatattctccatctaatcaactacaaggaggttgtactcaaagaatggatttatggattacttcttgctcacaagcagcgagacatcatgcaaggataggttcagttgattttcctgttaagaagaacgtgaagtcatcccaagtgcaaaacgcgacatgttttgttggtttagtgcggcagttgcagtgcagacggtcagcaaaaagccatatcctgaatgtaaagtctgatacagtagcccaccaaaaggtttctggtgtaagctggagtttggaaaatatgccacgaagaataggatgtgtagtctctggactaggttttgcagcgtatgggctggcgagtgctgagggtcctgttaacaacaacatagatagcactgaatctgccatgtcatcaacaaatttatctcatgggaaagaagttcacacagactattctgttactggcattcctggtgatggaagatgcctgtttcgttctgtggttcacggtgcctacattaggtcaaggaagcccatacctaatgaggatcatcaaagaaggctagctgatgagttgagaacaaaggtcgcagatgaatttatcaagaggcgggcagagactgaatggtttgttgagggggacttcgacacgtacgtatctcagattaggaagccacatgtctggggaggcgagccagagctgttgatggcttcacatgttcttcagatgccaatcaccgtctacatgcacgataaagccgctggtggtctaatagcgatcgcggaatacggccaagagcacgggacggaagctcccgtccaagttctttaccatggctatggccattatgatgcgctgcagataccaggagagggtggtccgaggtcaagactgtaacgttagtggctctgaatctaaatgaaccgaatgtaagtaaaatacaaaagaagaaggaaggccgaattgaaagaatcgaaagtggaagaactggacgtgccttcaaacaattagaagacaatcctagcaggttagatatttagaggtctacgaccataatagttgttctgttgccaaagggaatatagcgtggttgagagagagaaacatctggagaaaaaggaaaaaaaacaaaatatgcacctgttagatcagatagtagagaagaatcgaatgcggaatccattggctcaatggaaatgcagcgatttttttaatgcaaaatggtttacagaaaaaatctggagaaaaacaaaaacaaaatatgcacatcttagattgaatagcagggaggaatcgaatgcggaatctattggctcaatggaaatgcagcgatttttttaatgcagcgtggttgacag

SEQ ID NO: 200404 - DNA, 1261 bp, Zea Mays
tagccaagggcgtcccataccacccttgtggtagcactgttttcccgggtggttctccagaatgaggagatcgtcgcaggggatgatgggcctaagctacgacgcggacagcgggagacgcctgctggctcgctacgccaaggcgaagccgaggccgtccaagtgggacgacgcgcagcggtggctctcctcctcccgtgcgcacgacgacgacgaccggcgccggagctcctgcgcggacgaccgcctcctgctgccgtcggcatcgcagaaggcgcgacactcgtggagcgccgcggacggcggcgccgccctgcccgcggcgctggggctcggcgcgcgggacgacgcgggtgcggaggcggagaccaagagggtggactccgttctggcgtacgggcagccgccccggtgcccctcgctgcgggacgtcggcacggagatgacgccggccgggagcaaagagccatccagggccaacaccccacgcgcaaccctaccggccacgccgccgtccacggcggggcgcgcgatccacgcaccgctgcgcccaccggatttgtctacggtcgacggtggatcgccaccaggcctagcggcagcggaccgcgacgagacggcgcccggtgcgccgacgacgacggccgtgtcgcccgcggcgacgtgggacgccgccgagcgcgccaagcacatggccaggtatcggcgcgaggagatgaaaatacaggcctgggaaaaccggcgacggcaaaaggcggagctgcaaatgaaggtggccgaggccaaggcggagaggatgaagctacgggcgcaggagaagacggcgagcaagctggcctcggcgcaggcggctgcgagggagaagcgcgcgcaggcggaggccaagctgaaccggcgcgccgcgcgggtcgacagggcggacgcgctcaggcggaccggccacctgccgtcctcctcctccgtgttctcgctcaagctgccgctgatgtgcagatgagagccgaccgaggggggtgtggcacagcagttcacacggatgctgttcagagtttcagtcaactgtcctgttagaattggtcgggacgctgctcgcgtccttgtgtttcagccgagcggtttgcgatgcacacaggcacatggcacttagaattgtagacatttgtttttttatctgcacaaatcagtgaagaacaaaaatattttatatttactctattggtccaaataaaaggataactaccgtttaaagcggttcacgctt

SEQ ID NO: 200405 - DNA, 1118 bp, Zea Mays
ctcccacgcccgccgtccccgagagccgcttcttctttctccgtgactcggagctgtctacctcaccctcactgcctctgcgtgcgtgcgtcactgccgggacgcgccttgacttctcacgtcgtgtcgtgtgtgagcgccgcagcggtgctgctgatctgcgattcctccacgccacaccctacctgaccacccgacagggaatcctactccctcttgcgcgccgcggcggcggcgccggcatcttcggtctccgtgcgggtgtttccgttcggcgtttactggccgggcgagcgcggcattggaggagtcgggaggagggagaccggaggcgtgatcgatggggaactgcgtggcgagcgggggcgcgacgacggtcacggcggcgggggaggacgggaggcggcgggggaggaggtggaaggcgccgcgggaggagcagctcggctcggtccccggccggatcttctccaacgacggccgcagccgcaccgccgccgtgttcacgcagcagggccggaagggggtcaatcaggacgggcacggcccgcatggccacctggtggcgcgcagggtccgcgacgcgctgccgctgaagctcatggccgcggtgcgcgagtccaagcccggcttggacatggccgccgccgcgtggaggaaggcctttgcgcgcgcctacaaggccatggacaaagatcttcgctcccacgccaccctagactgcttctgcagtggcagcaccgccgtcaccgtcctcaagctcggctcggatctctacatggccaacattggtgactcgcgcgccgtgctaggctcaagggacggcggcggcatggtggccgtgcaactgactgtcgacctcaaaccagatgttcccagcgaggcagaacggatcaagaagtgcaggggcagggtatttgctctgcaggacgaaccggaggtgcctcgggtctggctgccgttcgacgacgcccctggcctggcgatggcccgggcgtttggggacttctgcctcaaggattatggtgtcatttcggttccagagttcttccactggtcgctcacggagaaggaccagttcgtcatccttgcatcagatgggtggaggttgcagcggc

SEQ ID NO: 200406 - DNA, 850 bp, Zea Mays
gctatagtaaccagcaagtccaagaaatcctataaggtctttatagtttgaaggtgtagcccatgaaggcactgtctctatttttgatgggtcagtagccaccctctgttggctaacgacatgtcccaaatagcctgttttctgttgggatatgctcttgactgcggctgcgcggccgtcggcgatggaggcatggcaccgcgggcaggagcagcaagcccggggcatcgtgttgtaggtgagggacgggaacctggagcgggcgctgtcggtcatggagctcaagatgcggtccgccgcatccggtcgcgcacccaccgccacgtgaaggactcggagaagcgcgtgctcgcgcgtaaggcgctaatgcagcacgtccggtaccaggagctcggcaagaagctccgcgagatcctcatcaggaacatcagtggcttgcggtgacgaattggaacggattctatagtgatcgccaagtgctcgacgaaatgtctcgtgaagttctatctaccacgcttagtggaattgagtgtgtttgcggattgagttgcgctgaggaagaagtttcagtgctgagcgcagtgtcaacccggtgcaggtatctggattggaaggtttgtgtgagaggaacactttcatgtgcacccaactcatccttagctcacttaggcatccacgaaacaggtgtgttgtatggtggtaccaggatatatgaacatgctacaaattttgaacatgctacaaatttaggagccttttggtagatttttcatggcatgtggtgatccaacgtatcaggtttgtgtcactaatttgatcctgcatctttatcatatttgttgcaacaatt

SEQ ID NO: 200407 - DNA, 3407 bp, Zea Mays
gtaaaagcgtgtttgaaccacagaagcaaacgaatccgcgaccctccgacagtgctgttttccgttagaggcttctcgtcttccccggctcaggcaacctccagctgcagcggcggcgatgggggtgaagaacctctgggacatccttgactcctgcaagaagaagctcccgctccagcacctccagaacaagaaggtgtgcgtggatctttcctgctggctcgtgcagttctgcagcgccaaccgctccccggccttcctcagggacaaggtgtacctcaagaacctcttccaccgcatccgagccctcatcgccctcaactgcagcctcattttcgtctcagatggggcgattccttcagtcaaattggctacttataggcgccgactgggattaaatgctgctgaggctactcgagaggaggccaactcacaacctctgacttctttgcgtcggaacaagagctcagagttctcacgcatgatcaaagaagccaagcatctcgggttggcccttggcatcccttgcttggatggcatggaagaagccgaagcacagtgtgcattgcttaatttttcttccttgtgtgatggctgttttacatcggattcagattcattcttgtttggtgcaaagacagtttatagagatgttttcataggagagggtggttatgtaatttgctatgaaatggaagacattcagaataagcttggtttcggcaggaactcactgatatcacttgcagtccttcttggtagtgactattctaatggagtccatggctttggcccagaagcagcatgccgccttgttaagtctttaggggatgacaccgttcttggtcaaattttgtccgatggagttaaacctgcaagaaaatgtaaaggaaaaggcagtggcgccaatgcagggacggttggtggaacgtgcccaaaagcaagtacctgtgaggttgggattaaccaagattctggtagtcaatttcgtgacataataaatgcatatctggagccaaaatgtcattcaccagattcagaagctgtgcagagggcatgcagccagcggccatttcttcgttcacaactccatcagatatgcgagcaatactttgcgtggagccctgtgaaaactgatgaatatatccttccaaagattgctgagagagaacttcgaagattttcaaatctccgctccacgtcttcagatctaggaatgaaaccttcgctgaatgagattcctgtaccgtgtcctgtactggcgattgtgaagcagcgaaaagttcaaggaagtgaatattatgaggtttcatggagaaacatagatgggctccaagtttcagttgttccaggggaacttgttagaagtgcttgcccagaaaaaataactgaatttttggaaagcaaggatgctcagaagaaacaaaagaggagagctaggccaaagaaatctggtcaagctgccgtaaaagacgtggatgcgcagctccaagaattgctacttggaattgaatctgaaagtggtagctttccatgtacggccaatggccctcagacagcagctatacagatggttgcaccgctccaggaatttgttgatctatcttctccatcaccacctatacgatcttgtaagattgccaggtccagaaagttgagtgattcagacacagtaacaatggatgggattcatctgcagcaccaaagtctgcagattggatcgatggagtcaaattcggcactgggtcttgagccaattgatctgtcatcaccctcgccttgtgctgctcataaaccccaggctgctccagaagcaccaccactgtgtatggaggcagaaagaagagccctttgggatataagcaatttggtcgagaaagaaccctcctgttgcaagcatgaacctggaacaaatgtgcaggtggaagagtcaccattgttcaggcatgggactgggatggcaggcgaagctgattcttcacggagaggcgatgcgcagagtagggaagtagtagaagctgccatgatcgacctctcttctccatcaccagttaaagtcgataatagtagaaggaatggtaagaaggattgtgaggctggcagcagcagtcagtctccagaacacgagaggaaagcgagggagctcagattgttcctagacagtataagagacgagttgtattaacattcgattggattgtatgtaaaccgatatgtgcaatgatgatgtgtgttctccatttcaatggtatctcatctactggtggtacaacagtaaccaatgaattgtgcaggtattggaaccagcagagaatgtgaatagcaatccagctatcagagcaaccagtagcacaatcagagcatctatgatgctgaaattcccaccaccttgtcttttgcttgaatcatccttcttctgtaaagacgagacgaacgactgtccgctgcgagatccaggcaccatatcccaaagggattctaatgtgctacaagctgatgcactttctggttccaggattgaagagctctccgcggctgtttccagtgcggatgcacggccatagcaggcttgggaaatcgcgtgaataacctgaaagatggtaaagagttcacatccaagccctcgaaagcatggtatggtatcagcaagtggagcctggcatttttttgcataaataagagggaaccattgaaaagaagaagctgacagtgctaacctgcgacaaggcagcaggggatgtggccttgaatgatgcctcggaagcccatatgtaagtaagcgtgcaacaacagattgctgaagaataagaattcatggtgtgaaccgtgagtagggatggcaatggatgtgatttatccgcgtacccgcggataaaaaacccgttgggcacggttttgggtacgagtttgtacccatggatacggatacgggtagcacttgatatccgtggatatttttaaaacggatatgaaaaatcaatatccatacccaaatacccgaatatccattaaaatatcttgtagtctcgtcccacaagtggcaggcttttaagtgaccatcgcagtcgtctcactcctaaaatggtggaagctttgatgtgcattcaaagttggcttcgtcacactcttaaagatgctggtgatggaagattcaatagtttttggtcttgccttgaagataatgaagaagacatgaaaggagaatcttgtgtgttggctgctgattctgaataaccagctggtctttggtgttgattcttatggcttgtgtgtttgtaattttatcaatttgaataattcagatttgattttgctagacaattttatattgctcgctgtatgccttaatacatgtatcagatttcattgctggacaaattctgtatggttgtatgtttttatcatat

SEQ ID NO: 200408 - DNA, 1093 bp, Zea Mays
aagcagtctctaaagttgttaagagaccgacgttctaccgcatctacaagagcaagtcgacggaaggtttccagtcggttccctacgtggtagcgctgttcagcgccatgctgtggatcttctacgcactgatcaagtccaacgagaccttcctcatcaccatcaacgccgccggctgcgttatcgagaccatctacatcgtcatgtacttcgtctacgcgcccaagaaagccaagctgttcacggccaagatcatggccctcctcaatggcggcgtctttggggtcatcctcctgctcacccttctcctcttcaagggtagtaagcgcgttgtgctgcttggctggatctgcgtcggcttctccgtcagtgtcttcgtcgcgccactaagcatcatgaggcgcgtgatccagacgaagagcgtagagtacatgcccttctccctctccctctcgctcaccctcagcgccgtcgtctggttcctctacggcctcctcatcaaggacaaatacgtcgcgctaccaaacgtccttgggttcatcttcggcgtggtccagatggtgctctacgtgttctacatgaacaagacgccggtggcggctgccgtgggcaaggatgccggcaagcttccctcagctgcagacgagcacgtcctcgtcaacattgccaagctcaaccccgccctcccggagaggacctccgggatgcacccagtcacccagatggcggccgttcctgccaggagctgcgctgctgaagcaatcgcgccggcgatgctgcccaacagggacgtggtcgacgtcttcgtcagccgacacagccccgctgtccacgtggtctagcttctccatcatcgcaagcaagcatgaatcgagtcgagtccgaacgcataattaagcacccaatctattggatatataaatacgcgcgccccaacatgtgcgccatatagccgtttattccaacccttagctttgtttaattctcaaatatgcatttgaagtaatgtactttcatgcaaccaggaatttcattttcccctccaaaataaccataagaattttctatagcacgttaatgtacaaagttagta

SEQ ID NO: 200409 - DNA, 2923 bp, Zea Mays
ggctccagagccgtggttacgaaacgctccactccgctccgctttcccagttccggccaccgagcatggcaccaccccttccctccgtctcccgtggttcgcgggcgctcgtccaagcatccaaccccagctccgtgcgtcgcggcgcgaccaccggacctataagtacggaacgctcatgtccgcctcttgctttcctacctctccgcccccgttgcctcccaccgccgagacgacgcggacttcgtaccctctcaccgacgtgtgcgccgctgtcttccccggcactcactgctgctggttcggctcccgaaccttcgtcgactccgcatttctgaacagggtgtcatatgtgacgagagagcacagatgtctctagaagttgagaagccaccagaaacgaccaagcagctcaagcgacaggattcactctatggtgatgcagaaaaggtctccggcttcaagcaccatggctctgagggaggctggccgcggttgctgcagcttgcatttcagagcattggcatcatctatggggacgtcgggacatcaccactctatgcgatatccagcaccttccctgatggcatcaaggaccaggatgacctacttggcgtcctctccctcatcctctacaccctaatcctgataccaatggtcaagtacgtcttcattgtgctttatgcagatgacaatggagatggtggcacgttcgccctctactcacttatatcgcggcactccaaggtaaggctgataccaaatcagcaggctgaggatgccatggtgtcaaattatggcatcgaagcgcccagtccggaactgagggtggcacagtggctgaagcagaagctcgagtctagcaaggcggcaaagattagcctctttatcattacaatccttggcacatcaatggtgatgggggatggaaccttgacaccatcaatttctgtgctctctgcagtgagtgggatcagggagaaggtgccaagcttaactgaaacgcaggtagtctggatctcagtgccgattttgttcgcgctcttctcggtccagcgctatggtacagacaaggtcgggtattcctttgctccgatcatcacactatggttttttcttattgctggcattggaatgtataacctcattgtgcacgagatcggtgttctccgagccttcaatccaatgtacatagtggattacttcagaaggaatgggaaggatggatgggtttcactgggtggcgttatcttgtgtgtcacaggcacagaaggaatgtatgcagacctaagccatttcaatatcaaggccattcagatcagctttagcactgtcttgctcccctccgtggcactgtgttacatcggacagacagcttacctgaggaaattcccagagagtgtcgcagacactttctttagatccatcccagagctaatgttctggccaaccttcattatcgccatcctttcggctatcatcgcaagccaagccatgctgtcaggcgcattcgccatcctctccaaggctttgtctcttggctgtttccccagtgtccaggtgattcatacatccaagagctacgagggccaggtttacattcctgaagtgaactttttgatgggattagcaagcatcatcgtcacgatcaccttcagaaccaccaccgaaatcggcaacgcttatgggatctgtgtggtaaccgtgttctcgatcaccacccacctgacgaccattgtgatgttactcgtgtggaggaagaatttcatcatcgtcttgcttttctacgtggtgttcagctccatagagctggtctacctctcatccatactgaccaagttcatccaaggcgggtacctgccgttctgcttctcgcttgtcctcatggccttgatgatcacatggcactacgtccacgtgatgaagtactggtacgagctggaccacgtcgtgccagccaacgaagtgacaacgctgcttgagaagcatgagaggataccctccgtgcacgcggtcttcctgttcatgtccatcaagcacctgccgatcccacacgtggcccctgtggagcggttcctcttccggcaggtcggcccgagggagcaccggatgttccggtgtgtggcgaggtatgggtactgtgacaagctagaggagtcggggctgttcaaagggttcctcatggagagcctaaagacgttcatccaagatgaggctgcgtttaagacgaactctacagctggagataccaaggagctgaccgatcccaaggtgtctggccatgatttggctcgttgggtcgaaaaggaaaagcaaatgattgacaaggagatggagcgaggggtggtctaccttatgggggaagccaatgtcattgcaggaccagaatcatctgccgcaaagaagatagtggtagactatgtctacgcattcttgaggaagaacttgacggagggggagaaggtgctctccattccgaaagaccaactactcaaagtagggataacatacgagatatagggattatgctgggcctcaagttacaatcctatgtatcaacttggcctgaagtcatataaagtttatgtatatcgagagattcaagattcaatgtaaattattcaattttattccttccacatggtatctatgaaatcgatctcagcaggggctatgtccttgttaagccaatagatcctattcagttgtcgcatttgctggggggcaactcccttattggtggtacatcatgagttcaagttttaatatttgagttacaatattagaagtctgtcacagcggtgcgcactgcacagtgaaacctgcagctttgatatttgtacacgtgctgtattgactggattcacgacggtttgcacgaatgctacaacagaaaattcccgatcccctgtctgaacgtttg

SEQ ID NO: 200410 - DNA, 2961 bp, Zea Mays
ggctccagagccgtggttacgaaacgctccactccgctccgctttcccagttccggccaccgagcatggcaccaccccttccctccgtctcccgtggttcgcgggcgctcgtccaagcatccaaccccagctccgtgcgtcgcggcgcgaccaccggacctataagtacggaacgctcatgtccgcctcttgctttcctacctctccgcccccgttgcctcccaccgccgagacgacgcggacttcgtaccctctcaccgacgtgtgcgccgctgtcttccccggcactcactgctgctggtgtcatatgtgacgagagagcacagatgtctctagaagttgagaagccaccagaaacgaccaagcagctcaagcgacaggattcactctatggtgatgcagaaaaggtctccggcttcaagcaccatggctctgagggaggctggccgcggttgctgcagcttgcatttcagagcattggcatcatctatggggacgtcgggacatcaccactctatgcgatatccagcaccttccctgatggcatcaaggaccaggatgacctacttggcgtcctctccctcatcctctacaccctaatcctgataccaatggtcaagtacgtcttcattgtgctttatgcagatgacaatggagatggtggcacgttcgccctctactcacttatatcgcggcactccaaggtaaggctgataccaaatcagcaggctgaggatgccatggtgtcaaattatggcatcgaagcgcccagtccggaactgagggtggcacagtggctgaagcagaagctcgagtctagcaaggcggcaaagattagcctctttatcattacaatccttggcacatcaatggtgatgggggatggaaccttgacaccatcaatttctgtgctctctgcagtgagtgggatcagggagaaggtgccaagcttaactgaaacgcaggtagtctggatctcagtgccgattttgttcgcgctcttctcggtccagcgctatggtacagacaaggtcgggtattcctttgctccgatcatcacactatggttttttcttattgctggcattggaatgtataacctcattgtgcacgagatcggtgttctccgagccttcaatccaatgtacatagtggattacttcagaaggaatgggaaggatggatgggtttcactgggtggcgttatcttgtgtgtcacaggcacagaaggaatgtatgcagacctaagccatttcaatatcaaggccattcagatcagctttagcactgtcttgctcccctccgtggcactgtgttacatcggacagacagcttacctgaggaaattcccagagagtgtcgcagacactttctttagatccatcccagagctaatgttctggccaaccttcattatcgccatcctttcggctatcatcgcaagccaagccatgctgtcaggcgcattcgccatcctctccaaggctttgtctcttggctgtttccccagtgtccaggtgattcatacatccaagagctacgagggccaggtttacattcctgaagtgaactttttgatgggattagcaagcatcatcgtcacgatcaccttcagaaccaccaccgaaatcggcaacgcttatgggatctgtgtggtaaccgtgttctcgatcaccacccacctgacgaccattgtgatgttactcgtgtggaggaagaatttcatcatcgtcttgcttttctacgtggtgttcagctccatagagctggtctacctctcatccatactgaccaagttcatccaaggcgggtacctgccgttctgcttctcgcttgtcctcatggccttgatgatcacatggcactacgtccacgtgatgaagtactggtacgagctggaccacgtcgtgccagccaacgaagtgacaacgctgcttgagaagcatgaggtgcggcggatccccggggtgggcctcctttactcggacctggtccaaggcatcacccccgtgtttccacgtctggtgcagaggataccctccgtgcacgcggtcttcctgttcatgtccatcaagcacctgccgatcccacacgtggcccctgtggagcggttcctcttccggcaggtcggcccgagggagcaccggatgttccggtgtgtggcgaggtatgggtactgtgacaagctagaggagtcggggctgttcaaagggttcctcatggagagcctaaagacgttcatccaagatgaggctgcgtttaagacgaactctacagctggagataccaaggagctgaccgatcccaaggtgtctggccatgatttggctcgttgggtcgaaaaggaaaagcaaatgattgacaaggagatggagcgaggggtggtctaccttatgggggaagccaatgtcattgcaggaccagaatcatctgccgcaaagaagatagtggtagactatgtctacgcattcttgaggaagaacttgacggagggggagaaggtgctctccattccgaaagaccaactactcaaagtagggataacatacgagatatagggattatgctgggcctcaagttacaatcctatgtatcaacttggcctgaagtcatataaagtttatgtatatcgagagattcaagattcaatgtaaattattcaattttattccttccacatggtatctatgaaatcgatctcagcaggggctatgtccttgttaagccaatagatcctattcagttgtcgcatttgctggggggcaactcccttattggtggtacatcatgagttcaagttttaatatttgagttacaatattagaagtctgtcacagcggtgcgcactgcacagtgaaacctgcagctttgatatttgtacacgtgctgtattgactggattcacgacggtttgcacgaatgctacaacagaaaattcccgatcccctgtctgaacgtttg

SEQ ID NO: 200411 - DNA, 3038 bp, Zea Mays
ggctccagagccgtggttacgaaacgctccactccgctccgctttcccagttccggccaccgagcatggcaccaccccttccctccgtctcccgtggttcgcgggcgctcgtccaagcatccaaccccagctccgtgcgtcgcggcgcgaccaccggacctataagtacggaacgctcatgtccgcctcttgctttcctacctctccgcccccgttgcctcccaccgccgagacgacgcggacttcgtaccctctcaccgacgtgtgcgccgctgtcttccccggcactcactgctgctggttcggctcccgaaccttcgtcgactccgcatttctgaacaggatttttcatacattccaataacctcctaattgtccgaaggtgtcatatgtgacgagagagcacagatgtctctagaagttgagaagccaccagaaacgaccaagcagctcaagcgacaggattcactctatggtgatgcagaaaaggtctccggcttcaagcaccatggctctgagggaggctggccgcggttgctgcagcttgcatttcagagcattggcatcatctatggggacgtcgggacatcaccactctatgcgatatccagcaccttccctgatggcatcaaggaccaggatgacctacttggcgtcctctccctcatcctctacaccctaatcctgataccaatggtcaagtacgtcttcattgtgctttatgcagatgacaatggagatggtggcacgttcgccctctactcacttatatcgcggcactccaaggtaaggctgataccaaatcagcaggctgaggatgccatggtgtcaaattatggcatcgaagcgcccagtccggaactgagggtggcacagtggctgaagcagaagctcgagtctagcaaggcggcaaagattagcctctttatcattacaatccttggcacatcaatggtgatgggggatggaaccttgacaccatcaatttctgtgctctctgcagtgagtgggatcagggagaaggtgccaagcttaactgaaagtagtctggatctcagtgccgattttgttcgcgctcttctcggtccagcgctatggtacagacaaggtcgggtattcctttgctccgatcatcacactatggttttttcttattgctggcattggaatgtataacctcattgtgcacgagatcggtgttctccgagccttcaatccaatgtacatagtggattacttcagaaggaatgggaaggatggatgggtttcactgggtggcgttatcttgtgtgtcacaggcacagaaggaatgtatgcagacctaagccatttcaatatcaaggccattcagatcagctttagcactgtcttgctcccctccgtggcactgtgttacatcggacagacagcttacctgaggaaattcccagagagtgtcgcagacactttctttagatccatcccagagctaatgttctggccaaccttcattatcgccatcctttcggctatcatcgcaagccaagccatgctgtcaggcgcattcgccatcctctccaaggctttgtctcttggctgtttccccagtgtccaggtgattcatacatccaagagctacgagggccaggtttacattcctgaagtgaactttttgatgggattagcaagcatcatcgtcacgatcaccttcagaaccaccaccgaaatcggcaacgcttatgggatctgtgtggtaaccgtgttctcgatcaccacccacctgacgaccattgtgatgttactcgtgtggaggaagaatttcatcatcgtcttgcttttctacgtggtgttcagctccatagagctggtctacctctcatccatactgaccaagttcatccaaggcgggtacctgccgttctgcttctcgcttgtcctcatggccttgatgatcacatggcactacgtccacgtgatgaagtactggtacgagctggaccacgtcgtgccagccaacgaagtgacaacgctgcttgagaagcatgaggtgcggcggatccccggggtgggcctcctttactcggacctggtccaaggcatcacccccgtgtttccacgtctggtgcagaggataccctccgtgcacgcggtcttcctgttcatgtccatcaagcacctgccgatcccacacgtggcccctgtggagcggttcctcttccggcaggtcggcccgagggagcaccggatgttccggtgtgtggcgaggtatgggtactgtgacaagctagaggagtcggggctgttcaaagggttcctcatggagagcctaaagacgttcatccaagatgaggctgcgtttaagacgaactctacagctggagataccaaggagctgaccgatcccaaggtgtctggccatgatttggctcgttgggtcgaaaaggaaaagcaaatgattgacaaggagatggagcgaggggtggtctaccttatgggggaagccaatgtcattgcaggaccagaatcatctgccgcaaagaagatagtggtagactatgtctacgcattcttgaggaagaacttgacggagggggagaaggtgctctccattccgaaagaccaactactcaaagtagggataacatacgagatatagggattatgctgggcctcaagttacaatcctatgtatcaacttggcctgaagtcatataaagtttatgtatatcgagagattcaagattcaatgtaaattattcaattttattccttccacatggtatctatgaaatcgatctcagcaggggctatgtccttgttaagccaatagatcctattcagttgtcgcatttgctggggggcaactcccttattggtggtacatcatgagttcaagttttaatatttgagttacaatattagaagtctgtcacagcggtgcgcactgcacagtgaaacctgcagctttgatatttgtacacgtgctgtattgactggattcacgacggtttgcacgaatgctacaacagaaaattcccgatcccctgtctgaacgtttg

SEQ ID NO: 200412 - DNA, 2962 bp, Zea Mays
ggctccagagccgtggttacgaaacgctccactccgctccgctttcccagttccggccaccgagcatggcaccaccccttccctccgtctcccgtggttcgcgggcgctcgtccaagcatccaaccccagctccgtgcgtcgcggcgcgaccaccggacctataagtacggaacgctcatgtccgcctcttgctttcctacctctccgcccccgttgcctcccaccgccgagacgacgcggacttcgtaccctctcaccgacgtgtgcgccgctgtcttccccggcactcactgctgctggttcggctcccgaaccttcgtcgactccgcatttctgaacaggatttttcatacattccaataacctcctaattgtccgaaggtgtcatatgtgacgagagagcacagatgtctctagaagttgagaagccaccagaaacgaccaagcagctcaagcgacaggattcactctatggtgatgcagaaaaggtctccggcttcaagcaccatggctctgagggaggctggccgcggttgctgcagcttgcatttcagagcattggcatcatctatggggacgtcgggacatcaccactctatgcgatatccagcaccttccctgatggcatcaaggaccaggatgacctacttggcgtcctctccctcatcctctacaccctaatcctgataccaatggtcaagtacgtcttcattgtgctttatgcagatgacaatggagatggtggcacgttcgccctctactcacttatatcgcggcactccaaggtaaggctgataccaaatcagcaggctgaggatgccatggtgtcaaattatggcatcgaagcgcccagtccggaactgagggtggcacagtggctgaagcagaagctcgagtctagcaaggcggcaaagattagcctctttatcattacaatccttggcacatcaatggtgatgggggatggaaccttgacaccatcaatttctgtgctctctgcagtgagtgggatcagggagaaggtgccaagcttaactgaaacgcaggtagtctggatctcagtgccgattttgttcgcgctcttctcggtccagcgctatggtacagacaaggtcgggtattcctttgctccgatcatcacactatggttttttcttattgctggcattggaatgtataacctcattgtgcacgagatcggtgttctccgagccttcaatccaatgtacatagtggattacttcagaaggaatgggaaggatggatgggtttcactgggtggcgttatcttgtgtgtcacaggcacagaaggaatgtatgcagacctaagccatttcaatatcaaggccattcagatcagctttagcactgtcttgctcccctccgtggcactgtgttacatcggacagacagcttacctgaggaaattcccagagagtgtcgcagacactttctttagatccatcccagagctaatgttctggccaaccttcattatcgccatcctttcggctatcatcgcaagccaagccatgctgtcaggcgcattcgccatcctctccaaggctttgtctcttggctgtttccccagtgtccaggtgattcatacatccaagagctacgagggccaggtttacattcctgaagtgaactttttgatgggattagcaagcatcatcgtcacgatcaccttcagaaccaccaccgaaatcggcaacgcttatgggatctgtgtggtaaccgtgttctcgatcaccacccacctgacgaccattgtgatgttactcgtgtggaggaagaatttcatcatcgtcttgcttttctacgtggtgttcagctccatagagctggtctacctctcatccatactgaccaagttcatccaaggcgggtacctgccgttctgcttctcgcttgtcctcatggccttgatgatcacatggcactacgtccacgtgatgaagtactggtacgagctggaccacgtcgtgccagccaacgaagtgacaacgctgcttgagaagcatgagaggataccctccgtgcacgcggtcttcctgttcatgtccatcaagcacctgccgatcccacacgtggcccctgtggagcggttcctcttccggcaggtcggcccgagggagcaccggatgttccggtgtgtggcgaggtatgggtactgtgacaagctagaggagtcggggctgttcaaagggttcctcatggagagcctaaagacgttcatccaagatgaggctgcgtttaagacgaactctacagctggagataccaaggagctgaccgatcccaaggtgtctggccatgatttggctcgttgggtcgaaaaggaaaagcaaatgattgacaaggagatggagcgaggggtggtctaccttatgggggaagccaatgtcattgcaggaccagaatcatctgccgcaaagaagatagtggtagactatgtctacgcattcttgaggaagaacttgacggagggggagaaggtgctctccattccgaaagaccaactactcaaagtagggataacatacgagatatagggattatgctgggcctcaagttacaatcctatgtatcaacttggcctgaagtcatataaagtttatgtatatcgagagattcaagattcaatgtaaattattcaattttattccttccacatggtatctatgaaatcgatctcagcaggggctatgtccttgttaagccaatagatcctattcagttgtcgcatttgctggggggcaactcccttattggtggtacatcatgagttcaagttttaatatttgagttacaatattagaagtctgtcacagcggtgcgcactgcacagtgaaacctgcagctttgatatttgtacacgtgctgtattgactggattcacgacggtttgcacgaatgctacaacagaaaattcccgatcccctgtctgaacgtttg

SEQ ID NO: 200413 - DNA, 2990 bp, Zea Mays
cccggaggtccccccaatgtcggacggacgacgggttcacccacaccccctgctggcggatcccccccctcgcctgcctgcccgcgcgccaagaactccattcacctccccccacactgccaggagcttcgcccggcccccgggtgccggacggccaccaggttcacccgtgcctgctgccggcggattcccccctcccccggtggctaggagctccatctgtgttgtcgtcgtgtgctgctgggcgtctcccccaatggcgttacagcatgggcattagagaactctatgacggatggggagctactctggcgcgcgtcgttcaccccggcggtacctattctgacgcgtatggaaggttgccttcatgttcctcacgcaagggcaggtgccgctcagggggtgcctcactactacatctacgtccacgcgctatcggccaatttcaccttcgaatcaatcttctcccaacgccaaatacctagtaagactcagactcaagtttgattgattgctatttgctaccaacaaaaaataggtctcgacaagaaagttttattgtacttcagatttgtatatatgatcaacatctctgtgtgcagtatgcttgagaatagctttaaggctgagtaacaaggttcatcatttttaatgcaccaacaccaatgagccccttctcagcacaatgaaattgtttacattatcttcagggccagtctacaaactttcacagcctgaagtttatgaacagttaatacacatcggttctaacttctgtgtttgtaaggatgctaaaagtactcagactctgttaatgtcttcttagataaaatagatttgatttataagtgccagtattttgggagcataatagacactaagcttcaaacgtttggtcaggttcatcatttttaatgcagcaacaccaatgagccccttctcagcacaatgacattgtttacatgtatgcatttttttcttgctattgttatgaagaagctttatttctgaaatattgatttccaatttatgaaatattgattttaatttctgatagtacctttggtgcatttcttaacttctttattccagccttgggatactgtataatcttaccaaatgaacatagataggtctatgtttggtttatgttcattactgtcatttttctgttgtgtgctctgacaaggtggacttaacacaccctaatctactatgacaaacagagcagggcctgctgtagccaatgagttggatacagtggacacaatcacatcaattttgcggttcaattactttgcaaaaggttgtatatgcagcctctcttttgtagtcaactcttttataatggctaaacctagaatttcttttacgcaaactcgacatgatccaaatcagttgctcccagtcaggagctgatttgagtctagcgccaaatcacctcaaacttttatagcccaatttgtctctctgtgttggcatcatgagccatccgtcccattcagcttgatagcaggttatgacacagccaggcagaaacctggaaggattacccaggtctaaattggaccattgcatcagcacacatctcttgctctcgccctattttagatatattgttattttgttctcacacattcgtgctttgctccttgttttgcagttatgcatatatctaataaaagtggaaggataccatatgccacttttttctaatataagataacccttcatatttcatttttctcttaatgtaggacaactagatttatatactctccatagtagctgctcttgacagaaaagaaagcaacagaagtgccattcatacatgtcaaaagattaatttgcagcaataaattataattccacaggtctgaattgtgtgtacatacatacatgtaaaaaaataatttgcaaggacaggtaataattccacatgtccgacttggtgggttacacatcctactatccccttgtttgttttttaaataatctggtcggatgacaattctactatttgcttctatattttctccaaatctccccttctcttgttctgttacagcttgttaatatcacttgctgcagacaaagtacgtcaaaaggcaacgtctaagtaatatgttgatacacaaagatagaaggttacatgtgcgttgttactatctcacgccaactcagacctctactggataacgttgcacaccatgcgactagacagacactaaatttgggtacctctacaaagcacttaatttattgtgcctctttcgaaaaaggccagttgcgagcaacatatgggttgttctcgtgaaggaagttgaacacctcgtccaacagctgcaacagaaaagctcaaggtcaaatttcaaaaaaaggacgatgaccaatatagaagttatcttaacaatgacagactgtcatcaccacctaaaaagtatgtggcacaaagcacatataggatcaaggctagccaacttcacaaacttcaatcagattttactgaccctgaaaacgataaccattagatcgttgtgaattacatgaagaacgtgggcatgagcgtgcgcaatacactagtgttgggaccatgcttcgtcgccgaaggtcctgcaaaaagaaacagcttcggctgaagctgcttgaacatgatgccgaagacaccgttcacgaagcttcggagctacaacatatccgaagacgaagggtcgaaccgacttaaagatagaatgaccatttagcccataagggtctgagtcattgttgtaaacttttatgaggggcataattgtaattcctcatgagttgtgtcctgtgcctataaatagtgaacagtattcctttactgttcacggattcctgtaattgccaacgcatcactcgggaattattgtttgtcaaggcaaaggtataaatgtacctaaacattgtgttcagatattcaaaattcatttaacaagatatgtgaatgatgtcgtttattttca

SEQ ID NO: 200414 - DNA, 3433 bp, Zea Mays
cccggaggtccccccaatgtcggacggacgacgggttcacccacaccccctgctggcggatcccccccctcgcctgcctgcccgcgcgccaagaactccattcacctccccccacactgccaggagcttcgcccggcccccgggtgccggacggccaccaggttcacccgtgcctgctgccggcggattcccccctcccccggtggctaggagctccatctgtgttgtcgtcgtgtgctgctgggcgtctcccccaatggcgttacagcatgggcattagagaactctatgacggatggggagctactctggcgcgcgtcgttcaccccggcggtacctattctgacgcgtatggaaggttgccttcatgttcctcacgcaagggcaggtgccgctcagggggtgcctcactactacatctacgtccacgcgctatcggccaatttcaccttcgaatcaatcttctcccaacgccaaatacctagtaagattgagtatactgcaatagagacaatgaaggcagatgggtttttgcagactcagactcaagtttgattgattgctatttgctaccaacaaaaaataggtctcgacaagaaagttttattgtacttcagatttgtatatatgatcaacatctctgtgtgcagtatgcttgagaatagctttaaggctgagtaacaaggttcatcatttttaatgcaccaacaccaatgagccccttctcagcacaatgaaattgtttacattatcttcagggccagtctacaaactttcacagcctgaagtttatgaacagttaatacacatcggttctaacttctgtgtttgtaaggatgctaaaagtactcagactctgttaatgtcttcttagataaaatagatttgatttataagtgccagtattttgggagcataatagacactaagcttcaaacgtttggtcaggttcatcatttttaatgcagcaacaccaatgagccccttctcagcacaatgacattgtttacatgtatgcatttttttcttgctattgttatgaagaagctttatttctgaaatattgatttccaatttatgaaatattgattttaatttctgatagtacctttggtgcatttcttaacttctttattccagccttgggatactgtataatcttaccaaatgaacatagataggtctatgtttggtttatgttcattactgtcatttttctgttgtgtgctctgacaaggtggacttaacacaccctaatctactatgacaaacagagcagggcctgctgtagccaatgagttggatacagtggacacaatcacatcaattttgcggttcaattactttgcaaaaggttgtatatgcagcctctcttttgtagtcaactcttttataatggctaaacctagaatttcttttacgcaaactcgacatgatccaaatcagttgctcccagtcaggagctgatttgagtctagcgccaaatcacctcaaacttttatagcccaatttgtctctctgtgttggcatcatgagccatccgtcccattcagcttgatagcaggttatgacacagccaggcagaaacctggaaggattacccaggtctaaattggaccattgcatcagcacacatctcttgctctcgccctattttagatatattgttattttgttctcacacattcgtgctttgctccttgttttgcagttatgcatatatctaataaaagtggaaggataccatatgccacttttttctaatataagataacccttcatatttcatttttctcttaatgtaggacaactagatttatatactctccatagtagctgctcttgacagaaaagaaagcaacagaagtgccattcatacatgtcaaaagattaatttgcagcaataaattataattccacaggtctgaattgtgtgtacatacatacatgtaaaaaaataatttgcaaggacaggtaataattccacatgtccgacttggtgggttacacatcctactatccccttgtttgttttttaaataatctggtcggatgacaattctactatttgcttctatattttctccaaatctccccttctcttgttctgttacagcttgttaatatcacttgctgcagacaaagtacgtcaaaaggcaacgtctaagtaatatgttgatacacaaagcactgatccttagagacttcatccaacgagatagaaggttacatgtgcgttgttactatctcacgccaactcagacctctactggataacgttgcacaccatgcgactagacagacactaaatttgggtacctctacaaagcacttaatttattgtgcctctttcgaaaaaggttcttttctttcgtaattacctaaccactgctatactatactaacattttgaattcacatatacaaactcggcttcattactactgacggaacatccgaagcagaattttttgtgtcatggagatacaaattaaaagttagtttattgtaatttccaaaaaaacagcagagagcacttaacaaggcaagggagtatcaatttaaattatgctaccaaaattgtgttgaaaacttacttttacacaaatccttgaaattaacaaaaaaaattgtcttccttgttcactcactgagaacttgtggtgataacggtcccaggccagttgcgagcaacatatgggttgttctcgtgaaggaagttgaacacctcgtccaacagctgcaacagaaaagctcaaggtcaaatttcaaaaaaaggcacaacacatgtttgcatattcccgtgctctaaaagaatacagaggacgatgaccaatatagaagttatcttaacaatgacagactgtcatcaccacctaaaaagtatgtggcacaaagcacatataggatcaaggctagccaacttcacaaacttcaatcagattttactgaccctgaaaacgataaccattagatcgttgtgaattacatgaagaacgtgggcatgagcgtgcgcaatacactagtgttgggaccatgcttcgtcgccgaaggtcctgcaaaaagaaacagcttcggctgaagctgcttgaacatgatgccgaagacaccgttcacgaagcttcggagctacaacatatccgaagacgaagggtcgaaccgacttaaagatagaatgaccatttagcccataagggtctgagtcattgttgtaaacttttatgaggggcataattgtaattcctcatgagttgtgtcctgtgcctataaatagtgaacagtattcctttactgttcacggattcctgtaattgccaacgcatcactcgggaattattgtttgtcaaggcaaaggtataaatgtacctaaacattgtgttcagatattcaaaattcatttaacaagatatgtgaatgatgtcgtttattttca

SEQ ID NO: 200415 - DNA, 2757 bp, Zea Mays
cccggaggtccccccaatgtcggacggacgacgggttcacccacaccccctgctggcggatcccccccctcgcctgcctgcccgcgcgccaagaactccattcacctccccccacactgccaggagcttcgcccggcccccgggtgccggacggccaccaggttcacccgtgcctgctgccggcggattcccccctcccccggtggctaggagctccatctgtgttgtcgtcgtgtgctgctgggcgtctcccccaatggcgttacagcatgggcattagagaactctatgacggatggggagctactctggcgcgcgtcgttcaccccggcggtacctattctgacgcgtatggaaggttgccttcatgttcctcacgcaagggcaggtgccgctcagggggtgcctcactactacatctacgtccacgcgctatcggccaatttcaccttcgaatcaatcttctcccaacgccaaatacctagtaagactcagactcaagtttgattgattgctatttgctaccaacaaaaaataggtctcgacaagaaagttttattgtacttcagatttgtatatatgatcaacatctctgtgtgcagtatgcttgagaatagctttaaggctgagtaacaaggttcatcatttttaatgcagcaacaccaatgagccccttctcagcacaatgacattgtttacatgtatgcatttttttcttgctattgttatgaagaagctttatttctgaaatattgatttccaatttatgaaatattgattttaatttctgatagtacctttggtgcatttcttaacttctttattccagccttgggatactgtataatcttaccaaatgaacatagataggtctatgtttggtttatgttcattactgtcatttttctgttgtgtgctctgacaaggtggacttaacacaccctaatctactatgacaaacagagcagggcctgctgtagccaatgagttggatacagtggacacaatcacatcaattttgcggttcaattactttgcaaaaggttgtatatgcagcctctcttttgtagtcaactcttttataatggctaaacctagaatttcttttacgcaaactcgacatgatccaaatcagttgctcccagtcaggagctgatttgagtctagcgccaaatcacctcaaacttttatagcccaatttgtctctctgtgttggcatcatgagccatccgtcccattcagcttgatagcaggttatgacacagccaggcagaaacctggaaggattacccaggtctaaattggaccattgcatcagcacacatctcttgctctcgccctattttagatatattgttattttgttctcacacattcgtgctttgctccttgttttgcagttatgcatatatctaataaaagtggaaggataccatatgccacttttttctaatataagataacccttcatatttcatttttctcttaatgtaggacaactagatttatatactctccatagtagctgctcttgacagaaaagaaagcaacagaagtgccattcatacatgtcaaaagattaatttgcagcaataaattataattccacaggtctgaattgtgtgtacatacatacatgtaaaaaaataatttgcaaggacaggtaataattccacatgtccgacttggtgggttacacatcctactatccccttgtttgttttttaaataatctggtcggatgacaattctactatttgcttctatattttctccaaatctccccttctcttgttctgttacagcttgttaatatcacttgctgcagacaaagtacgtcaaaaggcaacgtctaagtaatatgttgatacacaaagcactgatccttagagacttcatccaacgagatagaaggttacatgtgcgttgttactatctcacgccaactcagacctctactggataacgttgcacaccatgcgactagacagacactaaatttgggtacctctacaaagcacttaatttattgtgcctctttcgaaaaaggccagttgcgagcaacatatgggttgttctcgtgaaggaagttgaacacctcgtccaacagctgcaacagaaaagctcaaggtcaaatttcaaaaaaaggacgatgaccaatatagaagttatcttaacaatgacagactgtcatcaccacctaaaaagtatgtggcacaaagcacatataggatcaaggctagccaacttcacaaacttcaatcagattttactgaccctgaaaacgataaccattagatcgttgtgaattacatgaagaacgtgggcatgagcgtgcgcaatacactagtgttgggaccatgcttcgtcgccgaaggtcctgcaaaaagaaacagcttcggctgaagctgcttgaacatgatgccgaagacaccgttcacgaagcttcggagctacaacatatccgaagacgaagggtcgaaccgacttaaagatagaatgaccatttagcccataagggtctgagtcattgttgtaaacttttatgaggggcataattgtaattcctcatgagttgtgtcctgtgcctataaatagtgaacagtattcctttactgttcacggattcctgtaattgccaacgcatcactcgggaattattgtttgtcaaggcaaaggtataaatgtacctaaacattgtgttcagatattcaaaattcatttaacaagatatgtgaatgatgtcgtttattttca

SEQ ID NO: 200416 - DNA, 2805 bp, Zea Mays
cccggaggtccccccaatgtcggacggacgacgggttcacccacaccccctgctggcggatcccccccctcgcctgcctgcccgcgcgccaagaactccattcacctccccccacactgccaggagcttcgcccggcccccgggtgccggacggccaccaggttcacccgtgcctgctgccggcggattcccccctcccccggtggctaggagctccatctgtgttgtcgtcgtgtgctgctgggcgtctcccccaatggcgttacagcatgggcattagagaactctatgacggatggggagctactctggcgcgcgtcgttcaccccggcggtacctattctgacgcgtatggaaggttgccttcatgttcctcacgcaagggcaggtgccgctcagggggtgcctcactactacatctacgtccacgcgctatcggccaatttcaccttcgaatcaatcttctcccaacgccaaatacctagtaagattgagtatactgcaatagagacaatgaaggcagatgggtttttgcagactcagactcaagtttgattgattgctatttgctaccaacaaaaaataggtctcgacaagaaagttttattgtacttcagatttgtatatatgatcaacatctctgtgtgcagtatgcttgagaatagctttaaggctgagtaacaaggttcatcatttttaatgcagcaacaccaatgagccccttctcagcacaatgacattgtttacatgtatgcatttttttcttgctattgttatgaagaagctttatttctgaaatattgatttccaatttatgaaatattgattttaatttctgatagtacctttggtgcatttcttaacttctttattccagccttgggatactgtataatcttaccaaatgaacatagataggtctatgtttggtttatgttcattactgtcatttttctgttgtgtgctctgacaaggtggacttaacacaccctaatctactatgacaaacagagcagggcctgctgtagccaatgagttggatacagtggacacaatcacatcaattttgcggttcaattactttgcaaaaggttgtatatgcagcctctcttttgtagtcaactcttttataatggctaaacctagaatttcttttacgcaaactcgacatgatccaaatcagttgctcccagtcaggagctgatttgagtctagcgccaaatcacctcaaacttttatagcccaatttgtctctctgtgttggcatcatgagccatccgtcccattcagcttgatagcaggttatgacacagccaggcagaaacctggaaggattacccaggtctaaattggaccattgcatcagcacacatctcttgctctcgccctattttagatatattgttattttgttctcacacattcgtgctttgctccttgttttgcagttatgcatatatctaataaaagtggaaggataccatatgccacttttttctaatataagataacccttcatatttcatttttctcttaatgtaggacaactagatttatatactctccatagtagctgctcttgacagaaaagaaagcaacagaagtgccattcatacatgtcaaaagattaatttgcagcaataaattataattccacaggtctgaattgtgtgtacatacatacatgtaaaaaaataatttgcaaggacaggtaataattccacatgtccgacttggtgggttacacatcctactatccccttgtttgttttttaaataatctggtcggatgacaattctactatttgcttctatattttctccaaatctccccttctcttgttctgttacagcttgttaatatcacttgctgcagacaaagtacgtcaaaaggcaacgtctaagtaatatgttgatacacaaagcactgatccttagagacttcatccaacgagatagaaggttacatgtgcgttgttactatctcacgccaactcagacctctactggataacgttgcacaccatgcgactagacagacactaaatttgggtacctctacaaagcacttaatttattgtgcctctttcgaaaaaggccagttgcgagcaacatatgggttgttctcgtgaaggaagttgaacacctcgtccaacagctgcaacagaaaagctcaaggtcaaatttcaaaaaaaggacgatgaccaatatagaagttatcttaacaatgacagactgtcatcaccacctaaaaagtatgtggcacaaagcacatataggatcaaggctagccaacttcacaaacttcaatcagattttactgaccctgaaaacgataaccattagatcgttgtgaattacatgaagaacgtgggcatgagcgtgcgcaatacactagtgttgggaccatgcttcgtcgccgaaggtcctgcaaaaagaaacagcttcggctgaagctgcttgaacatgatgccgaagacaccgttcacgaagcttcggagctacaacatatccgaagacgaagggtcgaaccgacttaaagatagaatgaccatttagcccataagggtctgagtcattgttgtaaacttttatgaggggcataattgtaattcctcatgagttgtgtcctgtgcctataaatagtgaacagtattcctttactgttcacggattcctgtaattgccaacgcatcactcgggaattattgtttgtcaaggcaaaggtataaatgtacctaaacattgtgttcagatattcaaaattcatttaacaagatatgtgaatgatgtcgtttattttca

SEQ ID NO: 200417 - DNA, 2907 bp, Zea Mays
cccggaggtccccccaatgtcggacggacgacgggttcacccacaccccctgctggcggatcccccccctcgcctgcctgcccgcgcgccaagaactccattcacctccccccacactgccaggagcttcgcccggcccccgggtgccggacggccaccaggttcacccgtgcctgctgccggcggattcccccctcccccggtggctaggagctccatctgtgttgtcgtcgtgtgctgctgggcgtctcccccaatggcgttacagcatgggcattagagaactctatgacggatggggagctactctggcgcgcgtcgttcaccccggcggtacctattctgacgcgtatggaaggttgccttcatgttcctcacgcaagggcaggtgccgctcagggggtgcctcactactacatctacgtccacgcgctatcggccaatttcaccttcgaatcaatcttctcccaacgccaaatacctactttcaaaaaagcccttcacgggcctgataaatcaaggattgattttatgagagaaatagattgagtatactgcaatagagacaatgaaggcagatgggtttttgcagactcagactcaagtttgattgattgctatttgctaccaacaaaaaataggtctcgacaagaaagttttattgtacttcagatttgtatatatgatcaacatctctgtgtgcagtatgcttgagaatagctttaaggctgagtaacaaggttcatcatttttaatgcaccaacaccaatgagccccttctcagcacaatgaaattgtttacattatcttcagggccagtctacaaactttcacagcctgaagtttatgaacagttaatacacatcggttctaacttctgtgtttgtaaggatgctaaaagtactcagactctgttaatgtcttcttagataaaatagatttgatttataagtgccagtattttgggagcataatagacactaagcttcaaacgtttggtcaggttcatcatttttaatgcagcaacaccaatgagccccttctcagcacaatgacattgtttacatgtatgcatttttttcttgctattgttatgaagaagctttatttctgaaatattgatttccaatttatgaaatattgattttaatttctgatagtacctttggtgcatttcttaacttctttattccagccttgggatactgtataatcttaccaaatgaacatagataggtctatgtttggtttatgttcattactgtcatttttctgttgtgtgctctgacaaggtggacttaacacaccctaatctactatgacaaacagagcagggcctgctgtagccaatgagttggatacagtggacacaatcacatcaattttgcggttcaattactttgcaaaaggttgtatatgcagcctctcttttgtagtcaactcttttataatggctaaacctagaatttcttttacgcaaactcgacatgatccaaatcagttgctcccagtcaggagctgatttgagtctagcgccaaatcacctcaaacttttatagcccaatttgtctctctgtgttggcatcatgagccatccgtcccattcagcttgatagcaggttatgacacagccaggcagaaacctggaaggattacccaggtctaaattggaccattgcatcagcacacatctcttgctctcgccctattttagatatattgttattttgttctcacacattcgtgctttgctccttgttttgcagttatgcatatatctaataaaagtggaaggataccatatgccacttttttctaatataagataacccttcatatttcatttttctcttaatgtaggacaactagatttatatactctccatagtagctgctcttgacagaaaagaaagcaacagaagtgccattcatacatgtcaaaagattaatttgcagcaataaattataattccacaggtctgaattgtgtgtacatacatacatgtaaaaaaataatttgcaaggacaggtaataattccacatgtccgacttggtgggttacacatcctactatccccttgtttgttttttaaataatctggtcggatgacaattctactatttgcttctatattttctccaaatctccccttctcttgttctgttacagcttgttaatatcacttgctgcagacaaagtacgtcaaaaggcaacgtctaagtaatatgttgatacacaaagcactgatccttagagacttcatccaacgagatagaaggttacatgtgcgttgttactatctcacgccaactcagacctctactggataacgttgcacaccatgcgactagacagacactaaatttgggccagttgcgagcaacatatgggttgttctcgtgaaggaagttgaacacctcgtccaacagctgcaacagaaaagctcaaggtcaaatttcaaaaaaagaacgtgggcatgagcgtgcgcaatacactagtgttgggaccatgcttcgtcgccgaaggtcctgcaaaaagaaacagcttcggctgaagctgcttgaacatgatgccgaagacaccgttcacgaagcttcggagctacaacatatccgaagacgaagggtcgaaccgacttaaagatagaatgaccatttagcccataagggtctgagtcattgttgtaaacttttatgaggggcataattgtaattcctcatgagttgtgtcctgtgcctataaatagtgaacagtattcctttactgttcacggattcctgtaattgccaacgcatcactcgggaattattgtttgtcaaggcaaaggtataaatgtacctaaacattgtgttcagatattcaaaattcatttaacaagatatgtgaatgatgtcgtttattttca

SEQ ID NO: 200418 - DNA, 1907 bp, Zea Mays
taacaaggtttgaagaaagttatttcattttttttctgaacatatattgtttgattcgtaatttagtttacatggtatgacatcatttatttttggtttaaactttagagtatatatgctaattgtatgctctagatcagtttaaaaaggatgcagatgtctagtcgtaataggccaatctacaaactttcatagcctgaagtttatgaacagtgaatacacatcggttctaacttctgtgtttgtaaagatgctaaaagtattctcgctctattaatgtcttcttaggtaaaatagatttgatttacatgtgccagtattttggaagcataatagacactgagcttcaaacgtttggtcaggttcatcatttttaatgcaccaacaccaatgagccccttctcagcacaatgaaattgtttacattatcttcagggccagtctacaaactttcacagcctgaagtttatgaacagttaatacacatcggttctaacttctgtgtttgtaaggatgctaaaagtactcagactctgttaatgtcttcttagataaaatagatttgatttataagtgccagtattttgggagcataatagacactaagcttcaaacgtttggtcaggttcatcatttttaatgcagcaacaccaatgagccccttctcagcacaatgacattgtttacatacaaagtacgtcaaaaggcaacgtctaagtaatatgttgatacacaaagatagaaggttacatgtgcgttgttactatctcacgccaactcagacctctactggataacgttgcacaccatgcgactagacagacactaaatttgggtacctctacaaagcacttaatttattgtgcctctttcgaaaaaggttcttttctttcgtaattacctaaccactgctatactatactaacattttgaattcacatatacaaactcggcttcattactactgacggaacatccgaagcagaattttttgtgtcatggagatacaaattaaaagttagtttattgtaatttccaaaaaaacagcagagagcacttaacaaggcaagggagtatcaatttaaattatgctaccaaaattgtgttgaaaacttacttttacacaaatccttgaaattaacaaaaaaaattgtcttccttgttcactcactgagaacttgtggtgataacggtcccaggccagttgcgagcaacatatgggttgttctcgtgaaggaagttgaacacctcgtccaacagctgcaacagaaaagctcaaggtcaaatttcaaaaaaaggacgatgaccaatatagaagttatcttaacaatgacagactgtcatcaccacctaaaaagtatgtggcacaaagcacatataggatcaaggctagccaacttcacaaacttcaatcagattttactgaccctgaaaacgataaccattagatcgttgtgaattacatgaagaacgtgggcatgagcgtgcgcaatacactagtgttgggaccatgcttcgtcgccgaaggtcctgcaaaaagaaacagcttcggctgaagctgcttgaacatgatgccgaagacaccgttcacgaagcttcggagctacaacatatccgaagacgaagggtcgaaccgacttaaagatagaatgaccatttagcccataagggtctgagtcattgttgtaaacttttatgaggggcataattgtaattcctcatgagttgtgtcctgtgcctataaatagtgaacagtattcctttactgttcacggattcctgtaattgccaacgcatcactcgggaattattgtttgtcaaggcaaaggtataaatgtacctaaacattgtgttcagatattcaaaattcatttaacaagatatgtgaatgatgtcgtttattttca

SEQ ID NO: 200419 - DNA, 515 bp, Zea Mays
tccgcgttgagctcgtctccatcttcctcaacagaaatagcgatttctcctgcgcgcgcacggaatcctcgggcgcctgacctgctcggagctggataaccggcttccgcccgagggggaataaatccctgcgcagatcgctgacctttagccctcaatcacgagaactacttggccactgccaccggcgtcatgggagggaaccgagaggagaggggttgtgctccgccgtgggggggaaatcccctgccgcgcagtcgtctgccccgtgaagtgctcggggactttcctcaagttctgggaaggacgtgtggggccgcgctactcgtgatcaactgccggttttgctccaattcctcgccgtcgtatcgctccgccggatctccgccgtgcaacgaagacagagaaaagcactacgcaatccatcggaatggaaaatgtgcatatatgctgctgactgcagtgagattagcctcgtccaagttaggggatctgccatgactagacaagattag

SEQ ID NO: 200420 - DNA, 375 bp, Zea Mays
cacatttctaatcagcccatgggccgtgagagcaaaatagccctagcaagtaccctgtatcccaccccgcgcctccaacttgttcttccgctgcaagacagcagtcccgagctgtatgcctaggggagccgcgagggggcggagatgccgacgctgacgaagctgtacagcatggaggaggctgccctccacaacacgcccgacgactgctgggtcatcgtcgacggcaagatttatgatgtgaccaagtatttggaagaccatcctgggggtgccgatgttctgctcgaagcaaccggtaaggatgctaccgtacaatttgacgatgcagggcacagcaagagtgccaaggataacgaatcaagctgattcatc

SEQ ID NO: 200421 - DNA, 1876 bp, Zea Mays
gggaggagaagctgatgcaatttggagaggagacgcatctatggactgaagggaaggaacatagatgtttttgcagagaatagcagcttagccattaatcctcactatatccggtcctggttggatctgttgtcacggacaccacgggttgcaccttttctgcagaaaaatgaccccttcatagcagcactggaaaaggaactgtctgcacacactactgatgtgcgtgttcaaagtgatgcgcttgatggcatgttcactttctatgatgcgacgaaagcaactctaaatgtctaccaggttgcaggtgttacttttgatctgctgttccttctggtgctcggctcctacctgattgttctcttctgtttcctagtgattactacacggggtgttgatgatctcattaacatattccggcggcctccatcacgcaaactcaagggtgcataggctaggctgtgttttgtgtattagcgccagccaagagaccgcatgcctagtagtcattagaagaagagatagagatgaggatgacaggcaggcaggcaggctagcttgcttcccacagcacatagacaaacattttttttcctttttgtgtcaggaatttcgactgtaatttagctgtattttggttacaattctggcttattcggggtggactggtggcggtgtctgatgagagacagagaagcacacaccaccacgccgcctctgaactttggatgctgagaaattcttgtctgaaacacaaacactgaaggcctgccgtgcctgtgtttacttgttgtctgaaatataaaaaataatagagaagaggaatataaagtcaaagcgaaacgaagcacctaccttgcaggatgagatactggaacatggagataggccaagaagatcgtgattgaatttcagtcccttgattttagatcggacggccgatagatagatagtaggatggataaggcagtgagtgatccagggccaatgggccatccaacaaagagtcagccgagtctgctctgctgctccatcggatctcccgcgcgccaaaccatgccgacgcagcaagcatgttctgctgcggcagcattgagatcgcggcggccttcccctgcatccacgacgacgacctcccggcagctgcggctgcgtccgcctcgtgccgccaccgcgggcgtgcggctgacggtgtcggacgcggagctggagtcccgcgggttcgctgtgcggcgcacggcggagggcatcgacgtggcggcgctgaacgaggtgttcgtgcgcgtgggcttcccgcggcgtcaggaggagcggctgcggcgcgcgctggagcacagccgtgtggtgtggctgtcggccggggaggaggaagggcggcccgtggcgttcgcgcgcgcggccggggacggcgtgttcaacgccgtggtgtgggacgtggtggtggagccgtcgagccagggcctcgggctgggacgcgccgtcatggagcgcctcgtcgacgagctgcggcgcgacggcgtggccaacatcgtgctctacgccgagacgcgcgtggtggggttctaccgcctgctggacttcgccatggaccccgacggcatcagggggatggcatactaccgcaagtccactactaccgccgcttgattcgtctcgtctgtcttgaactcattcatcaatgaaggaagtcgatcgaattccctaaagccccccatgtttgtatgatgtagatatgacatggtttatttttatcactcatctcatagttgctcgtttattacctttcattttatattccgcgaaaacgatctagctagaacatgtacttatatttcccgcaaatcaagcaatataaaaacctcacttctttcctcgt

SEQ ID NO: 200422 - DNA, 3166 bp, Zea Mays
atggcatctgcattgcagttgcagccacgccaacaactgggcagcggcgacatctgcatctcccacctcgtctccctcccgtatctgcaagccttgatcccgccgccagccatccatccaagggagccatgtctccatccggcgagctgctggcttccatctcctccgtcttcactgtcgccttcgtcctcctcgcctgcgtcgagctcggcgacgccgccgccgccgccgtcggcgtctaccgcctcatccagtacgacctcgccggcgctccgctcggctcccgcgccgcggtcctcaaccaccacgctgccgcgctcccgctccccgccggcgcagacctctcccgctccgccctcgtcgcgccgctcctcgacctcccgctctctttcctcagagagtacctggtggagaaaaaacatctggggggattactcattctgctcccgacaaataatgacagtgtggatgacaaggggcaattcaaaggtgtactgactgagctggagaagttgcttctgcatgaacaagttccatatccagtgtactttgctttgcatgacgacaatcttgataacctgctggcagatatccatagaattgcctccacaggtcaaccagcctctgcaacaacaggaggttacaaacttgtcgtatcctcagcagagcctagaaaagtgtcatctccaaccatttctaatatccagggatggttacctggatttaaaggagagggtgatagcgaacagcttccgactattgccatagttgcaaactatgacaccttcggtgctgtacctgcactttctgtgggaagcgacagcaatggaagtggagttgtggctcttctagagattgcgagactattttcacgtctgtattcaaatcctaagacaaggggcaagtacaatattctctttgggttaacatctggtggaccctacaattacaatggaactagcaagtggcttaggagttttgatcagcgtgtacgcgagagcattgactacgcaatttgcttgaacaatgttggttcctggggcaatgacctctggatgcatgtatcaaagcctccagaaaatccctatatcaagcaaatctttaaagaattttcagatgtttctaaagaaatgggtgtttcagttggaatcaagcacaagaagattaatgtctcaaatcccagagtagcatgggaacacgaacagttctcaaggtttagggtgactgcacttactctttcagaaatgtctacccctcctgattttttggaaagcactggcggtcttcatgacactagagaatctacagatgctgagtcagtaatccgagctgccagattagtttctgagagtcttgcgagacgcatctatggactgaagggaaggaacatagatgtttttgcagagaatagcagcttagccattaatcctcactatatccggtcctggttggatctgttgtcacggacaccacgggttgcaccttttctgcagaaaaatgaccccttcatagcagcactggaaaagtgatgcgcttgatggcatgttcactttctatgatgcgacgaaagcaactctaaatgtctaccaggttgcaggtgttacttttgatctgctgttccttctggtgctcggctcctacctgattgttctcttctgtttcctagtgattactacacggggtgttgatgatctcattaacatattccggcggcctccatcacgcaaactcaagggtgcataggctaggctgtgttttgtgtattagcgccagccaagagaccgcatgcctagtagtcattagaagaagagatagagatgaggatgacaggcaggcaggcaggctagcttgcttcccacagcacatagacaaacattttttttcctttttgtgtcaggaatttcgactgtaatttagctgtattttggttacaattctggcttattcggggtggactggtggcggtgtctgatgagagacagagaagcacacaccaccacgccgcctctgaactttggatgctgagaaattcttgtctgaaacacaaacactgaaggcctgccgtgcctgtgtttacttgttgtctgaaatataaaaaataatagagaagaggaatataaagtcaaagcgaaacgaagcacctaccttgcaggatgagatactggaacatggagataggccaagaagatcgtgattgaatttcagtcccttgattttagatcggacggccgatagatagatagtaggatggataaggcagtgagtgatccagggccaatgggccatccaacaaagagtcagccgagtctgctctgctgctccatcggatctcccgcgcgccaaaccatgccgacgcagcaagcatgttctgctgcggcagcattgagatcgcggcggccttcccctgcatccacgacgacgacctcccggcagctgcggctgcgtccgcctcgtgccgccaccgcgggcgtgcggctgacggtgtcggacgcggagctggagtcccgcgggttcgctgtgcggcgcacggcggagggcatcgacgtggcggcgctgaacgaggtgttcgtgcgcgtgggcttcccgcggcgtcaggaggagcggctgcggcgcgcgctggagcacagccgtgtggtgtggctgtcggccggggaggaggaagggcggcccgtggcgttcgcgcgcgcggccggggacggcgtgttcaacgccgtggtgtgggacgtggtggtggagccgtcgagccagggcctcgggctgggacgcgccgtcatggagcgcctcgtcgacgagctgcggcgcgacggcgtggccaacatcgtgctctacgccgagacgcgcgtggtggggttctaccgcctgctggacttcgccatggaccccgacggcatcagggggatggcatactaccgcaagtccactactaccgccgcttgattcgtctcgtctgtcttgaactcattcatcaatgaaggaagtcgatcgaattccctaaagccccccatgtttgtatgatgtagatatgacatggtttatttttatcactcatctcatagttgctcgtttattacctttcattttatattccgcgaaaacgatctagctagaacatgtacttatatttcccgcaaatcaagcaatataaaaacctcacttctttcctcgt

SEQ ID NO: 200423 - DNA, 3140 bp, Zea Mays
atggcatctgcattgcagttgcagccacgccaacaactgggcagcggcgacatctgcatctcccacctcgtctccctcccgtatctgcaagccttgatcccgccgccagccatccatccaagggagccatgtctccatccggcgagctgctggcttccatctcctccgtcttcactgtcgccttcgtcctcctcgcctgcgtcgagctcggcgacgccgccgccgccgccgtcggcgtctaccgcctcatccagtacgacctcgccggcgctccgctcggctcccgcgccgcggtcctcaaccaccacgctgccgcgctcccgctccccgccggcgcagacctctcccgctccgccctcgtcgcgccgctcctcgacctcccgctctctttcctcagagtgtggatgacaaggggcaattcaaaggtgtactgactgagctggagaagttgcttctgcatgaacaagttccatatccagtgtactttgctttgcatgacgacaatcttgataacctgctggcagatatccatagaattgcctccacaggtcaaccagcctctgcaacaacaggaggttacaaacttgtcgtatcctcagcagagcctagaaaagtgtcatctccaaccatttctaatatccagggatggttacctggatttaaaggagagggtgatagcgaacagcttccgactattgccatagttgcaaactatgacaccttcggtgctgtacctgcactttctgtgggaagcgacagcaatggaagtggagttgtggctcttctagagattgcgagactattttcacgtctgtattcaaatcctaagacaaggggcaagtacaatattctctttgggttaacatctggtggaccctacaattacaatggaactagcaagtggcttaggagttttgatcagcgtgtacgcgagagcattgactacgcaatttgcttgaacaatgttggttcctggggcaatgacctctggatgcatgtatcaaagcctccagaaaatccctatatcaagcaaatctttaaagaattttcagatgtttctaaagaaatgggtgtttcagttggaatcaagcacaagaagattaatgtctcaaatcccagagtagcatgggaacacgaacagttctcaaggtttagggtgactgcacttactctttcagaaatgtctacccctcctgattttttggaaagcactggcggtcttcatgacactagagaatctacagatgctgagtcagtaatccgagctgccagattagtttctgagagtcttgcgagacgcatctatggactgaagggaaggaacatagatgtttttgcagagaatagcagcttagccattaatcctcactatatccggtcctggttggatctgttgtcacggacaccacgggttgcaccttttctgcagaaaaatgaccccttcatagcagcactggaaaaggaactgtctgcacacactactgatgtgcgtgttcaaagtgatgcgcttgatggcatgttcactttctatgatgcgacgaaagcaactctaaatgtctaccaggttgcaggtgttacttttgatctgctgttccttctggtgctcggctcctacctgattgttctcttctgtttcctagtgattactacacggggtgttgatgatctcattaacatattccggcggcctccatcacgcaaactcaagggtgcataggctaggctgtgttttgtgtattagcgccagccaagagaccgcatgcctagtagtcattagaagaagagatagagatgaggatgacaggcaggcaggcaggctagcttgcttcccacagcacatagacaaacattttttttcctttttgtgtcaggaatttcgactgtaatttagctgtattttggttacaattctggcttattcggggtggactggtggcggtgtctgatgagagacagagaagcacacaccaccacgccgcctctgaactttggatgctgagaaattcttgtctgaaacacaaacactgaaggcctgccgtgcctgtgtttacttgttgtctgaaatataaaaaataatagagaagaggaatataaagtcaaagcgaaacgaagcacctaccttgcaggatgagatactggaacatggagataggccaagaagatcgtgattgaatttcagtcccttgattttagatcggacggccgatagatagatagtaggatggataaggcagtgagtgatccagggccaatgggccatccaacaaagagtcagccgagtctgctctgctgctccatcggatctcccgcgcgccaaaccatgccgacgcagcaagcatgttctgctgcggcagcattgagatcgcggcggccttcccctgcatccacgacgacgacctcccggcagctgcggctgcgtccgcctcgtgccgccaccgcgggcgtgcggctgacggtgtcggacgcggagctggagtcccgcgggttcgctgtgcggcgcacggcggagggcatcgacgtggcggcgctgaacgaggtgttcgtgcgcgtgggcttcccgcggcgtcaggaggagcggctgcggcgcgcgctggagcacagccgtgtggtgtggctgtcggccggggaggaggaagggcggcccgtggcgttcgcgcgcgcggccggggacggcgtgttcaacgccgtggtgtgggacgtggtggtggagccgtcgagccagggcctcgggctgggacgcgccgtcatggagcgcctcgtcgacgagctgcggcgcgacggcgtggccaacatcgtgctctacgccgagacgcgcgtggtggggttctaccgcctgctggacttcgccatggaccccgacggcatcagggggatggcatactaccgcaagtccactactaccgccgcttgattcgtctcgtctgtcttgaactcattcatcaatgaaggaagtcgatcgaattccctaaagccccccatgtttgtatgatgtagatatgacatggtttatttttatcactcatctcatagttgctcgtttattacctttcattttatattccgcgaaaacgatctagctagaacatgtacttatatttcccgcaaatcaagcaatataaaaacctcacttctttcctcgt

SEQ ID NO: 200424 - DNA, 1765 bp, Zea Mays
acggcccatctggccatccggttagcaagaccaacaaatgcacactgatacgttcccttcgaacccacctcccatggccaccgtcgactgccccctgccctctcccgcggacctcgacgacaacggattcccggctctaccctcctcccccgctgcctgtagcagcggcttcgcggaggacttctaccgcagcggcaccgactggtcctccttacgcgcccctccgccgctggggccgcccagaagggcacccggtgtgaaggagagaggaggcggctcggccgtgcagagcagcctcttccaggcgtgggggatcgagaagccgcggcgggacgggcgtggggctggggattcatcgcttgtgcagaggagcctcttccaggcatgggggatcgagagaccgcagagggagggtctcggggctggagattcctccccctcctcctccctttccggttctttgttggcaaggaagcggaggcgaggaagcaccgaggaggagcgggtggcggccaagaagcccctcgcgtgccccttctacaagaagattcctggcccatatatacactgatgcatcgagaaggcggattctctactcatttggctggccagatttgtccaaaaggctatgttcatgcaatcaaagttcatcacttcatgttctgccccttggatctataaatcatgagaacttgaagaagtacttggagactcttaatggaagattcctagctgtgctggcttttcggcctacaggttggactttctctgaggcaactggaaagcatcttgacctaataaaaccaagctctaatgccaatgtaacaatctatggtgtgccttatagcgagcattcaagtttcactgagcttagggattttgtgatgtttctgaaacctcaaaagataattcctactgttaatgttggcaatgccacaagccgagataaaatgcaagcacatttccgggaatggctgaagagcccgtgataaatatatcctgatcatgtttttttttctatatcggcgtcaactcgactccactcaatgagtgacacagtcatggtacggaaaagaagtggatatatttttaaaggttggtttgcttggtactaaaaatgctatgtttagagtaccacttttcccaacattattccgagattcgttttgtggaacttatctcatttgagaggtaaatgtgttgtttctcgcttgtctggcatttctttgcaagggaactgtaagatgaagaaatattgatttgaattactgtttatcaaaacccattatcagcaacacatttgttgtctccccatgttcaatcgaaatacaagatttcactggctagagcagtgggatttcctagttgcgattgggagtcggtatgctgccttcagaaatatgtggaagaaagtggtacacgacccagcttctgaattctaattagacgataaggtctatagcctaacacctgctgggctgctagtgtcacagcttctattggcaacataagcacaaatttcggctactgtaacgattaaactatttgctcttattcatcccaaatgatttttctacaaggtggtagagtcatgaaatgacgaatggtaaatagtgcatatgttgggtgagatttccgctgctcacaagaataagcttaatgctattgcattaccatcatagttatgggcaatcatctaaatattaccatcattatctaaaaaaatctaaatattaccatagcctgctaagcctagaaaatattt

SEQ ID NO: 200425 - DNA, 2332 bp, Zea Mays
ctcaaaatcccattcgaaacctcccgattccctccacgaaatttacaaaaccacagcactcccgccaatctcccgcacgtttgggacccaaatccgcgatcccgttgcccagccgcagcgtacggaaacctagctccccccccgccgccgccgccgccgctgggatggacttctcggcgccctcattctcgctgggttttgactgggacgacgatgaccccccggccagcagcgaccggcgcgagcagccgcgcgggtacggggcccccgacgcgccgtcgttctcgttagggatcgacgacgacgacgacgtggaggagccccgcatcccggcgagaggccgccagaatgagcaggcgcgtgagttcacggcgcccgatccgccgtcgttctccctgggcttcgacgacgaacacggcgatggtgacatactctctgccgaccgttgccgcgagcagtcgcagccccaggtagcgcccggatctccttcaaatggcactgcagatgatgatgatgataaggaggatggcttcgtcgtcgctggtggcaagcggccggttcgagtggagcgtgacacgctatacccagatcccctgccgacgccagcggagaccaatcggttcaagcggctgcggaagggctctgcgacagcccatccggcgcaaactccccaggtgccgcaccgtgaggcgcctgacgctccgtcttcctcccttagcatcagcgacgacgacttcctaactggcggccagcatcacgagcgactgaagccacaagcctctcctcggatcccctcatcgctcagtatcgaagacgaggacgacgacttcttcctcgctggtgaccgacagccagagccaacactgcctcaagtgactcaactcaagcggctgcggaagggccctgtcccgccacatctggcgccatcaccgcctcctcccaaggtgccaggacagcccacgacggaagcctctccagtaatgactgaagatgcagcacgaggggcggttgggagttgggaagacgagatcgaggattggacaacagacgaggaccgaccagttcgagtcaaaataaagcaaagagcatgcagcaaaacaggaagccccaaatgaacagtactgtacagaagagcggggctatgatgagtgacaattgggcaacacctgccttggatgagttctgcaaggaatacttcgaatctccaaaagatgcaggattttctcagccgaaagaaggaaacactcattacaaggcttcacaacctaagaactctgggcacttccagcaacaagcgtcttcaagtggaggtgaagtggatgatggtcctcctgctatgcaatatctgtaccaccctgacccaagggtgggtgatttgttccggaacaggctgcaacatttcgttcctattggggcaggaagtaccatagcaaatgagcaaaacagagcaaaaagtctaagaagttgcaggaggcaatccagctcgagtgcagctgctaccgatgactgggtaactcctgggagggtctcagttccaactgatgctagcaaaagaagggtgcatgccagtggaactcattctggctctggccattggtttactaatgacagtgggaggaaggtttacgtctcaaaaaatggacaagagttgactgggcgtgatgcctatcgacaatatcaaaaggaaagtggcaggggattcaacaggtacaagaagaaaggttcatcaggaaccaaacgaggtgctgctcaagtgaaaactgagactgcagccaaacgaggtactgctcaagtgaaaactgagactgcagccaaacgaggtacgagtagagcaaaaaggaagcggtgactgcctacattggctaggattctgtagttaggttttcacctcgcgtgcttgagttcacagccgatttgttggtagaagtagaaccatatgaatgtataacaagcctcagctgctctcgggtcttcttttagggtgcgtttggttgcaatgacaggacgggataggacgagacgatccctcaaataagattgttttgttcagggtcaagggttgggacaggattatcccagtgttgtccccagttatccctcaaaattggagggacgagaggatgccagaggacgtccctatcctggttgtcccgcaaccaaacacacccttatatcaggaggctagcgtatacgtcagtacatggttctattgtgtgtttgtaaatatgattttgctcttcatgtattcttctttttttggatgccaatgaggcaatgatctgtatgcaaaaggctggattactccacaggatgaataaaccattatttcaca

SEQ ID NO: 200426 - DNA, 1105 bp, Zea Mays
tatctcccctccagacctccacacgccgcgatggcctccgccgaaatccccaactccagccctgatgccaccaaccccgccgccgccgccgccaccgccaccgccactgccaccggccccgacatctcctcttcgccgccactcccgccgcggaagcgccgcctttcgccttcctcatctcccacgcgctccgcgtcacgctctcggtcgccccgctcccgctccccgcgcggccgccgctcccgctcccgcagccggagccggagccggagccgcagccgcagcccgcagtacccgcccgacggcaagcggcagcggcacaacgaccttaccgtggaggcgtgccgcgacttcctgcgcgataggtgcacccgctccgacctcgagtgcagatacgcgcaccctcacaactcagcttccgtcgaccgggacaacaaggtgacggcgtgcgcggattctcttaggaacaattgcttccgggggatgacatgccgttactaccacccccctccacaaatccaggagcaattgctgagatcaattggtatggaagatccaaatgtgaagacgcagatctgcagagattttacacgtgggaagtgttcaaggtcagcaaatgagtgccgattcttgcaccattcatctgttgaagatgctgcaattgtttgccaagattttttgcgtggacaatgcaatcgcatagcatgtaggtactctcatgtagtagcacatccggtgccaccaatgagccatgttcctatgccataccctgagatgctttacatgccaccaccaccaccaccacctcttggagtaccaatgatggggcctccgccttcaccatttgctgataataagaacagggttgaagtttgtagggacttcttgaagaacatgtgcaatagagaatcctgccggtttttacaccctgggacacatacagcggctgcgagcgccaatgttgaagtatgccgtgattttaaacgaggagaatgcaatcgacctgcctgtcgctttttgcatccatatacaagttgaagttttctgttagctaaagcctgccgctgtttcaaacaggcaccgccagagaacattctgatgtgct

SEQ ID NO: 200427 - DNA, 1360 bp, Zea Mays
tatctcccctccagacctccacacgccgcgatggcctccgccgaaatccccaactccagccctgatgccaccaaccccgccgccgccgccgccaccgccaccgccactgccaccggccccgacatctcctcttcgccgccactcccgccgcggaagcgccgcctttcgccttcctcatctcccacgcgctccgcgtcacgctctcggtcgccccgctcccgctccccgcgcggccgccgctcccgctcccgcagccggagccggagccggagccgcagccgcagcccgcagtacccgcccgacggcaagcggcagcggcacaacgaccttaccgtggaggcgtgccgcgacttcctgcgcgataggtgcacccgctccgacctcgagtgcagatacgcgcaccctcacaactcagcttccgtcgaccggcaattgctgagatcaattggtatggaagatccaaatgtgaagacgatctgcagagattttacacgtgggaagtgttcaaggtcagcaaatgagtgccgattcttgcaccattcatctgttgaagatgctgcaattgtttgccaagattttttgcgtggacaatgcaatcgcatagcatgtaggtactctcatgtagtagcacatccggtgccaccaatgagccatgttcctatgccataccctgagatgctttacatgccaccaccaccaccaccacctcttggagtaccaatgatggggcctccgccttcaccatttgctgataataagaacagggttgaagtttgtagggacttcttgaagaacatgtgcaatagagaatcctgccggtttttacaccctgggacacatacagcggctgcgagcgccaatgttgaagtatgccgtgattttaaacgaggagaatgcaatcgacctgcctgtcgctttttgcatccatatacaagttgaagttttctgttagctaaacttgagtgctctgcccaccgccgccgctactgctgtgctgctgctgctgccgccgccgccgccgccgctgctgcgccaccaccacccattctgcttctgccaccaaagagctgctgcgctggctgttgcgtcgctaaggtgccatagagcaaggaagccatagaaggcgctatgtatgcatcgaataaaagattctaatatcctgggatattcagatggttgcttgaacttgctttactcaatgcttgagcagtgcccccttcactataggggctgtgtgtggttttgtatttgttgtcataaaagatattttttgactctagctaatttgatgtctacgctattgccttccccttagcatcacactttattgtttgtataagttattgagcaaatgtttcgc

SEQ ID NO: 200428 - DNA, 1456 bp, Zea Mays
tatctcccctccagacctccacacgccgcgatggcctccgccgaaatccccaactccagccctgatgccaccaaccccgccgccgccgccgccaccgccaccgccactgccaccggccccgacatctcctcttcgccgccactcccgccgcggaagcgccgcctttcgccttcctcatctcccacgcgctccgcgtcacgctctcggtcgccccgctcccgctccccgcgcggccgccgctcccgctcccgcagccggagccggagccggagccgcagccgcagcccgcagtacccgcccgacggcaagcggcagcggcacaacgaccttaccgtggaggcgtgccgcgacttcctgcgcgataggtgcacccgctccgacctcgagtgcagatacgcgcaccctcacaactcagcttccgtcgaccgggacaacaaggtgacggcgtgcgcggattctcttaggaacaattgcttccgggggatgacatgccgttactaccacccccctccacaaatccaggagcaattgctgagatcaattggtatggaagatccaaatgtgaagacgatctgcagagattttacacgtgggaagtgttcaaggtcagcaaatgagtgccgattcttgcaccattcatctgttgaagatgctgcaattgtttgccaagattttttgcgtggacaatgcaatcgcatagcatgtaggtactctcatgtagtagcacatccggtgccaccaatgagccatgttcctatgccataccctgagatgctttacatgccaccaccaccaccaccacctcttggagtaccaatgatggggcctccgccttcaccatttgctgataataagaacagggttgaagtttgtagggacttcttgaagaacatgtgcaatagagaatcctgccggtttttacaccctgggacacatacagcggctgcgagcgccaatgttgaagtatgccgtgattttaaacgaggagaatgcaatcgacctgcctgtcgctttttgcatccatatacaagttgaagttttctgttagctaaacttgagtgctctgcccaccgccgccgctactgctgtgctgctgctgctgccgccgccgccgccgccgctgctgcgccaccaccacccattctgcttctgccaccaaagagctgctgcgctggctgttgcgtcgctaaggtgccatagagcaaggaagccatagaaggcgctatgtatgcatcgaataaaagattctaatatcctgggatattcagatggttgcttgaacttgctttactcaatgcttgagcagtgcccccttcactataggggctgtgtgtggttttgtatttgttgtcataaaagatattttttgactctagctaatttgatgtctacgctattgccttccccttagcatcacactttattgtttgtataagttattgagcaaatgtttcgc

SEQ ID NO: 200429 - DNA, 1411 bp, Zea Mays
cctctccccaacgcagtcacctagatcccatcttgtcaggggtacgtctatctcccctccagacctccacacgccgcgatggcctccgccgaaatccccaactccagccctgatgccaccaaccccgccgccgccgccgccaccgccaccgccactgccaccggccccgacatctcctcttcgccgccactcccgccgcggaagcgccgcctttcgccttcctcatctcccacgcgctccgcgtcacgctctcggtcgccccgctcccgctccccgcgcggccgccgctcccgctcccgcagccggagccggagccggagccgcagccgcagcccgcagtacccgcccgacggcaagcggcagcggcacaacgaccttaccgtggaggcgtgccgcgacttcctgcgcgataggtgcacccgctccgacctcgagtgcagatacgcgcaccctcacaactcagcttccgtcgaccggcaattgctgagatcaattggtatggaagatccaaatgtgaagacgcagatctgcagagattttacacgtgggaagtgttcaaggtcagcaaatgagtgccgattcttgcaccattcatctgttgaagatgctgcaattgtttgccaagattttttgcgtggacaatgcaatcgcatagcatgtaggtactctcatgtagtagcacatccggtgccaccaatgagccatgttcctatgccataccctgagatgctttacatgccaccaccaccaccaccacctcttggagtaccaatgatggggcctccgccttcaccatttgctgataataagaacagggttgaagtttgtagggacttcttgaagaacatgtgcaatagagaatcctgccggtttttacaccctgggacacatacagcggctgcgagcgccaatgttgaagtatgccgtgattttaaacgaggagaatgcaatcgacctgcctgtcgctttttgcatccatatacaagttgaagttttctgttagctaaacttgagtgctctgcccaccgccgccgctactgctgtgctgctgctgctgccgccgccgccgccgccgctgctgcgccaccaccacccattctgcttctgccaccaaagagctgctgcgctggctgttgcgtcgctaaggtgccatagagcaaggaagccatagaaggcgctatgtatgcatcgaataaaagattctaatatcctgggatattcagatggttgcttgaacttgctttactcaatgcttgagcagtgcccccttcactataggggctgtgtgtggttttgtatttgttgtcataaaagatattttttgactctagctaatttgatgtctacgctattgccttccccttagcatcacactttattgtttgtataagttattgagcaaatgtttcgc

SEQ ID NO: 200430 - DNA, 1208 bp, Zea Mays
gtgaagacgatctgcagagattttacacgtgggaagtgttcaaggtttgccaagattttttgcgtggacaatgcaatcgcatagcatgtaggtactctcatgtagtagcacatccggtgccaccaatgagccatgttcctatgccataccctgagatgctttacatgccaccaccaccaccaccacctcttggagtaccaatgatggggcctccgccttcaccatttgctgataataagaacagggttgaagtttgtagggacttcttgaagaacatgtgcaatagagaatcctgccggtttttacaccctgggacacatacagcggctgcgagcgccaatgttgaagtatgccgtgattttaaacgaggagaatgcaatcgacctgcctgtcgctttttgcatccatatacaagttgaagttttctgttagctaaagtaaagtaaattgtaccttgttttcctcttcataatacaaatggctgccaaatacatatagatgaaagaacgctcccctaagaacacatagttatagagttaacttcaacgtcaacttgtggatcttttgtccattcaaaccagctagagcaaaatagattttaattttggtaatttttgtcatttgggtaaattaaggtattttcaatgaaatgcaacttttatctgatctgaacaggcatgcgaatgatcatgttggttctctaagatttccaattggctaagatagcatgcacttgttgaagtgatccactgtttgaccagcttcattatcttttactccacatcaattctgttccttctgggaaagctcttctgctaagtttgatcttagatttatgaaccacaagcccacaacaatggcaaatgacctcttatatgaaaaaaacccgacctgcggggggtaagatcgcccccacgggctgtgcattacattaagaagaccttctcacgtaggtcgagaaaacctccaaacccttgttccacccacatacaatgacaccatagcacatgtgagaataaccgtgactaggaccgaaccttagacatgtgctttggcctcagcctgaaattcgctctcatgaggtcaaacccaggatcttaggagtgctactcaaaccacctaatcaattcagctagaggcccttttgcatggcctattgtatgactccacttttagaatttattactagtttatggtgggctattgat

SEQ ID NO: 200431 - DNA, 1824 bp, Zea Mays
tatctcccctccagacctccacacgccgcgatggcctccgccgaaatccccaactccagccctgatgccaccaaccccgccgccgccgccgccaccgccaccgccactgccaccggccccgacatctcctcttcgccgccactcccgccgcggaagcgccgcctttcgccttcctcatctcccacgcgctccgcgtcacgctctcggtcgccccgctcccgctccccgcgcggccgccgctcccgctcccgcagccggagccggagccggagccgcagccgcagcccgcagtacccgcccgacggcaagcggcagcggcacaacgaccttaccgtggaggcgtgccgcgacttcctgcgcgataggtgcacccgctccgacctcgagtgcagatacgcgcaccctcacaactcagcttccgtcgaccgggacaacaaggtgacggcgtgcgcggattctcttaggaacaattgcttccgggggatgacatgccgttactaccacccccctccacaaatccaggagcaattgctgagatcaattggtatggaagatccaaatgtgaagacgatctgcagagattttacacgtgggaagtgttcaaggtcagcaaatgagtgccgattcttgcaccattcatctgttgaagatgctgcaattgtttgccaagattttttgcgtggacaatgcaatcgcatagcatgtaggtactctcatgtagtagcacatccggtgccaccaatgagccatgttcctatgccataccctgagatgctttacatgccaccaccaccaccaccacctcttggagtaccaatgatggggcctccgccttcaccatttgctgataataagaacagggttgaagtttgtagggacttcttgaagaacatgtgcaatagagaatcctgccggtttttacaccctgggacacatacagcggctgcgagcgccaatgttgaagtatgccgtgattttaaacgaggagaatgcaatcgacctgcctgtcgctttttgcatccatatacaagttgaagttttctgttagctaaagtaaagtaaattgtaccttgttttcctcttcataatacaaatggctgccaaatacatatagatgaaagaacgctcccctaagaacacatagttatagagttaacttcaacgtcaacttgtggatcttttgtccattcaaaccagctagagcaaaatagattttaattttggtaatttttgtcatttgggtaaattaaggtattttcaatgaaatgcaacttttatctgatctgaacaggcatgcgaatgatcatgttggttctctaagatttccaattggctaagatagcatgcacttgttgaagtgatccactgtttgaccagcttcattatcttttactccacatcaattctgttccttctgggaaagctcttctgctaagtttgatcttagatttatgaaccacaagcccacaacaatggcaaatgacctcttatatgaaaaaaacccgacctgcggggggtaagatcgcccccacgggctgtgcattacattaagaagaccttctcacgtaggtcgagaaaacctccaaacccttgttccacccacatacaatgacaccatagcacatgtgagaataaccgtgactaggaccgaaccttagacatgtgctttggcctcagcctgaaattcgctctcatgaggtcaaacccaggatcttaggagtgctactcaaaccacctaatcaattcagctagaggcccttttgcatggcctattgtatgactccacttttagaatttattactagtttatggtgggctattgat

SEQ ID NO: 200432 - DNA, 1728 bp, Zea Mays
tatctcccctccagacctccacacgccgcgatggcctccgccgaaatccccaactccagccctgatgccaccaaccccgccgccgccgccgccaccgccaccgccactgccaccggccccgacatctcctcttcgccgccactcccgccgcggaagcgccgcctttcgccttcctcatctcccacgcgctccgcgtcacgctctcggtcgccccgctcccgctccccgcgcggccgccgctcccgctcccgcagccggagccggagccggagccgcagccgcagcccgcagtacccgcccgacggcaagcggcagcggcacaacgaccttaccgtggaggcgtgccgcgacttcctgcgcgataggtgcacccgctccgacctcgagtgcagatacgcgcaccctcacaactcagcttccgtcgaccggcaattgctgagatcaattggtatggaagatccaaatgtgaagacgatctgcagagattttacacgtgggaagtgttcaaggtcagcaaatgagtgccgattcttgcaccattcatctgttgaagatgctgcaattgtttgccaagattttttgcgtggacaatgcaatcgcatagcatgtaggtactctcatgtagtagcacatccggtgccaccaatgagccatgttcctatgccataccctgagatgctttacatgccaccaccaccaccaccacctcttggagtaccaatgatggggcctccgccttcaccatttgctgataataagaacagggttgaagtttgtagggacttcttgaagaacatgtgcaatagagaatcctgccggtttttacaccctgggacacatacagcggctgcgagcgccaatgttgaagtatgccgtgattttaaacgaggagaatgcaatcgacctgcctgtcgctttttgcatccatatacaagttgaagttttctgttagctaaagtaaagtaaattgtaccttgttttcctcttcataatacaaatggctgccaaatacatatagatgaaagaacgctcccctaagaacacatagttatagagttaacttcaacgtcaacttgtggatcttttgtccattcaaaccagctagagcaaaatagattttaattttggtaatttttgtcatttgggtaaattaaggtattttcaatgaaatgcaacttttatctgatctgaacaggcatgcgaatgatcatgttggttctctaagatttccaattggctaagatagcatgcacttgttgaagtgatccactgtttgaccagcttcattatcttttactccacatcaattctgttccttctgggaaagctcttctgctaagtttgatcttagatttatgaaccacaagcccacaacaatggcaaatgacctcttatatgaaaaaaacccgacctgcggggggtaagatcgcccccacgggctgtgcattacattaagaagaccttctcacgtaggtcgagaaaacctccaaacccttgttccacccacatacaatgacaccatagcacatgtgagaataaccgtgactaggaccgaaccttagacatgtgctttggcctcagcctgaaattcgctctcatgaggtcaaacccaggatcttaggagtgctactcaaaccacctaatcaattcagctagaggcccttttgcatggcctattgtatgactccacttttagaatttattactagtttatggtgggctattgat

SEQ ID NO: 200433 - DNA, 1731 bp, Zea Mays
tatctcccctccagacctccacacgccgcgatggcctccgccgaaatccccaactccagccctgatgccaccaaccccgccgccgccgccgccaccgccaccgccactgccaccggccccgacatctcctcttcgccgccactcccgccgcggaagcgccgcctttcgccttcctcatctcccacgcgctccgcgtcacgctctcggtcgccccgctcccgctccccgcgcggccgccgctcccgctcccgcagccggagccggagccggagccgcagccgcagcccgcagtacccgcccgacggcaagcggcagcggcacaacgaccttaccgtggaggcgtgccgcgacttcctgcgcgataggtgcacccgctccgacctcgagtgcagatacgcgcaccctcacaactcagcttccgtcgaccggcaattgctgagatcaattggtatggaagatccaaatgtgaagacgcagatctgcagagattttacacgtgggaagtgttcaaggtcagcaaatgagtgccgattcttgcaccattcatctgttgaagatgctgcaattgtttgccaagattttttgcgtggacaatgcaatcgcatagcatgtaggtactctcatgtagtagcacatccggtgccaccaatgagccatgttcctatgccataccctgagatgctttacatgccaccaccaccaccaccacctcttggagtaccaatgatggggcctccgccttcaccatttgctgataataagaacagggttgaagtttgtagggacttcttgaagaacatgtgcaatagagaatcctgccggtttttacaccctgggacacatacagcggctgcgagcgccaatgttgaagtatgccgtgattttaaacgaggagaatgcaatcgacctgcctgtcgctttttgcatccatatacaagttgaagttttctgttagctaaagtaaagtaaattgtaccttgttttcctcttcataatacaaatggctgccaaatacatatagatgaaagaacgctcccctaagaacacatagttatagagttaacttcaacgtcaacttgtggatcttttgtccattcaaaccagctagagcaaaatagattttaattttggtaatttttgtcatttgggtaaattaaggtattttcaatgaaatgcaacttttatctgatctgaacaggcatgcgaatgatcatgttggttctctaagatttccaattggctaagatagcatgcacttgttgaagtgatccactgtttgaccagcttcattatcttttactccacatcaattctgttccttctgggaaagctcttctgctaagtttgatcttagatttatgaaccacaagcccacaacaatggcaaatgacctcttatatgaaaaaaacccgacctgcggggggtaagatcgcccccacgggctgtgcattacattaagaagaccttctcacgtaggtcgagaaaacctccaaacccttgttccacccacatacaatgacaccatagcacatgtgagaataaccgtgactaggaccgaaccttagacatgtgctttggcctcagcctgaaattcgctctcatgaggtcaaacccaggatcttaggagtgctactcaaaccacctaatcaattcagctagaggcccttttgcatggcctattgtatgactccacttttagaatttattactagtttatggtgggctattgat

SEQ ID NO: 200434 - DNA, 1358 bp, Zea Mays
cgccacaagccttactgcatatttttcttgtgaaaaagacctatatttgctcactggtttgaattataatcatgtttatctttccaatctcaaatgttcttcaggacatacacatgtggcagaagcgctaaaagtaccaattcatatactgtttaccatgccatggacgccaactagtaaatttcctcatcccttttctcgtgtgaagcagcctgctggatatagaattggggtccaaagatcgatgttgttggattttgcttccttgatcttgcttccaattacgtgcctcctgaaccacttgtgaaatggcttcaagctggtgacaagcccatatatgttggttttggtagccttccagttcaagacccacaaaagatgactgaaattattgtcaaagcgctggaaattactggacagagaggtatcattaacaaaggctggggtggccttggaaccttggcagaaccaaaagattttgtatatctactagacaactgccctcatgactggctttttctgcaatgcaaagcagtggtgcatcatggtggcgctggaacaacagccgcaggtctcaaagcagcgtgtcctacgactattgtacctttctttggtgaccaacctttctggggcgaccgggtgcatgcaagagggctagggcctccgcctattccagttgatcagtttggtttgcagaagttggtggatgctataaagttcatgacgaaaccagtggtgaaagacaaggctgtagaggtggcgaaagccatggaatctgaagacggggtgacaggtgccgtcagggcattcctcagacacctgccttcgaaaaccgaggaaccgagcccaccgcaaccgtcaggctttcttgaattcttcttaggcccactaagtaaatgtttgggatgctcttagtgcagaacgcaatctgtcacggattggcgccttggcggcataccacaagagtttgccgtgatatcccatgcaaagaagctctggctcttcttttctttgtttccttttcctttcctgcgggtatttgtagtgtgcaaagagtggttgcttgtggtgtgcatggtctgcagcggatggcctgcgccctgtggtgcgtgtcattttgatgtttgccgtggagcaggcgacgatttcacgtccaacccgtacgttctgtatatttatgaaagaaagaaacagaggctaggttttccttgttctaatatggttaccgctaaatagctgatagcggctttgtaatggaaagtgagcgctatagcggacattgggttttaatagcagaatattaaaaatagataaaaatctagagcacataacacaatatcatgtttccttgaaaatat

SEQ ID NO: 200435 - DNA, 2005 bp, Zea Mays
catatttttcttgtgaaaaagacctatatttgctcactggtttgaattataatcatgtttatctttccaatctcaaatgttcttcaggacatacacatgtggcagaagcgctaaaagtaccaattcatatactgtttaccatgccatggacgccaactagtaaatttcctcatcccttttctcgtgtgaagcagcctgctggatatagactttcatatcaaattgtggactcgatgatttggcttggaataagggatatgataaatgagttcagaaagaaaaagttgaagctgcgtccagtaacatatctaagtggttctcagggttctggcaatgacatccctcatggatacatttggagtcctcatctagtcccgaaaccaaaagattggggtccaaagatcgatgttgttggattttgcttccttgatcttgcttccaattacgtgcctcctgaaccacttgtgaaatggcttcaagctggtgacaagcccatatatgttggttttggtagccttccagttcaagacccacaaaagatgactgaaattattgtcaaagcgctggaaattactggacagagaggtatcattaacaaaggctggggtggccttggaaccttggcagaaccaaaagattttgtatatctactagacaactgccctcatgactggctttttctgcaatgcaaagcagtggtgcatcatggtggcgctggaacaacagccgcaggtctcaaagcagcggtaagtgctctctccatgccttatttcaatgtaaaatagttgtactcttctcaaaggcactggagagttgcaagaggaaagggagtctaagaagacatacaaaccacagtcccaataaggtgatgttgactggatgaagacctaccaaaaaacagctaggtatgagcctacgaccagcaatgaaaacaagaatcatgggcctttggcccctgccatacaccacgtcgttgctcatctctaatgtcctgcatgatgatgctgaaattaggtgaagcaccctcatatatacagccgctcctatgcttctaccatccaatgcccaccaaagaattaaaccactgtttgcttattttcctttcagcctatttatggcacttttgacacgtttgcattttgatgggatcaggcataagtctaaaataccttccttgctgttattctcggaggtttcttgtactcaatttagttgtagtctacgatttgcagtgtcctacgactattgtacctttctttggtgaccaacctttctggggcgaccgggtgcatgcaagagggctagggcctccgcctattccagttgatcagtttggtttgcagaagttggtggatgctataaagttcatgacgaaaccagtggtgaaagacaaggctgtagaggtggcgaaagccatggaatctgaagacggggtgacaggtgccgtcagggcattcctcagacacctgccttcgaaaaccgaggaaccgagcccaccgcaaccgtcaggctttcttgaattcttcttaggcccactaagtaaatgtttgggatgctcttagtgcagaacgcaatctgtcacggattggcgccttggcggcataccacaagagtttgccgtgatatcccatgcaaagaagctctggctcttcttttctttgtttccttttcctttcctgcgggtatttgtagtgtgcaaagagtggttgcttgtggtgtgcatggtctgcagcggatggcctgcgccctgtggtgcgtgtcattttgatgtttgccgtggagcaggcgacgatttcacgtccaacccgtacgttctgtatatttatgaaagaaagaaacagaggctaggttttccttgttctaatatggttaccgctaaatagctgatagcggctttgtaatggaaagtgagcgctatagcggacattgggttttaatagcagaatattaaaaatagataaaaatctagagcacataacacaatatcatgtttccttgaaaatat

SEQ ID NO: 200436 - DNA, 892 bp, Zea Mays
aaaagacctatatttgctcactggtttgaattataatcatgtttatctttccaatctcaaatgttcttcaggacatacacatgtggcagaagcgctaaaagtaccaattcatatactgtttaccatgccatggacgccaactagtaaatttcctcatcccttttctcgtgtgaagcagcctgctggatatagactttcatatcaaattgtggactcgatgatttggcttggaataagggatatgataaatgagttcagaaagaaaaagttgaagctgcgtccagtaacatatctaagtggttctcagggttctggcaatgacatccctcatggatacatttggagtcctcatctagtcccgaaaccaaaagattggggtccaaagatcgatgttgttggattttgcttccttgatcttgcttccaattacgtgcctcctgaaccacttgtgaaatggcttcaagctggtgacaagcccatatatgttggttttggtagccttccagttcaagacccacaaaagatgactgaaattattgtcaaagcgctggaaattactggacagagaggtatcattaacaaaggctggggtggccttggaaccttggcagaaccaaaagattttgtatatctactagacaactgccctcatgactggctttttctgcaatgcaaagcagtggtgcatcatggtggcgctggaacaacagccgcaggtctcaaagcagcggtaagtgctctctccatgccttatttcaatgtaaaatagttgtactcttctcaaaggcactggagagttgcaagaggaaagggagtctaagaagacatacaaaccacagtcccaataaggtgatgttgactggatgaagacctaccaaaaaacagctagtct

SEQ ID NO: 200437 - DNA, 1423 bp, Zea Mays
gacatacacatgtggcagaagcgctaaaagtaccaattcatatactgtttaccatgccatggactaaatttcctcatcccttttctcgtgtgaagcagcctgctggatatagactttcatatcaaattgtggactcgatgatttggcttggaataagggatatgataaatgagttcagaaagaaaaagttgaagctgcgtccagtaacatatctaagtggttctcagggttctggcaatgacatccctcatggatacatttggagtcctcatctagtcccgaaaccaaaagattggggtccaaagatcgatgttgttggattttgcttccttgatcttgcttccaattacgtgcctcctgaaccacttgtgaaatggcttcaagctggtgacaagcccatatatgttggttttggtagccttccagttcaagacccacaaaagatgactgaaattattgtcaaagcgctggaaattactggacagagaggtatcattaacaaaggctggggtggccttggaaccttggcagaaccaaaagattttgtatatctactagacaactgccctcatgactggctttttctgcaatgcaaagcagtggtgcatcatggtggcgctggaacaacagccgcaggtctcaaagcagcgtgtcctacgactattgtacctttctttggtgaccaacctttctggggcgaccgggtgcatgcaagagggctagggcctccgcctattccagttgatcagtttggtttgcagaagttggtggatgctataaagttcatgacgaaaccagtggtgaaagacaaggctgtagaggtggcgaaagccatggaatctgaagacggggtgacaggtgccgtcagggcattcctcagacacctgccttcgaaaaccgaggaaccgagcccaccgcaaccgtcaggctttcttgaattcttcttaggcccactaagtaaatgtttgggatgctcttagtgcagaacgcaatctgtcacggattggcgccttggcggcataccacaagagtttgccgtgatatcccatgcaaagaagctctggctcttcttttctttgtttccttttcctttcctgcgggtatttgtagtgtgcaaagagtggttgcttgtggtgtgcatggtctgcagcggatggcctgcgccctgtggtgcgtgtcattttgatgtttgccgtggagcaggcgacgatttcacgtccaacccgtacgttctgtatatttatgaaagaaagaaacagaggctaggttttccttgttctaatatggttaccgctaaatagctgatagcggctttgtaatggaaagtgagcgctatagcggacattgggttttaatagcagaatattaaaaatagataaaaatctagagcacataacacaatatcatgtttccttgaaaatat

SEQ ID NO: 200438 - DNA, 1026 bp, Zea Mays
gacatacacatgtggcagaagcgctaaaagtaccaattcatatactgtttaccatgccatggacgccaactagtaaatttcctcatcccttttctcgtgtgaagcagcctgctggatatagaattggggtccaaagatcgatgttgttggattttgcttccttgatcttgcttccaattacgtgcctcctgaaccacttgtgaaatggcttcaagctggtgacaagcccatatatgttggttttggtagcctttgtcctacgactattgtacctttctttggtgaccaacctttctggggcgaccgggtgcatgcaagagggctagggcctccgcctattccagttgatcagtttggtttgcagaagttggtggatgctataaagttcatgacgaaaccagtggtgaaagacaaggctgtagaggtggcgaaagccatggaatctgaagacggggtgacaggtgccgtcagggcattcctcagacacctgccttcgaaaaccgaggaaccgagcccaccgcaaccgtcaggctttcttgaattcttcttaggcccactaagtaaatgtttgggatgctcttagtgcagaacgcaatctgtcacggattggcgccttggcggcataccacaagagtttgccgtgatatcccatgcaaagaagctctggctcttcttttctttgtttccttttcctttcctgcgggtatttgtagtgtgcaaagagtggttgcttgtggtgtgcatggtctgcagcggatggcctgcgccctgtggtgcgtgtcattttgatgtttgccgtggagcaggcgacgatttcacgtccaacccgtacgttctgtatatttatgaaagaaagaaacagaggctaggttttccttgttctaatatggttaccgctaaatagctgatagcggctttgtaatggaaagtgagcgctatagcggacattgggttttaatagcagaatattaaaaatagataaaaatctagagcacataacacaatatcatgtttccttgaaaatat

SEQ ID NO: 200439 - DNA, 1278 bp, Zea Mays
tacacatgtggcagaagcgctaaaagtaccaattcatatactgtttaccatgccatggacgccaactagtaaatttcctcatcccttttctcgtgtgaagcagcctgctggatatagaccagttcaagacccacaaaagatgactgaaattattgtcaaagcgctggaaattactggacagagaggtatcattaacaaaggctggggtggccttggaaccttggcagaaccaaaagattttgtatatctactagacaactgccctcatgactggctttttctgcaatgcaaagcagtggtgcatcatggtggcgctggaacaacagccgcaggtctcaaagcagcggtaagtgctctctccatgccttatttcaatgtaaaatagttgtactcttctcaaaggcactggagagttgcaagaggaaagggagtctaagaagacatacaaaccacagtcccaataaggtgatgttgactggatgaagacctaccaaaaaacagctagtgtcctacgactattgtacctttctttggtgaccaacctttctggggcgaccgggtgcatgcaagagggctagggcctccgcctattccagttgatcagtttggtttgcagaagttggtggatgctataaagttcatgacgaaaccagtggtgaaagacaaggctgtagaggtggcgaaagccatggaatctgaagacggggtgacaggtgccgtcagggcattcctcagacacctgccttcgaaaaccgaggaaccgagcccaccgcaaccgtcaggctttcttgaattcttcttaggcccactaagtaaatgtttgggatgctcttagtgcagaacgcaatctgtcacggattggcgccttggcggcataccacaagagtttgccgtgatatcccatgcaaagaagctctggctcttcttttctttgtttccttttcctttcctgcgggtatttgtagtgtgcaaagagtggttgcttgtggtgtgcatggtctgcagcggatggcctgcgccctgtggtgcgtgtcattttgatgtttgccgtggagcaggcgacgatttcacgtccaacccgtacgttctgtatatttatgaaagaaagaaacagaggctaggttttccttgttctaatatggttaccgctaaatagctgatagcggctttgtaatggaaagtgagcgctatagcggacattgggttttaatagcagaatattaaaaatagataaaaatctagagcacataacacaatatcatgtttccttgaaaatat

SEQ ID NO: 200440 - DNA, 1390 bp, Zea Mays
acacatgtggcagaagcgctaaaagtaccaattcatatactgtttaccatgccatggacgccaactagtaaatttcctcatcccttttctcgtgtgaagcagcctgctggatatagaattggggtccaaagatcgatgttgttggattttgcttccttgatcttgcttccaattacgtgcctcctgaaccacttgtgaaatggcttcaagctggtgacaagcccatatatccagttcaagacccacaaaagatgactgaaattattgtcaaagcgctggaaattactggacagagaggtatcattaacaaaggctggggtggccttggaaccttggcagaaccaaaagattttgtatatctactagacaactgccctcatgactggctttttctgcaatgcaaagcagtggtgcatcatggtggcgctggaacaacagccgcaggtctcaaagcagcggtaagtgctctctccatgccttatttcaatgtaaaatagttgtactcttctcaaaggcactggagagttgcaagaggaaagggagtctaagaagacatacaaaccacagtcccaataaggtgatgttgactggatgaagacctaccaaaaaacagctagtgtcctacgactattgtacctttctttggtgaccaacctttctggggcgaccgggtgcatgcaagagggctagggcctccgcctattccagttgatcagtttggtttgcagaagttggtggatgctataaagttcatgacgaaaccagtggtgaaagacaaggctgtagaggtggcgaaagccatggaatctgaagacggggtgacaggtgccgtcagggcattcctcagacacctgccttcgaaaaccgaggaaccgagcccaccgcaaccgtcaggctttcttgaattcttcttaggcccactaagtaaatgtttgggatgctcttagtgcagaacgcaatctgtcacggattggcgccttggcggcataccacaagagtttgccgtgatatcccatgcaaagaagctctggctcttcttttctttgtttccttttcctttcctgcgggtatttgtagtgtgcaaagagtggttgcttgtggtgtgcatggtctgcagcggatggcctgcgccctgtggtgcgtgtcattttgatgtttgccgtggagcaggcgacgatttcacgtccaacccgtacgttctgtatatttatgaaagaaagaaacagaggctaggttttccttgttctaatatggttaccgctaaatagctgatagcggctttgtaatggaaagtgagcgctatagcggacattgggttttaatagcagaatattaaaaatagataaaaatctagagcacataacacaatatcatgtttccttgaaaatat

SEQ ID NO: 200441 - DNA, 1403 bp, Zea Mays
cacatgtggcagaagcgctaaaagtaccaattcatatactgtttaccatgccatggacgccaactagtaaatttcctcatcccttttctcgtgtgaagcagcctgctggatatagaattggggtccaaagatcgatgttgttggattttgcttccttgatcttgcttccaattacgtgcctcctgaaccacttgtgaaatggcttcaagctggtgacaagcccatatatgttggttttggtagccttttcaagacccacaaaagatgactgaaattattgtcaaagcgctggaaattactggacagagaggtatcattaacaaaggctggggtggccttggaaccttggcagaaccaaaagattttgtatatctactagacaactgccctcatgactggctttttctgcaatgcaaagcagtggtgcatcatggtggcgctggaacaacagccgcaggtctcaaagcagcggtaagtgctctctccatgccttatttcaatgtaaaatagttgtactcttctcaaaggcactggagagttgcaagaggaaagggagtctaagaagacatacaaaccacagtcccaataaggtgatgttgactggatgaagacctaccaaaaaacagctagtgtcctacgactattgtacctttctttggtgaccaacctttctggggcgaccgggtgcatgcaagagggctagggcctccgcctattccagttgatcagtttggtttgcagaagttggtggatgctataaagttcatgacgaaaccagtggtgaaagacaaggctgtagaggtggcgaaagccatggaatctgaagacggggtgacaggtgccgtcagggcattcctcagacacctgccttcgaaaaccgaggaaccgagcccaccgcaaccgtcaggctttcttgaattcttcttaggcccactaagtaaatgtttgggatgctcttagtgcagaacgcaatctgtcacggattggcgccttggcggcataccacaagagtttgccgtgatatcccatgcaaagaagctctggctcttcttttctttgtttccttttcctttcctgcgggtatttgtagtgtgcaaagagtggttgcttgtggtgtgcatggtctgcagcggatggcctgcgccctgtggtgcgtgtcattttgatgtttgccgtggagcaggcgacgatttcacgtccaacccgtacgttctgtatatttatgaaagaaagaaacagaggctaggttttccttgttctaatatggttaccgctaaatagctgatagcggctttgtaatggaaagtgagcgctatagcggacattgggttttaatagcagaatattaaaaatagataaaaatctagagcacataacacaatatcatgtttccttgaaaatat

SEQ ID NO: 200442 - DNA, 625 bp, Zea Mays
catacctgccttgcgaacacacatgaggcgtgaagagcttcgacaacgagatacacaactgaagcagacgattggagacctggagcttgagctggaggaaacaaaaaagaagtgcggtcagcttgctgctcagctcaaggcatggaagaaccagcagcatctaccctaaatgtgaagggcatcattaagaccgaggacacggaggtacacgacaacgaccaatactgacagaaaaccgaaggttacaaggaagcacggatgcatataatgtctgtctagtgggctggctaactcatggttgagttgttaaaaagaagtttagcatgtaaatcttaggcgtgtgtgctacttagctactagacagaatggttgtcatgtgcaagcaaggaagatgacttgggtgattcctgctgttaatttgctatgcaaaatgtcacgtaaggcccttatgatccagccttgagcatcaaataaaactgtagaactcgaaatgaattgctcatggtcccctgcatttctgattaatagggtaccaactgacgacgaacaatgcagggttcaggtgtatgaaagggattccctcccggccacagtatcgcacgaatcggtcgggctcatatttgat

SEQ ID NO: 200443 - DNA, 2128 bp, Zea Mays
atgtttaatcatcaaacgttcattcatcatatcccaaggcatctacaagtccagcttctgaagcagaacacttcaggtcatcaccagagtttgaagaatgaggtttcaagccccatatctgttctggagcggaagagtggagagctccacaaggtacaacttcacgctacctctgccatgcttcctgtcgctaccatggagaaggcaacgaaatgggagcctggggacataaagggaatggagtcacatgatgcgtatctgatagccagccagctaaatcttcttgatgaacagcaagacacagtgtatgttgctggcctccagatggagctccagcaagcacgtgataggataagtgagctggaaaccgagcggcggtcggctaggaagaagcttgatcacttgttcaagaaacttgcagaggagaaagcagcttggagaaacagagagcatgaaaaggtgcgtgctatcctcgaagatatgaaggcagaccttgaccatgagaagaaaaacaggaggcggctggagatgatcaacttgaaactcgtcaatgagctgaaggaggccaagatgtcagcaaaacagctgttacaagattatgagacagagaggaaggcgcgtgagctcaccgaggaggtatgcaacgagctagcaagagaggtgggggaagacaaagctgagattgaggccttgaaacgggactccctgaggttgcgagaggagctagacgaggaacggaagatgctccagatggctgaggtgtggcgtgaagaacgggtgcagatgaagctcgtcgatgcaaaacttactcttgacgccaaatacacacagctgagcagactgcaacatgttgttgaggcgtttattgccgcacgcagtactgcaaatggagacataacagtagtagaggaagcagagaacataattcaggcaatcaagtcagtcagagcccaaggcgctgaattcagatatgagccaccggcggcatcggaagacatattttccatctttgaagagctgcgtccaagtgaggagcctgtcattaaggagattgagccatgctacacgaatagctctgccaaatgtgaatcggaaattcaacaggttagcccaatgaccgatatattcctcgaaacgaaagccaaagtttactcaaacaaaagccctaaagatgaaagcgacgccgaagatggcagcagctgggagacaataagccatgaagacatgcggggttcgagcggttcgcctgatggaagcgaaccttcagtcagcaataagataagcatttcttggaacagcagaaatggtttcgagtacagggagaacgagaagctggaagatgacttagctgatgcctacctggcaagcatgaaccaacccaagaagaaagaatcggccatttcaaagctctggaagtcgtcccgcccaaagaacagtgaggtatgcaagaaagatgcagtcgttgaaacggtgaatgcaagaccgtctaatgcacggcactcagtggggacttattccactgttgaaagtggcatccaagaaactggactcagtccaccgagcgtcgagcagtggagctcgccggactcgatgaatatccaattcaaccggggcttcaagggctgtatagagtacccacggacgtcccagaagcacagtttgaaggcaaagctcatggaggcacggatggagagccagaagatccagctccgccaggtcctcaagcagaagatctagtgcaggccagaaccagaggacgaaatattgtaaacctagattttaatccaaggaataatggcaaggagtacctagatgcttcatttttttctcctgttttagagtaacctgtaatgcatgtacaacaagggctagagagaaaaaaaaggacagggatggccttggtgggctgtccggactccggagcctttgctgcttctgtatcttactttagttttggtgttatggtcggatctggtaggctatggtgagatctagcatgatgtataatacagacacaaacaagcagcaacgttgagacaaattgcatccctttgtaaacagttctccggtgttttccataaccattttttgtgtgtgaaactcttattataacgactccttattttcc

SEQ ID NO: 200444 - DNA, 327 bp, Zea Mays
gaagaagaagcgacgaacgccggcatgggcatcgagcagctgcagtacatcaggggcgagttcaggctttccgaccacaggcccgtctgcagcgtgttcgtgatcgaagccgatgtggataacgggagcaagatcagaaagggctactcgactctggacgctaggatccactgcgactcccccgcgatacccaagagacacagcttctatgacgacttctgaagttttgactcgtgatgatagagtaggttacaaagatcataaacgtttgtagcgaaaaggcccaagtttttgaagcctaacacttgtctttgtaccaagtggggc

SEQ ID NO: 200445 - DNA, 1791 bp, Zea Mays
ttcaggcagcagagcagagcaccgtgaccgtagcagtgacgcagaggtgttccgtgcttgacctgggattttgctattctgggctctgctcgtttactcaaatggaattggaaggaaatagcgaaagggcgctatgagttcagcgaatggtacaaccaatgtccatgggaaagaagcagcaccgtatgaggagcagctgttcaagattggtaaagttagaactgacctaggacaactatctggaaaatcagctctatattgctcagatgcttcaattgcaaggtacctgatagcaaggaactgggacataaggaaggctactaaaatgctgaagaaaaccttaaaatggcgttcagaatataagccagatgaaatccgttgggatgacatatctgatgaagcggtaactggaaaaacttaccgaactgattactttgacaagatcgggcggagtatccttgtcatgagacctggatgccagaataccaagaatgccaatgggcaagtcaagtacttggtgtactgtatggagaatgcaattctaaatctgccacatggtcaggatcagatggtttggctcattgattttgctggtttcaatttaggcaacttgtcaattcaggtgacaaagatgacggcagatgtcctacaaggccattatcctgaaaggttgggtgtggcaattctttttaacgctccaaagttttttgagcctttctggaagatggcaagcccccttcttgagaagaagaccagaaacaaggtcaaatttgtatactcagatagacctgacaccatgaagatcatggaagaccttttcaacatggatgagttagaatgtgcgtttggtggcaagaacccagctactttcaatataaatgattatgctgcgaggatgagagaagatgacaagaagatgccatcattttggagccctgagaattcagctcttgcttctgagccatatcagatgagcagccaaaaagccctaggaagcgtttcaggtgcgaagactgaagatgctggatctggaaagatggacgacatggagactgctcctgaaaagagtgaagaatcgggtactgaatctggagaggaggtacaaacacggactgaatcaagcacagttgagcagaaaaacttgcctggagaagataatgccccagcagataaaagtggcctttaatctgatctccgggtatcaccatgaaacataaatgtgaaacattgataggagctctaccacatttcactaaggtttgaacatgaaaggcgacgagaaactcttttaacacggcaaatcggcatgcctgacttgttttgtagtcggcacctatttctctgtcctcaagatcttatttggggaaccttttcatgacagaatgagatctaccagatggtaaagaactaataccatactgttaccctcagttttcatgacagaatatggtctggtgttcagtttctgatatgcccttgtattttcgctggaaaagaaaaatactattgtatctggagctgttgggttaataatatatcattgttcagtttgtattctgttcagtaaccaccattgactttcagttagtatagccccacttggtacaaagacaagtgttaggcttcaaaaacttgggccttttcgctacaaacgtttatgatctttgtaacctactctatcatcacgagtcaaaacttcagaagtcgtcatagaagctgtgtctcttgggtatcgcgggggagtcgcagtggatcctagcgtccagagtcgagtagccctttctgatcttg

SEQ ID NO: 200446 - DNA, 709 bp, Zea Mays
aaaatcaacaaagaactatttcctaatctctctttctcttctccaaaccggccgggtgtgctgaggggcaaaacctcgcctccccccaaccacggatcgcggctacgaactccggagccgagagctgatcacaatatacaggatgtgagatcaaaagtttttcccttcaaaaggaagaaggatctaaagaaaaaggagaaagaactccaggctatggaggccgagctaaacaaaagagaacgggagaagagtgtggttgaagtgactgggacctgggtaacactgccaatgctcacgctcaaatgaggtaaaccacgggaaaatgatctacttttgacatgatggtaccttggcatacaccaccaatccacaacttcagttcaaccctctgacttatcatccttgagcacttgaaactactacctaatcatattttcaaataaatcatcataccaagaccacgtgctgccacatatgtggcagccgtcatgggactcttgtcgctcttaaactctgcaagaacatagttcttttttgtttggagaaatatcaagatacgattcccatcaattagatcagacaatagcttactgagtctgtgggaaagaagcaaaaatcaactcgcaccatgtccatttgtaattggtattagtatagtgagtgaatgtaagagtttttagtcacaagagcatcaacctacataccttgg

SEQ ID NO: 200447 - DNA, 1575 bp, Zea Mays
cataacagagcgggacattgggaaaggcccacgacaacggcccgctccacctacttccaaacgaacaaaccctctcgaaaaccctctctcatattcaccccgccgccgcctcctcttccccttttcaacttcgccgaaaccctaaccctcccggcgaagtcgccatgtcgaacccgaagggctccaagatgctccagttcatcaactaccgcatgcgggtgacgatccaggacggccgccagctcgtgggcaagttcatggcgttcgaccgccacatgaacctcgtcctcggcgactgcgaggagttccgccgcctcccgccctccaagtcctccaaggccaccggcgaacgcgaggagcgccgcacgctcggcctcctcctgctccgcggcgaggaggtcgtctccatgaccgtcgaggggccgccgccgcccgacgagtcgcgcgccaaggccgcggcggcgggcggagccctcgccggccctggcgtcggccgcgccgctgggcgcggcgtgcccaccggcccgctgctccaggcagctcctggtcttgctggccctgtgcggggcgtgggtggacccgcccccggcatgatgcagccccagatctcgcgcccgccgatgcccaacctgtcggcccagccggtgtcgtacccgcaggtcgtgcgcccgccgcaggggatgcctccgccaatgcgtcctggaatgccgccgcagatgccgatgcaattccgcccgcctggggcgccgcctgctccgttccctggggcaccgccacaacagtacatgaggggaccgccgccgatggggccgccccaggtgaggcccgggatgccggggccgccaccgcctggaatgaggcctggaatgcctccgccaccattcggacagccgaggcctgggatgccgcctccgccacctggtccacagcagcctggacagaacccgccgcagtagcttccttgagatacccattgaactgttatgtactgtctttgaggacgcttactcagatgtactttgaggaagcctactcttggtcacttggtggcatttgtagcttatcttgcaatccagcagtttcatcaatcgctgaagctacatttgattattcgatccttactctgattaaaatcgaacatgttaggatgcagggataagcttcttgcagatacacctatggaagatttttgtatctcgagagaggatcataatcgcacctggggaggacctgtgaattgcaccaaagcttcaccattctgtctcgcatcagggcagtagtttcctttgggtattgtgacttgtgagggaggagaaccttgccagcgtgtgtaccactcatcctttgatgtgagaagggaccttgtacgtagagaggccaggacttgtattttaactgttggtgttggttatgttaggaaatatggataactggctgcagtcttgttacggtgttgattcatgctctgtttaagcccttgttttctctctctaaaaagtagtctcttgtgtttgttgatgaagcaagataattggtttagagaaaagtttatatatgcatataattattcatcca

SEQ ID NO: 200448 - DNA, 2501 bp, Zea Mays
aatagccaatatgttcagatgtctattcccgttcagcttgtagcagcttcctagtcctagggttagatttccaagcaccacgccacccgtacacggtttccagcagagcattccggaaggagggggcgcgatgtggcacgaggcgcggcggtcggagcggaaggtccacgacctcatggacgcggcccgccgccgggcgcagcgccgagccgtctacctcgcccgccgccgcggcgacccgcagcaggcgctccaggtctccggcacgcggtgccgcgttcaccgcgacgacgccctgtaccaggccaccgaggaccagcagggattgatacaatggaatggaaagcaagatgttttgattgacagatttgatggccgtgcattgcttgattttatccgagactcgagctctcgcccttttcgagtccaagggaaatctgaagaagaggaagagttagaggaatttgttaattttgaacgttaccgggatttgattaagcatcgtcgcagaggatcatgttgtgcaagagttggaggcaaaagctcttcttccttttagctttgacaaaccacaatcctcacagcctcctgctagcaaaggcgcatattcacaggttggatactcatacaagggagacggaaatgaggaatctgaagacctagacagtgatgacgacgacgaagaggaagaagttgatgatgatgacaaggacttcagtagtgatgatagcagtgatgaacgaatggaaagtatagcgaaagaatttgggataaaaagatataactggcttgtttacatggataaaaaaaacaaagaacaggagaagaggcagaaagaaattgttaaaggcgacccatctataaaaaaaatgagccgtagagaaagaaggaaggcttctcagattgagcgggaaaaggagcgggaggcagcacgttctgttggaagggtatcttatcgtgatccttatagggaacaaaggagaagcccatcatatgaagcatattcaaggggcagaagatcaagatcgagatcaagatctcgttcaccatcccattctaggcgtcatggccgtgggatacatgctgaaagcaattattggagcaagcaaaaggctcctagggttgaatatattactgaatttggaggttccgatgataccagtgaaccaaaagtttcagggatctctccgccttcgtctccaatacgaattgacatacctaaccggtcgggaaactcgacttttaatatttgcaaatatacattgggcgaacttttctctgatggagcttattacctcaatcctggtgttctgaagatgactatgtcaggaataggatagatcaagacatggtcatgatggtatctatggtgtaaaaaatagttgttttgtagataggcatgcattttatggttcgttttatttttgctaagcaggaagaagatttaacacacatatatctacagtcagctgtggagtttatgacctgtgcatctttgccatgtaaattattatggctataataccccatattttgcaggttgtctggtggtcaaattcttgaggcacttcacagtgatcctgcctcttctttgtctgtggaacaggaaagaactgcaaaacttttgaaaccttcccccaggtttgtcatgatgattacaatgttatgaagagagcggctgtatgtgcatccaagggtgtttgtctagaaccctttactttatttttcatgggctgtctcgacttgagcatgtctctgttacttagagaaccgtcttgtatttttcatcattactgacatgtgatttctgttaacagtacatcatcagcattagctaaactaagcaaggttgcttctgggggaactggtaaaactccccagactgaaaagaaagaaacaccacaagaaagacttaagaggataatgagcaaacagcttaacaagcaaattaaaaaggacacggctgctgagattgccaagaaacgagaacaggaacgacaaaggcaggaaaaacttgctgaagttggtcgatacaagcgtcgtagccgcagtagaagtcttagccgttccccaccaagcacagaaggcggcgatatagcagaagccgtagtaggagcagaagcccaagaaggtaccgatcccgctcgctctccagttcccggtcgccctctcgctctccaaggtaccgaagcaggtcaagacactgaaaatatccaggcagccactaacaaagtgccttgccatgttgtagttaatttattttatagactttttcattcctgcagcgatgtgtactcatgagaagcctccgtttttgttttcttagtcctattatcgacagtgtgtgttccttgtgtttcagaaggtttattctctgttcctcatggcttgcccctttcaagcaagcgtaattttagggcatgtttggccagaccagcttccaggccgaatttagtagtattgccaagcagttcttttattcagaacaactttgatcgaat

SEQ ID NO: 200449 - DNA, 5194 bp, Zea Mays
ccagcggcggcggccgaacctccccttgaaaccctccgacgaccggatcgactccgctccgctcaaatggagccgctgcctatccctcatcctccagcaccgcctcctgctctcacgtccgccctcgcccacctacgctcccttctctccgccgcatcctctgccctcgccgctctaccctctcctctccaaccgcacccgatcactcccatcgcttgtatcccttcacctcagtctaccaccacaaaacctccactcccgccgccggtcaccgctatcaacctcccgctcccagctgccccagctccctactccgactgccctgccgtcgtccgtttaaggccttccccaacctccacggccatctccctccccgccttcctcgctgccgtatgcgcagatttctcctcttccactaccggcccgagcccctcccatccgccccgcatcctgccatcggagctaagcctcctgcgccgggagttggactcctgggctacgggaggccaccacctcccggggtcgtactcctacgctgtagcccgggtaggggcctcgttctgctcggatgtgatgccacggtgggaggccgagctgcggcagtgggtgcttgagaactcaccgaggtacggggtcaaggtcaatgtcacggatgcggaccatatcttggtgctattatgtctcttgttgaaggcgatggcactggaggccaggtacttgctggaggggatgcagaatgtcgacaacgaggggctaggctttgatcccagggccatgaggtttgagtgccctaggctggtcgagggcgtctcgtggttaggcgcacagcttggggttctgtatggtgaaagcaatgggaaactatttatgcttgcatctgtgaaggaggctgtgctacagatggcatattgcttggctctctgtgcaggagatggtgctgcaagtgtaggagggagtgatgctggagatgttgtggcaggccctgtttttctttctcaggttgctgcttccattgtggcattgcatgagaggttctacttggagaagaccaaggcgttgcaagctcaacgcccgtcaaaatatcagctattacttgagtattcacaagcactggaacgagggattttggagcgatcaaacagaccaaactacagggctgttctggagtatgatgggattctgtcacggcgagtagagaacaaggaatctgctagagccaagacaaaggaggaacttttagctgaagaacgtgattacaaacggagaagaacatcttaccgtggcaagaaagtgaatagaaaccctacagagatactaagagacataattgatgaacatatggaggaaatcagacaggcaggtggcattggttgtcttgtggaagctcctgctgatattgcttggaatgagctgaagggcaactctcacagcggtgcatatcatggaagttatgattttgcaagcagctcttctcatgataagacagctttggcttctcggtcatctaactgtgacaactcatgtgctgaatctttgggaagattttcatcaaggagcagtgacacaagagattcatacaataactcagggtgcgaaactcatagaaaccattaccagtatatatctgagaaggaaatgggtggaatatagggtcagaaggtgaagtagatcaaatttactcttacccgcaagagaattacacacccaatggctataagtttaagaaggatgtctcaaaccaccgtgatgaatcaaatgattgtacatggccaatacagtcacaaagatcccctgtgacagaatattctcacttgccaggagaagggtgctttgatagaagtagagctagtcagaactcagaagtgacataaatcattatctataactcaagattaattcagtgatagatatgatccccaaagcgcatattctgatggagatcatccgacaaccatgcttggtgatgctactaaaggaaagcatgagatataccatgatgaagtacattgacatgcacattatgaaaggaagcgtgattataatcactgcagggcaatacagattattgttgcttcatatccagttctactttttttatttgtgcaattttaccctcatgtgttggcctgctttgtcactcggcgtgtatcaccacatgtccacaccctcgcacacactctggatgttgaagcgtagatatttggactggaccggactggcagctggaccggtgaaagactgaattagaaacgcttgcttcacttaaaagactgttcgtgcaattgaaccctagagcgtctccaatagttttttttcttctaaatttcgctctaaactatcatttagagtcatttgtataaaaaccactttttatatcttctcaatatccaatagcctttctataggttgtttgccctctagagagtcatttacattttctatatttggctagcgagaaacccggaatagaatatgactataattgatagccatttagataaattgttgaagggtattttttttaaaatctctatttatatagattaagaagaatatagagagccttttggagttgctcaagcttgtttgagagcaaagggattggagattagtcccttcatggcttattcggttattggtgaattgagtgggattggagtggattaaatcctctcctatacaaatttaaatatgaggagatttaatcctctcaatccatctcaaaccgaacatgcccttagggttgatttggtgaccagggaaattgagatttatggtggagaaattcacttgctagtcaattttgaataagaagggtattccttctccatgaaaccacttttatttccctggtcatcaaactagctctcaatctccaatcctcttgcttccaaatatgtcctaatagcttatttgggagcaagaataccggaggggttaaatccttttgctattcaaaatttagtccctcaaatccttttgctattcaagttaggaaatccaaatttccttcgaaattgaagtggaatgggtgggaaattagtttatttttctctcaatcctttataattttaagtgaattagagtttctaaactagccttaaaaacctgtcacgtcccaggaaaaaaatggtggcagttgactgcatagaagcggccctacagtctgctttgattggcgacacatgcttagactatccgcaaccgttccccctaaatttttctccctaaatgttactatgcagccacgtcagcaagattctctgccctatattcactcgtcccgcaaccgttccccctaaattttcccctatatatccctctactcattaaatatacatttccatataactaacataaccaactttattttgtatttattttatatgttttcatacgtccggcattgtgcgctcgttttataaaaatgaaaaaaatatttttatttgtttgttttcaataacggaaaatatgtaatacaacatttcagtttaaaattaatttcgtaatggaaaactttacttctcaatagtactccgtcataacaattttacaaatatttgtacgcaatatgatttaaccacgcttatggttcaatcatactcgttcagtcgtacacagcaagccatgcttgtcttcgaccgaaagccacgtttcacttatgttgtaagccaaggctggcttccgatgtaagccattgcttctccctgaagccaaatttctctcgtctatatatatgcaatgtttctcttcaaatatgtacttacatataccacttgttccacaagtaagccgttgctccaaatatctcccagtcgtagggaacatgattccgattcaagtgatagtgacgacgaaacacttctgcttgtcaatcttcttaccctcaacattgaggctagacgccttcatcgacgatggtccggattatctcgtcgcgtcattcgcagggatcattttgctggagaaaaccttatccaccatcactacttcgggcccaacccggtgtatccatcgcatgtgtttcgtagaaggtacgcacatcatgtaattctaataggttatgatatttccatagtatttaccacgatcctatgttattttctttaggtttcgcatgagtaggcctctgtttctccgcattttgcaaggacttcaacagtaggatacttactttacacaaagggttgacgcaacatgcatgccaggactcggtcccctacaaaaagtatgtgcggcaatgcgcatacttgcatatgggttaccttctgatgcggtagacgagtacgttcaaatcggggagtctacagctagggaaagtcttcatcatttttgtcgcgcaatcatagcatattttagtgcctggtatctacggactcctaatgaagctgacataacatgtatcatgcacagtagcgagtcaaggggttttcctggaatgttgagttccatagattgcatgcattgggagtggcagaactgtcctatatcctggcatggtcagttttgtggtagaaatggtagagcgtccatgatactagaggtggtagcaacttatgatctatggatttggcatgcattttttggcatgccagggacaaacaatgacgttaacgtgctgcaccgatcaccagtattcgaccctttgacaactggtcgaatgccaccagtgaattacacagtaaatggtcatgcttacaacttcagatattacttagctgatggtatttacccgaactggcctacttttgtgaaagctatcagacacccgtatgaggaaaagaaagtttatttcacacaaatgcaagagagttgtcgaaaagatattgagcgtgctttcggagttcttcaagcccggtgggcggtgctgcgtggtccagcatatggttgggatcgcaatcgtttaacagagataatcacagcttgcatcatcatgcacaatatgattgtggaagacgaaggcccttttgctgctaatactgatttcggagataacacttcaggcatagacgcatctcaaataattggagaaggaagggcgtaatgggtcattaaccactttgatcttcgtcgccaagataggtcgtgctcactccaaaatgatcttgtcgagcatttgtgggctcggcgtggcagcatgtaaacatgtcgtttcattcgtacgttgtttcaacttgaaataagttattgtaat

SEQ ID NO: 200450 - DNA, 5247 bp, Zea Mays
ctccgaccccgtaccagcggcggcggccgaacctccccttgaaaccctccgacgaccggatcgactccgctccgctcaaatggagccgctgcctatccctcatcctccagcaccgcctcctgctctcacgtccgccctcgcccacctacgctcccttctctccgccgcatcctctgccctcgccgctctaccctctcctctccaaccgcacccgatcactcccatcgcttgtatcccttcacctcagtctaccaccacaaaacctccactcccgccgccggtcaccgctatcaacctcccgctcccagctgccccagctccctactccgactgccctgccgtcgtccgtttaaggccttccccaacctccacggccatctccctccccgccttcctcgctgccgtatgcgcagatttctcctcttccactaccggcccgagcccctcccatccgccccgcatcctgccatcggagctaagcctcctgcgccgggagttggactcctgggctacgggaggccaccacctcccggggtcgtactcctacgctgtagcccgggtaggggcctcgttctgctcggatgtgatgccacggtgggaggccgagctgcggcagtgggtgcttgagaactcaccgaggagatggtgctgcaagtgtaggagggagtgatgctggagatgttgtggcaggccctgtttttctttctcaggttgctgcttccattgtggcattgcatgagaggttctacttggagaagaccaaggcgttgcaagctcaacgcccgtcaaaatatcagctattacttgagtattcacaagcactggaacgagggattttggagcgatcaaacagaccaaactacagggctgttctggagtatgatgggattctgtcacggcgagtagagaacaaggaatctgctagagccaagacaaaggaggaacttttagctgaagaacgtgattacaaacggagaagaacatcttaccgtggcaagaaagtgaatagaaaccctacagagatactaagagacataattgatgaacatatggaggaaatcagacaggcaggtggcattggttgtcttgtggaagctcctgctgatattgcttggaatgagctgaagggcaactctcacagcggtgcatatcatggaagttatgattttgcaagcagctcttctcatgataagacagctttggcttctcggtcatctaactgtgacaactcatgtgctgaatctttgggaagattttcatcaaggagcagtgacacaagagattcatacaataactcagggtgcgaaactcatagaaaccattaccagtatatatctgagaaggaaatgggtggaatatagggtcagaaggtgaagtagatcaaatttactcttacccgcaagagaattacacacccaatggctataagtttaagaaggatgtctcaaaccaccgtgatgaatcaaatgattgtacatggccaatacagtcacaaagatcccctgtgacagaatattctcacttgccaggagaagggtgctttgatagaagtagagctagtcagaactcagaagtgacataaatcattatctataactcaagattaattcagtgatagatatgatccccaaagcgcatattctgatggagatcatccgacaaccatgcttggtgatgctactaaaggaaagcatgagatataccatgatgaagtacattgacatgcacattatgaaaggaagcgtgattataatcactgcagggcaatacagattattgttgcttcatatccagtagctaaataataagggctctgtggtattagccttccgccgtatccttttacgtatccttattcagctttatgatgtccttgcattcggagttaatacctgttacagttggatctgttaggttaatttttttttcttgctataccaattcatttacaatgatccaggttcttgctgtgctgatattttagccatttcaccgttaatgttttggaaacactttcagctagcattcaagtttttttaaaaataatttattcttgatttttactcagtacgaactgacagaaatttcagcggtctgttcgcttcaatcgatcacattgagttcttttttctgcagttctactttttttatttgtgcaattttaccctcatgtgttggcctgctttgtcactcggcgtgtatcaccacatgtccacaccctcgcacacactctggatgttgaagcgtagatatttggactggaccggactggcagctggaccggtgaaagactgaattagaaacgcttgcttcacttaaaagactgttcgtgcaattgaaccctagagcgtctccaatagttttttttcttctaaatttcgctctaaactatcatttagagtcatttgtataaaaaccactttttatatcttctcaatatccaatagcctttctataggttgtttgccctctagagagtcatttacattttctatatttggctagcgagaaacccggaatagaatatgactataattgatagccatttagataaattgttgaagggtattttttttaaaatctctatttatatagattaagaagaatatagagagccttttggagttgctcaagcttgtttgagagcaaagggattggagattagtcccttcatggcttattcggttattggtgaattgagtgggattggagtggattaaatcctctcctatacaaatttaaatatgaggagatttaatcctctcaatccatctcaaaccgaacatgcccttagggttgatttggtgaccagggaaattgagatttatggtggagaaattcacttgctagtcaattttgaataagaagggtattccttctccatgaaaccacttttatttccctggtcatcaaactagctctcaatctccaatcctcttgcttccaaatatgtcctaatagcttatttgggagcaagaataccggaggggttaaatccttttgctattcaaaatttagtccctcaaatccttttgctattcaagttaggaaatccaaatttccttcgaaattgaagtggaatgggtgggaaattagtttatttttctctcaatcctttataattttaagtgaattagagtttctaaactagccttaaaaacctgtcacgtcccaggaaaaaaatggtggcagttgactgcatagaagcggccctacagtctgctttgattggcgacacatgcttagactatccgcaaccgttccccctaaatttttctccctaaatgttactatgcagccacgtcagcaagattctctgccctatattcactcgtcccgcaaccgttccccctaaattttcccctatatatccctctactcattaaatatacatttccatataactaacataaccaactttattttgtatttattttatatgttttcatacgtccggcattgtgcgctcgttttataaaaatgaaaaaaatatttttatttgtttgttttcaataacggaaaatatgtaatacaacatttcagtttaaaattaatttcgtaatggaaaactttacttctcaatagtactccgtcataacaattttacaaatatttgtacgcaatatgatttaaccacgcttatggttcaatcatactcgttcagtcgtacacagcaagccatgcttgtcttcgaccgaaagccacgtttcacttatgttgtaagccaaggctggcttccgatgtaagccattgcttctccctgaagccaaatttctctcgtctatatatatgcaatgtttctcttcaaatatgtacttacatataccacttgttccacaagtaagccgttgctccaaatatctcccagtcgtagggaacatgattccgattcaagtgatagtgacgacgaaacacttctgcttgtcaatcttcttaccctcaacattgaggctagacgccttcatcgacgatggtccggattatctcgtcgcgtcattcgcagggatcattttgctggagaaaaccttatccaccatcactacttcgggcccaacccggtgtatccatcgcatgtgtttcgtagaaggtacgcacatcatgtaattctaataggttatgatatttccatagtatttaccacgatcctatgttattttctttaggtttcgcatgagtaggcctctgtttctccgcattttgcaaggacttcaacagtaggatacttactttacacaaagggttgacgcaacatgcatgccaggactcggtcccctacaaaaagtatgtgcggcaatgcgcatacttgcatatgggttaccttctgatgcggtagacgagtacgttcaaatcggggagtctacagctagggaaagtcttcatcatttttgtcgcgcaatcatagcatattttagtgcctggtatctacggactcctaatgaagctgacataacatgtatcatgcacagtagcgagtcaaggggttttcctggaatgttgagttccatagattgcatgcattgggagtggcagaactgtcctatatcctggcatggtcagttttgtggtagaaatggtagagcgtccatgatactagaggtggtagcaacttatgatctatggatttggcatgcattttttggcatgccagggacaaacaatgacgttaacgtgctgcaccgatcaccagtattcgaccctttgacaactggtcgaatgccaccagtgaattacacagtaaatggtcatgcttacaacttcagatattacttagctgatggtatttacccgaactggcctacttttgtgaaagctatcagacacccgtatgaggaaaagaaagtttatttcacacaaatgcaagagagttgtcgaaaagatattgagcgtgctttcggagttcttcaagcccggtgggcggtgctgcgtggtccagcatatggttgggatcgcaatcgtttaacagagataatcacagcttgcatcatcatgcacaatatgattgtggaagacgaaggcccttttgctgctaatactgatttcggagataacacttcaggcatagacgcatctcaaataattggagaaggaagggcgtaatgggtcattaaccactttgatcttcgtcgccaagataggtcgtgctcactccaaaatgatcttgtcgagcatttgtgggctcggcgtggcagcatgtaaacatgtcgtttcattcgtacgttgtttcaacttgaaataagttattgtaat

SEQ ID NO: 200451 - DNA, 915 bp, Zea Mays
gcaggtgtttgaatactattaatagcaaaaaatatggggttggacttgtgtgcttcactgataacccatctattgtcttatattcatcgaacaatggctgggatgaatctctgcgtctgctctcaatgaatgataaccggtttattagatattataaaggtcaccttgatagggttgtctgcatcgcactttgctctggaaaagaaaactttctctcatgttcgcttgatcgtaccattctcttatgggaccatcgggctgaaaaaccgcagggcttactgcgcgcgcaaaggaggcctacagtttcgtacgacgcccagggcatggggccttttgcgaccttctctgtcggcactgatgattcggaagcccatgtcgtacagttcagcggtgatggcaggcggattctgttaaccactaaagctgggcgtgttcatgtgctagattcttttgaaggcaacagcattgcatcgtttcgcgcgaagccaatattaaccaattcgacactggaggcatcgttctgtcccgagggaaaccatatcgtatctggctccggtgatggtagtgtctatgcttggaacgttgagagcggaaaggttgcatgctgggaaagcacagatgtgaaaccgccgcgggtaaggtggtctccaggatccttgatgttcgtgacaggaacgtcggagctgtcctgctgggtgccggatttgtccaagctggagtccttcaccatcagccacaccaacaccaggtccagctcgtccctgtaggcttggaccgatttgcatgccgtgtggccggttgacgcgaaggaggaacaagaaagcatagcggagcatcttgtaccaattgagtttgtgatctgttcctgatggcccggtaagctactattgcaacgattgtggtctgcggcaacgg

SEQ ID NO: 200452 - DNA, 1168 bp, Zea Mays
gcagatgcccgctagtccctcgctttctctcttccacccgctcctcacgccgccacagcgccactgctccttcggcctagttgaggagagatacatccatcctggcctggattggctggtgctggtccttctgctgaatggcagaatttgttctatggactttcacagcaaggctaccaactatctcgtgacagctagcgatgatgaatcaatccgtttatacgatacccaagatgcagtgtgtttgaatactattaatagcaaaaaatatggggttggacttgtgtgcttcactgataacccatctattgtcttatattcatcgaacaatggctgggatgaatctctgcgtctgctctcaatgaatgataaccggtttattagatattataaaggtcaccttgatagggttgtctgcatcgcactttgctctggaaaagaaaactttctctcatgttcgcttgatcgtaccattctcttatgggaccatcgggctgaaaaaccgcagggcttactgcgcgcgcaaaggaggcctacagtttcgtacgacgcccagggcatggtatttgctgtcgcctatggtggccgcataaagatgtttgatattcggaaattcggaatgcccatgtcgtacagttcagcggtgatggcaggcggattctgttaaccactaaagctgggcgtgttcatgtgctagattcttttgaaggcaacagcattgcatcgtttcgcgcgaagccaatattaaccaattcgacactggaggcatcgttctgtcccgagggaaaccatatcgtatctggctccggtgatggtagtgtctatgcttggaacgttgagagcggaaaggttgcatgctgggaaagcacagatgtgaaaccgccgcgggtaaggtggtctccaggatccttgatgttcgtgacaggaacgtcggagctgtcctgctgggtgccggatttgtccaagctggagtccttcaccatcagccacaccaacaccaggtccagctcgtccctgtaggcttggaccgatttgcatgccgtgtggccggttgacgcgaaggaggaacaagaaagcatagcggagcatcttgtaccaattgagtttgtgatctgttcctgatggcccggtaagctactattgcaacgattgtggtctgcggcaacgg

SEQ ID NO: 200453 - DNA, 1218 bp, Zea Mays
gcagatgcccgctagtccctcgctttctctcttccacccgctcctcacgccgccacagcgccactgctccttcggcctagttgaggagagatacatccatcctggcctggattggctggtgctggtccttctgctgaatggcagaatttgttctatggactttcacagcaaggctaccaactatctcgtgacagctagcgatgatgaatcaatccgtttatacgatacccaagatgcagtttttcaggtgtttgaatactattaatagcaaaaaatatggggttggacttgtgtgcttcactgataacccatctattgtcttatattcatcgaacaatggctgggatgaatctctgcgtctgctctcaatgaatgataaccggtttattagatattataaaggtcaccttgatagggttgtctgcatcgcactttgctctggaaaagaaaactttctctcatgttcgcttgatcgtaccattctcttatgggaccatcgggctgaaaaaccgcagggcttactgcgcgcgcaaaggaggcctacagtttcgtacgacgcccagggcatggtatttgctgtcgcctatggtggccgcataaagatgtttgatattcggaaattcggaatggggccttttgcgaccttctctgtcggcactgatgattcggaagcccatgtcgtacagttcagcggtgatggcaggcggattctgttaaccactaaagctgggcgtgttcatgtgctagattcttttgaaggcaacagcattgcatcgtttcgcgcgaagccaatattaaccaattcgacactggaggcatcgttctgtcccgagggaaaccatatcgtatctggctccggtgatggtagtgtctatgcttggaacgttgagagcggaaaggttgcatgctgggaaagcacagatgtgaaaccgccgcgggtaaggtggtctccaggatccttgatgttcgtgacaggaacgtcggagctgtcctgctgggtgccggatttgtccaagctggagtccttcaccatcagccacaccaacaccaggtccagctcgtccctgtaggcttggaccgatttgcatgccgtgtggccggttgacgcgaaggaggaacaagaaagcatagcggagcatcttgtaccaattgagtttgtgatctgttcctgatggcccggtaagctactattgcaacgattgtggtctgcggcaacgg

SEQ ID NO: 200454 - DNA, 1391 bp, Zea Mays
gcggctgaaccagtgccagtcccacccgttcccagaccagcctcacgcgctcaccgtgctgcctccaccaccgatggctctccctcccggcgcaggggcggtggcgccggcgacgcccttcgccgcgaatccgtgccgtctccggcgggcgtctggtcctcctgccgccgcccttcggctcgggccgctcttctggccatgggaaaaggtgaaaatcggtcccctttctgtttcccccatgggttttggaacatgggcatggggaaaccagctactttggggctatcaagaaagcatggacaacgaacttcaggattgcttcaatctggctctaaggaatggcataaacctttttgacactgctgactcttacggaactggaaggctgaacggacagagcgaacggctactcggtaaattcatccttgagtttgaagggaggattaaatctccagatgatgtggtcatagcaactaagtttgctgcatatccttggcgacttacatcggggcagtttgtcagcgcctgtcttctttggaaagattacaacttgataggctcgggatagggcagctgcattggtctactgctaactatgcacccttgcaggagcgtgccctctgggatggactagttgaaatgtatgaaaagggccttgtaagtgctgtcggtgtcagcaattacgggccgaagcagcttctgaagatccacagctatctagcttctagaggagttcccttgagctcagctcaggttcagttctcgttactgagcatgggtgacgatcagatggagctgaaaagtgtgtgtgattcattgggcattcgcatcatcgcatatagcccgcttggattaggaatgctcactgggaagtatggtgcttctaacctcccaaaaggaccaaggtcagtgctgttccgacaaatccttcctgggctggagcctctgctgtcttgcctgagaaggattgccgaaaagaaggggaagaccatgcctcaggtggccatcaactggtgcatgtgcaagggcacagttcctatcccaggcgtcaaaacggtgaggcatgtccaggagaacctgggcgcgctcggctggaggctgagttctgccgagatctcggagctcgagtccgcagcgatggcggctccgaggaagatgatccagaatgtcttccagactgcctgaccgtgctgaatacatgtgtgtgtatgcatgtttctgcaatcgtctttactgaaaaatctgaaaccgggcagccgtgaaccttttcttctcgtaagattcataatatagatagtcactgccatgttctattagttgtcgtttttgacaaagtttaaataaaacttataaaattttgactataaataaatgttttattatttagtttg

SEQ ID NO: 200455 - DNA, 1195 bp, Zea Mays
gcggctgaaccagtgccagtcccacccgttcccagaccagcctcacgcgctcaccgtgctgcctccaccaccgatggctctccctcccggcgcaggggcggtggcgccggcgacgcccttcgccgcgaatccgtgccgtctccggcgggcgtctggtcctcctgccgccgcccttcggctcgggccgctcttctggccatgggaaaaggtgaaaatcggtcccctttctgtttcccccatgggttttggaacatgggcatggggaaaccagctactttggggctatcaagaaagcatggacaacgaacttcaggattgcttcaatctggctctaaggaatggcataaacctttttgacactgctgactcttacggaactggaaggctgaacggacagagcgaacggctactcggtaaattcatccttgagtttgaagggaggattaaatctccagatgatgtggtcatagcaactaagtttgctgcatatccttggcgacttacatcggggcagtttgtcagcgcctgcaagtattctcccgatttgtttgtttcatgttcagttctcgttactgagcatgggtgacgatcagatggagctgaaaagtgtgtgtgattcattgggcattcgcatcatcgcatatagcccgcttggattaggaatgctcactgggaagtatggtgcttctaacctcccaaaaggaccaaggtcagtgctgttccgacaaatccttcctgggctggagcctctgctgtcttgcctgagaaggattgccgaaaagaaggggaagaccatgcctcaggtggccatcaactggtgcatgtgcaagggcacagttcctatcccaggcgtcaaaacggtgaggcatgtccaggagaacctgggcgcgctcggctggaggctgagttctgccgagatctcggagctcgagtccgcagcgatggcggctccgaggaagatgatccagaatgtcttccagactgcctgaccgtgctgaatacatgtgtgtgtatgcatgtttctgcaatcgtctttactgaaaaatctgaaaccgggcagccgtgaaccttttcttctcgtaagattcataatatagatagtcactgccatgttctattagttgtcgtttttgacaaagtttaaataaaacttataaaattttgactataaataaatgttttattatttagtttg

SEQ ID NO: 200456 - DNA, 700 bp, Zea Mays
ctgacttccagatttttgacgtcctgtacaagattgctgatattccgttcttggcaccctacaagaccaagattattgatgttatcgagaagggagagaagcagcccaacatcactattggcattttggtctccgttgtcatcgtgttcgttaccgttctcttcaagatcctttttggtggcaagaagccggtggcacctgtgaaacctgcagctgaggcgaagaagcccaaggccgcggagacggacggtgctggaagcagtggtgacaaggatgagaaagaggatgaaaaggacgagacaggcccacgtcggaggacccgaagggagacatagacctgtttttgacgtgttttagctcttctggcgtctgcttattttgagaactcttaatatttgtgagtgtataataggagcttatgtcacctctgcggcttcccccgctgctgatttgtttttaatggttagaccaggacccttcacgagcgtagaatttagttcttgttggtcatttatgtgctgtgcctgacggtgttcaatcagatagaggtgatggtttttttggtagatcaaatcaaggaatatttcatatgcctttttggcaactgtttcagttgggtgaatgcctggttaagctttcgcttgtgtttcggaatgttgctggctcaccatttggttcgaccataacttgtggcgctggg

SEQ ID NO: 200457 - DNA, 2173 bp, Zea Mays
ggtgcctgttagttttttctcatttgctatttatctgtgaacactgttgtcaagttcaatatgaatctatagttctatacagcctttgtacactaaacacggccattgtttgactatttgttagtcaaattttgcaaagttacattttctgaaacagcatgttctatacctttgtgtatggagggagtagtatcttggtactgtaatgccacttcaaacagtatttctatatgcaatcgttattttaaactagttacctgccactgtttgaatgttgttgttactagtcctttctgtttcatttttctttgtctatttcatagcttaatgcctacatactctggtttgtaggtgtatggaagcatgccaagagtgatgggcatgaggactatggtctccttgttagtgacaaagcaaggaaatacgccataatcaaggagcttgatgagccagttaccttaaatgatgggacagtggtcctgcagtttgaagtgagacttcagaatggccttgaatgtggaggtgcctacattaagtacatccgccctcaggatgctggatgggatgccaaggagtttgataatgagactccatacactattatgtttggtccagataaatgtgggtcaaccaacaaggttcatttcatccttaagcacaagaatcctaagactggaaagtatgttgagcatcacctcaaattcccaccttctgtcccatacgacaagctctctcatgtctacacagctatcttgaagccagacaatgaggtcagaattttgatcgatggggaagaaaagaagaaggcaaacttcctttctgctgatgactttgagccagcacttatcccatccaagaccattcctgaccctgatgacaagaagccggaggactgggatgagagagctaaaatccctgatccagatgcagtgaagcctgatgattgggatgaggatgcccccatggaaattgtggatgaggaagccaccaagcctgagggatggttggatgatgaacccgaggagattgatgatcctgaggcagccaagcccgaggactgggacgatgaagaggatggtgaatgggaggcaccaaagattgacaaccccaagtgtgaagaggcacctggatgtggcgagtggaagaggccgatgaagcagaatcctgcttacaaaggcaagtggcatgcacctatgattgacaaccccaactacaagggaatctggaagcctcaggagatacccaaccctgagtactttgagcttgacaggcctgattttgatccaattgctgctattgggattgagatctggacaatgcaggatggcatcctgttcgacaatatcttgattgctgatgatgagaaagttgccacctccattctggagaagacatggaagcccaagtatgatgttgagaaggaaaaggagaaggctgaggaggctgctgctggtgcagatggtctttctgacttccagaagaagatttttgacgtcctgtacaagattgctgatattccgttcttggcaccctacaagaccaagattattgatgttatcgagaagggagagaagcagcccaacatcactattggcattttggtctccgttgtcatcgtgttcgttaccgttctcttcaagatcctttttggtggcaagaagccggtggcacctgtgaaacctgcagctgaggcgaagaagcccaaggccgcggagacggacggtgctggaagcagtggtgacaaggatgagaaagaggatgaaaaggacgagacaggcccacgtcggaggacccgaagggagacatagacctgtttttgacgtgttttagctcttctggcgtctgcttattttgagaactcttaatatttgtgagtgtataataggagcttatgtcacctctgcggcttcccccgctgctgatttgtttttaatggttagaccaggacccttcacgagcgtagaatttagttcttgttggtcatttatgtgctgtgcctgacggtgttcaatcagatagaggtgatggtttttttggtagatcaaatcaaggaatatttcatatgcctttttggcaactgtttcagttgggtgaatgcctggttaagctttcgcttgtgtttcggaatgttgctggctcaccatttggttcgaccataacttgtggcgctggg

SEQ ID NO: 200458 - DNA, 684 bp, Zea Mays
cctatacaggcgaaactagagccactttaccagatcaggcacgttcaagcttaccttgcagtttacagaagattacccaaacaagccaccaactgttcggttcgtctctaggatgtttcatccaaacatatatgctgatggaagcatctgcttggatatcctacagaaccagtggagtcctatatatgatgttgctgcaatcttgacttctattcagtccctgctgtgtgatccaaacccgaactcccctgcaaactcagaagccgcaagactgttcagcgagaacaagcgggagtacaaccgcaaagtccgcgagattgtggagcagagctggacagccgactagtgcaggaggatgctcatcgtgcccgaaagggcacaataaggaaccatgaaaaaacatccttgtgtttgtggttcgccagacctgtcgaaacattgaagaactctagttctagtctgtcgttgtcatggttttggtctgatccagagcaccggttgctcatggtggtggctgtcgtaatgtagcggttgttgttgacatatatcttcttaaaatgatcctgcttgtgtacaaaaactatagcgtgggaatggtggttcgatggaccgatggaaccatgttcttgcattgaggtttcacaaagtctaaatggcttctttctttcttttttttattaaggt

SEQ ID NO: 200459 - DNA, 494 bp, Zea Mays
tggttagctaatttcgagcatattacagtatgcttgtgctgaagaggcatacaagagtggagaactgcaggaaactctagagaaagcaatgtgctcatagagaaaagaaattagaaccaggagtgcacgacatacagttaatcaaaatgttatagtatttgctgtacaattcaggcaatgttaagctggagataccaaagttgtaggcaatccatgtccaaatgctcagtgcacttggtttggaacacatttgttttctgcaatttgtgattaatcatccagctttaacccagatggtatgctaccagattgcagcagatgcagcaaacagcctagcaccctgctactgctttaataaatcctgcctggagtcattaaatcagttttgcaaacatacaaatgtacatgaaacttggggtttctgaaaggtttttatcctccagtgtagccattgacaatgctcgacttcctaagaacccgcaacatgttgagag

SEQ ID NO: 200460 - DNA, 1480 bp, Zea Mays
ggctggtccaacgcagccaggatgcgacaatgcgaggcaggctgcttcatgcgtgaaaccaatcgtttcttcggcccggcacatgcaagcagccatgggcgagaaagaataggaccgccgccgccgctttgtccctccgttcacaaccttgtcgcacgagtctcttattcggttttggccataactacatcacacatcacaccacatgagccggaaagtcattgaaaccctcttattaaaaaaaactgaagcaatgttgccaccaccgccatgccattgccgccacagccagtccgtcgctcttgccctatcctgttagccgtcaacgacacctgtggtgtgacgaggatgacatcaacatgtgcggcaagggtaccgtctctgcggtgggcgccacaacgtggctgggtgggttcgtgggtttcagtacgcccagcgaaatgcaggacatcgggaggacatgccgttgtgtgcgctgctgttagcttcagaccatgcattgacattcacaagggaaaagttaaacagattgttggctctactcttcgggatttagcaaatgatagcatggaacttgtgacaaactttgaatcagacaaatctcctgcagaatttgctaaattttataaagcagatgaacttctaggaggacatgttataatgcttggcgcaaatccttcaagccaggctgctgcactggaggcactacgtgcatatcctggtggtttgcaagttggaggtgggataaatttggagaatgcaatgtcttaccttaatgaaggggccagtcatgtgatagtgacctcttatgtgtttagtgatggcaagatgaacactgaaaggttaagaaaacttgtcgagctggttgggaaacagaggctcgtgctggacctcagttgtcgaaaaaaggatggccgatataccattgtaactgacaggtggcaaaagttcagtgatgtgtttgtggatgaaccaacattagaatatctcgctgcctttgcagatgagtttttggttcatggtgttgatgtggagggcaaaaggttaggaattgatgaggaacttgtggaactattggggcactattcaccaatcccagtcacttatgctgggggtgtgtcaacaatggacgacctagagaggataaagaaagcaggcaaaagtcgggtagatgtaacaattgggagtgctctagatatatttggaggagatttgccttacaaagatgttgtcctttggcacaggaagcaaagtatggttggtcaagtgtgaagaaacacaagggttggcgctaactcaaaaggtggtcaatttgtgagtaatgtactgttcttgacagtttctgacctcgatttgtctattgtaactgaataggctgaattgatgctgatagatacattttgcctgctacaacactgacattctgatttttaagttcctcgtttgagaaaataataatattgatgcaaattttggctct

SEQ ID NO: 200461 - DNA, 2909 bp, Zea Mays
gtccaacgcagccaggatgcgacaatgcgaggcaggctgcttcatgcgtgaaaccaatcgtttcttcggcccggcacatgcaagcagccatgggcgagaaagaataggaccgccgccgccgctttgtccctccgttcacaaccttgtcgcacgagtctcttattcggtgagttcttcgcttctcctctcctctcttctctcgctcccccctcccctctctctatcacacacacagttccctctctatggtcagtcccatccggtcctctttctgggcttcaaatctctctttgttgttgcaatcggtattcgatttgctgctggattgcaaccgttgtttggaaaaaaaaacaaatattccccccaaatccatttccttcactgtgtattattttgcaccaaactgtaaatttgtcatctttctctttgtcaaatatgcattataggcttggatttgatctgttgcagcaactggacctgttttgtttaacaaatttaaatatcctgcatggagatagtggaaagggtattatgcagactttggaaagggaaggcgttatcagtgatctattattcagttgttagcttggctctttgggcatgtaagctgaatgtacgggatttttggtacccttgaacaagttgactcctgctgttttttgtcgaacagtggtgcttcttgatctgtaaaccatgttaacttcatctttatgcaatattgtggactaggactagcccctttaactcttcaaataaaaggtctacttgtgatctaatgttgctatactcaagtgatttgttattgccgtgtactcctgtgatttgctgaaagttttagttgtgttcaaactcatgttgtcacttcattcataaaaagatcaaagcagtggtaacttcaccaaaatgagaaatagtgatcaaaccaaagtgagtgcagccttccaaacacagagttcagcactgacatatgcagtccaagccagtggcggacccagaaagtttcaaaagcctgggcaaagattacaaaagctgaggcttgcccaattgttatgtatcctgaaacgtattttactcctaaattatgtatacatgtctataacttacaacacgggagcctgggcagccgcccggggtcgccgggcggtgagtcggccactggtccaagccacaacctagacaaccaatcaccagcacaatgcagcctggctcagcaatactagcaaaccaaacatgattgcctgcattcacacaagctggccacgcttggcctggttctactccccagccacactcaaccaatcaggcccattctgaatgagccagtgctgcttctcttccccacgacacatgaataataaactcgtgaaacatgttttagtcgtccgatccatcttctggtgcatcttgactgttcatattaacaccttaccccatacttcggacttcggagtccccttaggttttggccataactacatcacacatcacaccacatgagccggaaagtcattgaaaccctcttattaaaaaaaactgaagcaatgttgccaccaccgccatgccattgccgccacagccagtccgtcgctcttgccctatcctgttagccgtcaacgacacctgtggtgtgacgaggatgacatcaacatgtgcggcaagggtaccgtctctgcggtgggcgccacaacgtggctgggtgggttcgtgggtttcagtacgcccagcgaaatgcaggacatcgggaggacatgccgttgtgtgcgctgctgttagcttcagaccatgcattgacattcacaagggaaaagttaaacagattgttggctctactcttcgggatttagcaaatgatagcatggaacttgtgacaaactttgaatcagacaaatctcctgcagaatttgctaaattttataaagcagatgaacttctaggaggacatgttataatgcttggcgcaaatccttcaagccaggctgctgcactggaggcactacgtgcatatcctggtggtttgcaagttggaggtgggataaatttggagaatgcaatgtcttaccttaatgaaggggccagtcatgtgatagtgacctcttatgtgtttagtgatggcaagatgaacactgaaaggttaagaaaacttgtcgagctggttgggaaacagaggctcgtgctggacctcagttgtcgaaaaaaggatggccgatataccattgtaactgacaggtggcaaaagttcagtgatgtgtttgtggatgaaccaacattagaatatctcgctgcctttgcagatgagtttttggttcatggtgttgatgtggagggcaaaaggttaggaattgatgaggaacttgtggaactattggggcactattcaccaatcccagtcacttatgctgggggtgtgtcaacaatggacgacctagagaggataaagaaagcaggcaaaagtcgggtagatgtaacaattgggagtgctctagatatatttggaggagatttgccttacaaagatgttgtcctttggcacaggaagcaaagtatggttggtcaagtgtgaagaaacacaagttaggctatctccaacagatcctctatctcatctcctatttcaaactattttgcgtcccctattttacactacactggagacagtcttcagtgatgtaattcaaatctgaggagcatgacttgtttgggtttggacaccagggttggcgctaactcaaaaggtggtcaatttgtgagtaatgtactgttcttgacagtttctgacctcgatttgtctattgtaactgaataggctgaattgatgctgatagatacattttgcctgctacaacactgacattctgatttttaagttcctcgtttgagaaaataataatattgatgcaaattttggctct

SEQ ID NO: 200462 - DNA, 2891 bp, Zea Mays
gtccaacgcagccaggatgcgacaatgcgaggcaggctgcttcatgcgtgaaaccaatcgtttcttcggcccggcacatgcaagcagccatgggcgagaaagaataggaccgccgccgccgctttgtccctccgttcacaaccttgtcgcacgagtctcttattcggtgagttcttcgcttctcctctcctctcttctctcgctcccccctcccctctctctatcacacacacagttccctctctatggtcagtcccatccggtcctctttctgggcttcaaatctctctttgttgttgcaatcggtattcgatttgctgctggattgcaaccgttgtttggaaaaaaaaacaaatattccccccaaatccatttccttcactgtgtattattttgcaccaaactgtaaatttgtcatctttctctttgtcaaatatgcattataggcttggatttgatctgttgcagcaactggacctgttttgtttaacaaatttaaatatcctgcatggagatagtggaaagggtattatgcagactttggaaagggaaggcgttatcagtgatctattattcagttgttagcttggctctttgggcatgtaagctgaatgtacgggatttttggtacccttgaacaagttgactcctgctgttttttgtcgaacagtggtgcttcttgatctgtaaaccatgttaacttcatctttatgcaatattgtggactaggactagcccctttaactcttcaaataaaaggtctacttgtgatctaatgttgctatactcaagtgatttgttattgccgtgtactcctgtgatttgctgaaagttttagttgtgttcaaactcatgttgtcacttcattcataaaaagatcaaagcagtggtaacttcaccaaaatgagaaatagtgatcaaaccaaagtgagtgcagccttccaaacacagagttcagcactgacatatgcagtccaagccagtggcggacccagaaagtttcaaaagcctgggcaaagattacaaaagctgaggcttgcccaattgttatgtatcctgaaacgtattttactcctaaattatgtatacatgtctataacttacaacacgggagcctgggcagccgcccggggtcgccgggcggtgagtcggccactggtccaagccacaacctagacaaccaatcaccagcacaatgcagcctggctcagcaatactagcaaaccaaacatgattgcctgcattcacacaagctggccacgcttggcctggttctactccccagccacactcaaccaatcaggcccattctgaatgagccagtgctgcttctcttccccacgacacatgaataataaactcgtgaaacatgttttagtcgtccgatccatcttctggtgcatcttgactgttcatattaacaccttaccccatacttcggacttcggagtccccttaggttttggccataactacatcacacatcacaccacatgagccggaaagtcattgaaaccctcttattaaaaaaaactgaagcaatgttgccaccaccgccatgccattgccgccacagccagtccgtcgctcttgccctatcctgttagccgtcaacgacacctgtggtgtgacgaggatgacatcaacatgtgcggcaagggtaccgtctctgcggtgggcgccacaacgtggctgggtgggttcgtgggtttcagtacgcccagcgaaatgcaggacatcgggaggacatgccgttgtgtgcgctgctgttagcttcagaccatgcattgacattcacaagggaaaagttaaacagattgttggctctactcttcgggatttagcaaatgatagcatggaacttgtgacaaactttgaatcagacaaatctcctgcagaatttgctaaattttataaagcagatgaacttctaggaggacatgttataatgcttggcgcaaatccttcaagccaggctgctgcactggaggcactacgtgcatatcctggtggtttgcaagttggaggtgggataaatttggagaatgcaatgtcttaccttaatgaaggggccagtcatgtgatagtgacctcttatgtgtttagtgatggcaagatgaacactgaaaggttaagaaaacttgtcgagctggttgggaaacagaggctcgtgctggacctcagttgtcgaaaaaaggatggccgatataccattgtaactgacaggtggcaaaagttcagtgatgtgtttgtggatgaaccaacattagaatatctcgctgcctttgcagatgagtttttggttcatggtgttgatgtggagggcaaaaggttaggaattgatgaggaacttgtggaactattggggcactattcaccaatcccagtcacttatgctgggggtgtgtcaacaatggacgacctagagaggataaagaaagcaggcaaaagtcgggtagatgtaacaattgggagtgctctagatatatttggaggagatttgccttacaaagatgttgtcctttggcacaggaagcaaagtatggttggtcaagtgtgaagaaacacaagatcctctatctcatctcctatttcaaactattttgcgtcccctattttacactacactggagacagtcttcagtgatgtaattcaaatctgaggagcatgacttgtttgggtttggacaccagggttggcgctaactcaaaaggtggtcaatttgtgagtaatgtactgttcttgacagtttctgacctcgatttgtctattgtaactgaataggctgaattgatgctgatagatacattttgcctgctacaacactgacattctgatttttaagttcctcgtttgagaaaataataatattgatgcaaattttggctct

SEQ ID NO: 200463 - DNA, 2691 bp, Zea Mays
gtccaacgcagccaggatgcgacaatgcgaggcaggctgcttcatgcgtgaaaccaatcgtttcttcggcccggcacatgcaagcagccatgggcgagaaagaataggaccgccgccgccgctttgtccctccgttcacaaccttgtcgcacgagtctcttattcggtgagttcttcgcttctcctctcctctcttctctcgctcccccctcccctctctctatcacacacacagttccctctctatggtcagtcccatccggtcctctttctgggcttcaaatctctctttgttgttgcaatcggtattcgatttgctgctggattgcaaccgttgtttggaaaaaaaaacaaatattccccccaaatccatttccttcactgtgtattattttgcaccaaactgtaaatttgtcatctttctctttgtcaaatatgcattataggcttggatttgatctgttgcagcaactggacctgttttgtttaacaaatttaaatatcctgcatggagatagtggaaagggtattatgcagactttggaaagggaaggcgttatcagtgatctattattcagttgttagcttggctctttgggcatgtaagctgaatgtacgggatttttggtacccttgaacaagttgactcctgctgttttttgtcgaacagtggtgcttcttgatctgtaaaccatgttaacttcatctttatgcaatattgtggactaggactagcccctttaactcttcaaataaaaggtctacttgtgatctaatgttgctatactcaagtgatttgttattgccgtgtactcctgtgatttgctgaaagttttagttgtgttcaaactcatgttgtcacttcattcataaaaagatcaaagcagtggtaacttcaccaaaatgagaaatagtgatcaaaccaaagtgagtgcagccttccaaacacagagttcagcactgacatatgcagtccaagccagtggcggacccagaaagtttcaaaagcctgggcaaagattacaaaagctgaggcttgcccaattgttatgtatcctgaaacgtattttactcctaaattatgtatacatgtctataacttacaacacgggagcctgggcagccgcccggggtcgccgggcggtgagtcggccactggtccaagccacaacctagacaaccaatcaccagcacaatgcagcctggctcagcaatactagcaaaccaaacatgattgcctgcattcacacaagctggccacgcttggcctggttctactccccagccacactcaaccaatcaggcccattctgaatgagccagtgctgcttctcttccccacgacacatgaataataaactcgtgaaacatgttttagtcgtccgatccatcttctggtgcatcttgactgttcatattaacaccttaccccatacttcggacttcggagtccccttaggttttggccataactacatcacacatcacaccacatgagccggaaagtcattgaaaccctcttattaaaaaaaactgaagcaatgttgccaccaccgccatgccattgccgccacagccagtccgtcgctcttgccctatcctgttagccgtcaacgacacctgtggtgtgacgaggatgacatcaacatgtgcggcaagggtaccgtctctgcggtgggcgccacaacgtggctgggtgggttcgtgggtttcagtacgcccagcgaaatgcaggacatcgggaggacatgccgttgtgtgcgctgctgttagcttcagaccatgcattgacattcacaagggaaaagttaaacagattgttggctctactcttcgggatttagcaaatgatagcatggaacttgtgacaaactttgaatcagacaaatctcctgcagaatttgctaaattttataaagcagatgaacttctaggaggacatgttataatgcttggcgcaaatccttcaagccaggctgctgcactggaggcactacgtgcatatcctggtggtttgcaagttggaggtgggataaatttggagaatgcaatgtcttaccttaatgaaggggccagtcatgtgatagtgacctcttatgtgtttagtgatggcaagatgaacactgaaaggttaagaaaacttgtcgagctggttgggaaacagaggctcgtgctggacctcagttgtcgaaaaaaggatggccgatataccattgtaactgacaggtggcaaaagttcagtgatgtgtttgtggatgaaccaacattagaatatctcgctgcctttgcagatgagtttttggttcatggtgttgatgtggagggcaaaaggttaggaattgatgaggaacttgtggaactattggggcactattcaccaatcccagtcacttatgctgggggtgtgtcaacaatggacgacctagagaggataaagaaagcaggcaaaagtcgggaagcaaagtatggttggtcaagtgtgaagaaacacaagggttggcgctaactcaaaaggtggtcaatttgtgagtaatgtactgttcttgacagtttctgacctcgatttgtctattgtaactgaataggctgaattgatgctgatagatacattttgcctgctacaacactgacattctgatttttaagttcctcgtttgagaaaataataatattgatgcaaattttggctct

SEQ ID NO: 200464 - DNA, 1565 bp, Zea Mays
gtccaacgcagccaggatgcgacaatgcgaggcaggctgcttcatgcgtgaaaccaatcgtttcttcggcccggcacatgcaagcagccatgggcgagaaagaataggaccgccgccgccgctttgtccctccgttcacaaccttgtcgcacgagtctcttattcggttttggccataactacatcacacatcacaccacatgagccggaaagtcattgaaaccctcttattaaaaaaaactgaagcaatgttgccaccaccgccatgccattgccgccacagccagtccgtcgctcttgccctatcctgttagccgtcaacgacacctgtggtgtgacgaggatgacatcaacatgtgcggcaagggtaccgtctctgcggtgggcgccacaacgtggctgggtgggttcgtgggtttcagtacgcccagcgaaatgcaggacatcgggaggacatgccgttgtgtgcgctgctgttagcttcagaccatgcattgacattcacaagggaaaagttaaacagattgttggctctactcttcgggatttagcaaatgatagcatggaacttgtgacaaactttgaatcagacaaatctcctgcagaatttgctaaattttataaagcagatgaacttctaggaggacatgttataatgcttggcgcaaatccttcaagccaggctgctgcactggaggcactacgtgcatatcctggtggtttgcaagttggaggtgggataaatttggagaatgcaatgtcttaccttaatgaaggggccagtcatgtgatagtgacctcttatgtgtttagtgatggcaagatgaacactgaaaggttaagaaaacttgtcgagctggttgggaaacagaggctcgtgctggacctcagttgtcgaaaaaaggttaggaattgatgaggaacttgtggaactattggggcactattcaccaatcccagtcacttatgctgggggtgtgtcaacaatggacgacctagagaggataaagaaagcaggcaaaagtcgggtagatgtaacaattgggagtgctctagatatatttggaggagatttgccttacaaagatgttgtcctttggcacaggaagcaaagtatggttggtcaagtgtgaagaaacacaaggtattgatcagtattaccagttcatttgattcaagcttctgcacaaagtatattttctgaacatttttgttcaaataattcagttaggctatctccaacagatcctctatctcatctcctatttcaaactattttgcgtcccctattttacactacactggagacagtcttcagtgatgtaattcaaatctgaggagcatgacttgtttgggtttggacaccagggttggcgctaactcaaaaggtggtcaatttgtgagtaatgtactgttcttgacagtttctgacctcgatttgtctattgtaactgaataggctgaattgatgctgatagatacattttgcctgctacaacactgacattctgatttttaagttcctcgtttgagaaaataataatattgatgcaaattttggctct

SEQ ID NO: 200465 - DNA, 1170 bp, Zea Mays
gtccaacgcagccaggatgcgacaatgcgaggcaggctgcttcatgcgtgaaaccaatcgtttcttcggcccggcacatgcaagcagccatgggcgagaaagaataggaccgccgccgccgctttgtccctccgttcacaaccttgtcgcacgagtctcttattcgggaaaagttaaacagattgttggctctactcttcgggatttagcaaatgatagcatggaacttgtgacaaactttgaatcagacaaatctcctgcagaatttgctaaattttataaagcagatgaacttctaggaggacatgttataatgcttggcgcaaatccttcaagccaggctgctgcactggaggcactacgtgcatatcctgtatgtgtttagtgatggcaagatgaacactgaaaggttaagaaaacttgtcgagctggttgggaaacagaggctcgtgctggacctcagttgtcgaaaaaaggatggccgatataccattgtaactgacaggtggcaaaagttcagtgatgtgtttgtggatgaaccaacattagaatatctcgctgcctttgcagatgagtttttggttcatggtgttgatgtggagggcaaaaggttaggaattgatgaggaacttgtggaactattggggcactattcaccaatcccagtcacttatgctgggggtgtgtcaacaatggacgacctagagaggataaagaaagcaggcaaaagtcgggtagatgtaacaattgggagtgctctagatatatttggaggagatttgccttacaaagatgttgtcctttggcacaggaagcaaagtatggttggtcaagtgtgaagaaacacaagatcctctatctcatctcctatttcaaactattttgcgtcccctattttacactacactggagacagtcttcagtgatgtaattcaaatctgaggagcatgacttgtttgggtttggacaccagggttggcgctaactcaaaaggtggtcaatttgtgagtaatgtactgttcttgacagtttctgacctcgatttgtctattgtaactgaataggctgaattgatgctgatagatacattttgcctgctacaacactgacattctgatttttaagttcctcgtttgagaaaataataatattgatgcaaattttggctct

SEQ ID NO: 200466 - DNA, 2607 bp, Zea Mays
gtccaacgcagccaggatgcgacaatgcgaggcaggctgcttcatgcgtgaaaccaatcgtttcttcggcccggcacatgcaagcagccatgggcgagaaagaataggaccgccgccgccgctttgtccctccgttcacaaccttgtcgcacgagtctcttattcgcaactggacctgttttgtttaacaaatttaaatatcctgcatggagatagtggaaagggtattatgcagactttggaaagggaaggcgttatcagtgatctattattcagttgttagcttggctctttgggcatgtaagctgaatgtacgggatttttggtacccttgaacaagttgactcctgctgttttttgtcgaacagtggtgcttcttgatctgtaaaccatgttaacttcatctttatgcaatattgtggactaggactagcccctttaactcttcaaataaaaggtctacttgtgatctaatgttgctatactcaagtgatttgttattgccgtgtactcctgtgatttgctgaaagttttagttgtgttcaaactcatgttgtcacttcattcataaaaagatcaaagcagtggtaacttcaccaaaatgagaaatagtgatcaaaccaaagtgagtgcagccttccaaacacagagttcagcactgacatatgcagtccaagccagtggcggacccagaaagtttcaaaagcctgggcaaagattacaaaagctgaggcttgcccaattgttatgtatcctgaaacgtattttactcctaaattatgtatacatgtctataacttacaacacgggagcctgggcagccgcccggggtcgccgggcggtgagtcggccactggtccaagccacaacctagacaaccaatcaccagcacaatgcagcctggctcagcaatactagcaaaccaaacatgattgcctgcattcacacaagctggccacgcttggcctggttctactccccagccacactcaaccaatcaggcccattctgaatgagccagtgctgcttctcttccccacgacacatgaataataaactcgtgaaacatgttttagtcgtccgatccatcttctggtgcatcttgactgttcatattaacaccttaccccatacttcggacttcggagtccccttaggttttggccataactacatcacacatcacaccacatgagccggaaagtcattgaaaccctcttattaaaaaaaactgaagcaatgttgccaccaccgccatgccattgccgccacagccagtccgtcgctcttgccctatcctgttagccgtcaacgacacctgtggtgtgacgaggatgacatcaacatgtgcggcaagggtaccgtctctgcggtgggcgccacaacgtggctgggtgggttcgtgggtttcagtacgcccagcgaaatgcaggacatcgggaggacatgccgttgtgtgcgctgctgttagcttcagaccatgcattgacattcacaagggaaaagttaaacagattgttggctctactcttcgggatttagcaaatgatagcatggaacttgtgacaaactttgaatcagacaaatctcctgcagaatttgctaaattttataaagcagatgaacttctaggaggacatgttataatgcttggcgcaaatccttcaagccaggctgctgcactggaggcactacgtgcatatcctggtggtttgcaagttggaggtgggataaatttggagaatgcaatgtcttaccttaatgaaggggccagtcatgtgatagtgacctcttatgtgtttagtgatggcaagatgaacactgaaaggttaagaaaacttgtcgagctggttgggaaacagaggctcgtgctggacctcagttgtcgaaaaaaggatggccgatataccattgtaactgacaggtggcaaaagttcagtgatgtgtttgtggatgaaccaacattagaatatctcgctgcctttgcagatgagtttttggttcatggtgttgatgtggagggcaaaaggttaggaattgatgaggaacttgtggaactattggggcactattcaccaatcccagtcacttatgctgggggtgtgtcaacaatggacgacctagagaggataaagaaagcaggcaaaagtcgggtagatgtaacaattgggagtgctctagatatatttggaggagatttgccttacaaagatgttgtcctttggcacaggaagcaaagtatggttggtcaagtgtgaagaaacacaagttaggctatctccaacagatcctctatctcatctcctatttcaaactattttgcgtcccctattttacactacactggagacagtcttcagtgatgtaattcaaatctgaggagcatgacttgtttgggtttggacaccagggttggcgctaactcaaaaggtggtcaatttgtgagtaatgtactgttcttgacagtttctgacctcgatttgtctattgtaactgaataggctgaattgatgctgatagatacattttgcctgctacaacactgacattctgatttttaagttcctcgtttgagaaaataataatattgatgcaaattttggctct

SEQ ID NO: 200467 - DNA, 2611 bp, Zea Mays
gtccaacgcagccaggatgcgacaatgcgaggcaggctgcttcatgcgtgaaaccaatcgtttcttcggcccggcacatgcaagcagccatgggcgagaaagaataggaccgccgccgccgctttgtccctccgttcacaaccttgtcgcacgagtctcttattcggcttggatttgatctgttgcagcaactggacctgttttgtttaacaaatttaaatatcctgcatggagatagtggaaagggtattatgcagactttggaaagggaaggcgttatcagtgatctattattcagttgttagcttggctctttgggcatgtaagctgaatgtacgggatttttggtacccttgaacaagttgactcctgctgttttttgtcgaacagtggtgcttcttgatctgtaaaccatgttaacttcatctttatgcaatattgtggactaggactagcccctttaactcttcaaataaaaggtctacttgtgatctaatgttgctatactcaagtgatttgttattgccgtgtactcctgtgatttgctgaaagttttagttgtgttcaaactcatgttgtcacttcattcataaaaagatcaaagcagtggtaacttcaccaaaatgagaaatagtgatcaaaccaaagtgagtgcagccttccaaacacagagttcagcactgacatatgcagtccaagccagtggcggacccagaaagtttcaaaagcctgggcaaagattacaaaagctgaggcttgcccaattgttatgtatcctgaaacgtattttactcctaaattatgtatacatgtctataacttacaacacgggagcctgggcagccgcccggggtcgccgggcggtgagtcggccactggtccaagccacaacctagacaaccaatcaccagcacaatgcagcctggctcagcaatactagcaaaccaaacatgattgcctgcattcacacaagctggccacgcttggcctggttctactccccagccacactcaaccaatcaggcccattctgaatgagccagtgctgcttctcttccccacgacacatgaataataaactcgtgaaacatgttttagtcgtccgatccatcttctggtgcatcttgactgttcatattaacaccttaccccatacttcggacttcggagtccccttaggttttggccataactacatcacacatcacaccacatgagccggaaagtcattgaaaccctcttattaaaaaaaactgaagcaatgttgccaccaccgccatgccattgccgccacagccagtccgtcgctcttgccctatcctgttagccgtcaacgacacctgtggtgtgacgaggatgacatcaacatgtgcggcaagggtaccgtctctgcggtgggcgccacaacgtggctgggtgggttcgtgggtttcagtacgcccagcgaaatgcaggacatcgggaggacatgccgttgtgtgcgctgctgttagcttcagaccatgcattgacattcacaagggaaaagttaaacagattgttggctctactcttcgggatttagcaaatgatagcatggaacttgtgacaaactttgaatcagacaaatctcctgcagaatttgctaaattttataaagcagatgaacttctaggaggacatgttataatgcttggcgcaaatccttcaagccaggctgctgcactggaggcactacgtgcatatcctggtggtttgcaagttggaggtgggataaatttggagaatgcaatgtcttaccttaatgaaggggccagtcatgtgatagtgacctcttatgtgtttagtgatggcaagatgaacactgaaaggttaagaaaacttgtcgagctggttgggaaacagaggctcgtgctggacctcagttgtcgaaaaaaggatggccgatataccattgtaactgacaggtggcaaaagttcagtgatgtgtttgtggatgaaccaacattagaatatctcgctgcctttgcagatgagtttttggttcatggtgttgatgtggagggcaaaaggttaggaattgatgaggaacttgtggaactattggggcactattcaccaatcccagtcacttatgctgggggtgtgtcaacaatggacgacctagagaggataaagaaagcaggcaaaagtcgggtagatgtaacaattgggagtgctctagatatatttggaggagatttgccttacaaagatgttgtcctttggcacaggaagcaaagtatggttggtcaagtgtgaagaaacacaagatcctctatctcatctcctatttcaaactattttgcgtcccctattttacactacactggagacagtcttcagtgatgtaattcaaatctgaggagcatgacttgtttgggtttggacaccagggttggcgctaactcaaaaggtggtcaatttgtgagtaatgtactgttcttgacagtttctgacctcgatttgtctattgtaactgaataggctgaattgatgctgatagatacattttgcctgctacaacactgacattctgatttttaagttcctcgtttgagaaaataataatattgatgcaaattttggctct

SEQ ID NO: 200468 - DNA, 1582 bp, Zea Mays
gtccaacgcagccaggatgcgacaatgcgaggcaggctgcttcatgcgtgaaaccaatcgtttcttcggcccggcacatgcaagcagccatgggcgagaaagaataggaccgccgccgccgctttgtccctccgttcacaaccttgtcgcacgagtctcttattcgccagtccgtcgctcttgccctatcctgttagccgtcaacgacacctgtggtgtgacgaggatgacatcaacatgtgcggcaagggtaccgtctctgcggtgggcgccacaacgtggctgggtgggttcgtgggtttcagtacgcccagcgaaatgcaggacatcgggaggacatgccgttgtgtgcgctgctgttagcttcagaccatgcattgacattcacaagggaaaagttaaacagattgttggctctactcttcgggatttagcaaatgatagcatggaacttgtgacaaactttgaatcagacaaatctcctgcagaatttgctaaattttataaagcagatgaacttctaggaggacatgttataatgcttggcgcaaatccttcaagccaggctgctgcactggaggcactacgtgcatatcctggtggtttgcaagttggaggtgggataaatttggagaatgcaatgtcttaccttaatgaaggggccagtcatgtgatagtgacctcttatgtgtttagtgatggcaagatgaacactgaaaggttaagaaaacttgtcgagctggttgggaaacagaggctcgtgctggacctcagttgtcgaaaaaaggatggccgatataccattgtaactgacaggtggcaaaagttcagtgatgtgtttgtggatgaaccaacattagaatatctcgctgcctttgcagatgagtttttggttcatggtgttgatgtggagggcaaaaggttaggaattgatgaggaacttgtggaactattggggcactattcaccaatcccagtcacttatgctgggggtgtgtcaacaatggacgacctagagaggataaagaaagcaggcaaaagtcgggtagatgtaacaattgggagtgctctagatatatttggaggagatttgccttacaaagatgttgtcctttggcacaggaagcaaagtatggttggtcaagtgtgaagaaacacaaggtattgatcagtattaccagttcatttgattcaagcttctgcacaaagtatattttctgaacatttttgttcaaataattcagttaggctatctccaacagatcctctatctcatctcctatttcaaactattttgcgtcccctattttacactacactggagacagtcttcagtgatgtaattcaaatctgaggagcatgacttgtttgggtttggacaccagggttggcgctaactcaaaaggtggtcaatttgtgagtaatgtactgttcttgacagtttctgacctcgatttgtctattgtaactgaataggctgaattgatgctgatagatacattttgcctgctacaacactgacattctgatttttaagttcctcgtttgagaaaataataatattgatgcaaattttggctct

SEQ ID NO: 200469 - DNA, 1864 bp, Zea Mays
cttcaccaaaatgagaaatagtgatcaaaccaaagtgagtgcagccttccaaacacagagttcagcactgacatatgcagtccaagccagtggcggacccagaaagtttcaaaagcctgggcaaagattacaaaagctgaggcttgcccaattgttatgtatcctgaaacgtattttactcctaaattatgtatacatgtctataacttacaacacgggagcctgggcagccgcccggggtcgccgggcggtgagtcggccactggtccaagccacaacctagacaaccaatcaccagcacaatgcagcctggctcagcaatactagcaaaccaaacatgattgcctgcattcacacaagctggccacgcttggcctggttctactccccagccacactcaaccaatcaggcccattctgaatgagccagtgctgcttctcttccccacgacacatgaataataaactcgtgaaacatgttttagtcgtccgatccatcttctggtgcatcttgactgttcatattaacaccttaccccatacttcggacttcggagtccccttaggttttggccataactacatcacacatcacaccacatgagccggaaagtcattgaaaccctcttattaaaaaaaactgaagcaatgttgccaccaccgccatgccattgccgccacagccagtccgtcgctcttgccctatcctgttagccgtcaacgacacctgtggtgtgacgaggatgacatcaacatgtgcggcaagggtaccgtctctgcggtgggcgccacaacgtggctgggtgggttcgtgggtttcagtacgcccagcgaaatgcaggacatcgggaggacatgccgttgtgtgcgctgctgttagcttcagaccatgcattgacattcacaagggaaaagttaaacagattgttggctctactcttcgggatttagcaaatgatagcatggaacttgtgacaaactttgaatcagacaaatctcctgcagaatttgctaaattttataaagcagatgaacttctaggaggacatgttataatgcttggcgcaaatccttcaagccaggctgctgcactggaggcactacgtgcatatcctggtggtttgcaagttggaggtgggataaatttggagaatgcaatgtcttaccttaatgaaggggccagtcatgtgatagtgacctcttgatggcaagatgaacactgaaaggttaagaaaacttgtcgagctggttgggaaacagaggctcgtgctggacctcagttgtcgaaaaaaggatggccgatataccattgtaactgacaggtggcaaaagttcagtgatgtgtttgtggatgaaccaacattagaatatctcgctgcctttgcagatgagtttttggttcatggtgttgatgtggagggcaaaaggttaggaattgatgaggaacttgtggaactattggggcactattcaccaatcccagtcacttatgctgggggtgtgtcaacaatggacgacctagagaggataaagaaagcaggcaaaagtcgggtagatgtaacaattgggagtgctctagatatatttggaggagatttgccttacaaagatgttgtcctttggcacaggaagcaaagtatggttggtcaagtgtgaagaaacacaagggttggcgctaactcaaaaggtggtcaatttgtgagtaatgtactgttcttgacagtttctgacctcgatttgtctattgtaactgaataggctgaattgatgctgatagatacattttgcctgctacaacactgacattctgatttttaagttcctcgtttgagaaaataataatattgatgcaaattttggctct

SEQ ID NO: 200470 - DNA, 1010 bp, Zea Mays
atttgatggtacatggttgcgtgatcaccaaacaaattatacagttctcttaatcctgatcctctgtggtgtgcaaacctggtagtctgaagacatgcaaaaagttcgaggcggaaatatatgtcctgacaaaggatgaaggtggccggcacactgcctttgtcacaaattacagcccccaattctacttcaggacagctgatgtcactggaagggttgagctgcttggggagatgaagatggttttgcccggtgacaatgtaactgcgaattttgagttgatatcacctgttcctcttgaacctgggcaaagatttgcgattagggaaggaggaagaacggtcggtgctggagtcgtctccaaagttcttagctgatcagtttccactttcttctccgtagcaattcagtgaacaaacgagtgttgatatgtccgaccgggttagaaacgagcgcaaagcaccgggttttcttttgcatttttcttggaatgcctgagcaaaggcagagctggcctggccagtggccaccattttattgttgaggcgtggtgctgtgtaacaccacggttagtttggttgacacgcaagttgggcataactttgattgaataatactagtctcatcataaacatattttctagcaattttgtcatgtcggtcttggaggcgctttgtcaagtccgcagaaaaaaaatgctggttggactatatatgtgtatgtatttgtgatgtttaccgtcgctagcttctgatctggtgatgcgaaattttaatggcatggatattatctatttgttttcgaatttgattcgactacaaggactaaacccgatccgtatctgagtccatgttctttagtatctgatatgtatttgatatttatccgtattcataaagtcataaagttggatatgtattatgttgatactgttttaaatattagctgacataatttaataacatttgtattcgatgtgaatcgaaaagaaaaaaatgtaaaaataaac

SEQ ID NO: 200471 - DNA, 1147 bp, Zea Mays
tcagtaaagtatgggatgcacttactggggatgagctacattcatttgaacacaagcatatagttcgggcatgtgccttctctgaggatacacaccttttactcactggaggcatggaaaagattttgcgtgtgtatgatatgaatcgtcctgatgcagctccaagagagcttgacaaatcacctggttccgtccgaactgctgcttggcttcatagtgaccaaactatattgagttcctgcactgacatgggtggagtaaggctgtgggatgttagaactggaaaaattgtccaaactcttgaaaccaaggcttctgtcactagtgcagaagtaagccaggatggcaggttcatcactactgctgatggctcaagtgtaaaattctgggacgcgaatcactttggccttgttaaaagctatgatatgccatgcaatgtggaatcggcttcacttgaacctaagtctgggagtaaatttgtcgctggaggagaagatttatgggttcatgtatttgatttcttcactggtgaagaaatagcttgtaacaaaggacatcatggtccagtccactgtgtccggtttgcaccttgtggtgaatcatacgcatcgggttcagaagatggcaccattcggatctggcagcttagcccggctaatgctgatgacaatgaggtggccaatgcaaatggcaagacaactgctggggtaaacgaagttacaaccaagatcgaaggcttccacattcccaaggaggggcagaccgaggggtaggatctcatgtgttttgtggtgcttgtggttcttattgcgaggagattgccatcagagctgcagtggtcattcagtttccctctgcggagtcatcatgtctgcgatccaagggtatcctggcttcatgagtcatcatcagcactggggaaaaacaagcaagcaaatggtggtgggtttttggatggggccctcgctttgatagaacatagcaattgtagcgtcaaaaataaacaagagttgggtagtttaggtaccgtgtttgcgttcattaaagtgaagtattctgtatcaccacaggtaaccttgattgtggtgactatttttttttgaatgcaaatcgattgctctctccaatctgaataaataggacatat

SEQ ID NO: 200472 - DNA, 1507 bp, Zea Mays
ttaaaggcgctaaagttcatcctgacactctgatcggccagcaacttgacacacaattagtaaagtatgggatgcacttactggggatgagctacattcatttgaacacaagcatatagttcgggcatgtgccttctctgaggatacacaccttttactcactggaggcatggaaaagattttgcgtgtgtatgatatgaatcgtcctgatgcagctccaagagagcttgacaaatcacctggttccgtccgaactgctgcttggcttcatagtgaccaaactatattgagttcctgcactgacatgggtggagtaaggctgtgggatgttagaactggaaaaattgtccaaactcttgaaaccaaggcttctgtcactagtgcagaagtaagccaggatggcaggttcatcactactgctgatggctcaagtgtaaaattctgggacgcgaatcactttggccttgttaaaagctatgatatgccatgcaatgtggaatcggcttcacttgaacctaagtctgggagtaaatttgtcgctggaggagaagatttatgggttcatgtatttgatttcttcactggtgaagaaatagcttgtaacaaaggacatcatggtccagtccactgtgtccggtttgcaccttgtggtgaatcatacgcatcgggttcagaagatggcaccattcggatctggcagcttagcccggctaatgctgatgacaatgaggtggccaatgcaaatggcaagacaactgctggggtaaacgaagttacaaccaagatcgaaggcttccacattcccaaggaggggcagaccgaggggtaggatctcatgtgttttgtggtgcttgtggttcttattgcgaggagattgccatcagagctgcagtggtcattcagtttccctctgcggagtcatcatgtctgcgatccaagggtatcctggcttcatgagtcatcatcagcactggggaaaaacaagcaagcaaatggtggtgggtttttggatggggccctcgctttgatagaacatagcaattgtagcgtcaaaaataaacaagagttgggtagtttaggtaccgtgtttgcgttcattaaagtgaagtattctgtatcaccacaggtaaccttgattgtggtgactatttttttttggtttgcctcaccgtgttccagtcccctaaaaaaatacttgaggccttcatcgttggaacaccgaccttcaaagctgtagaccacttcttgatcctgaggtatcccataaggagaacatctgggatatggcacatgtttcgttttgcagcgaacatccctgctttcgcaaaagggaatcgcgtcacatgccccgccatgtgagtcaaacttggctgaacggtgaatgcatctgatcggcctttctgcgatggtttcgggctgcggcgtccatgtgaaattactggccagaccagttgctgttcatggctatctcattctcatgattggcaccagctgtgatatcactggt

SEQ ID NO: 200473 - DNA, 1946 bp, Zea Mays
cccgctacgacctacgatcatgaccaaaggaccgatcgagcgcgtgccgcttcgtctcggctcgtcccaagtcctaaccctatataagcacagggtctggcttcctgcccctgcccccctgccccacactttagcccaaggaggccggcctcgcctcgcctcgcctcgcttcatacgcccgcccgcccctgccgatccatccacccaataaagcgcctgtttcctctctttttcgatcggtgtgctagggtttgggcgcgcggaggcgtcgcattccagggtaatcattggttcgacgggctagggtgctttctcacccggggaacggaagcgaatccagacgatggagaagaagaaggtggcgataccgctggtgtgccacggccactcgcggccggtggtggacctcttctacagccccgtcacacccgatggctacttcctcatcagcgccagcaaggatacaaatccaatgcttcgtaatggtgagactggcgactggattgggacttttcaaggtcataaaggagctgtttggagctgttgccttgacaggaatgctctgagggctgcatctgcttctgctgacttttcagctaaagtatgggatgcacttactggggatgagctacattcatttgaacacaagcatatagttcgggcatgtgccttctctgaggatacacaccttttactcactggaggcatggaaaagattttgcgtgtgtatgatatgaatcgtcctgatgcagctccaagagagcttgacaaatcacctggttccgtccgaactgctgcttggcttcatagtgaccaaactatattgagttcctgcactgacatgggtggagtaaggctgtgggatgttagaactggaaaaattgtccaaactcttgaaaccaaggcttctgtcactagtgcagaagtaagccaggatggcaggttcatcactactgctgatggctcaagtgtaaaattctgggacgcgaatcactttggccttgttaaaagctatgatatgccatgcaatgtggaatcggcttcacttgaacctaagtctgggagtaaatttgtcgctggaggagaagatttatgggttcatgtatttgatttcttcactggtgaagaaatagcttgtaacaaaggacatcatggtccagtccactgtgtccggtttgcaccttgtggtgaatcatacgcatcgggttcagaagatggcaccattcggatctggcagcttagcccggctaatgctgatgacaatgaggtggccaatgcaaatggcaagacaactgctggggtaaacgaagttacaaccaagatcgaaggcttccacattcccaaggaggggcagaccgaggggagattgccatcagagctgcagtggtcattcagtttccctctgcggagtcatcatgtctgcgatccaagggtatcctggcttcatgagtcatcatcagcactggggaaaaacaagcaagcaaatggtggtgggtttttggatggggccctcgctttgatagaacatagcaattgtagcgtcaaaaataaacaagagttgggtagtttaggtaccgtgtttgcgttcattaaagtgaagtattctgtatcaccacagtcccctaaaaaaatacttgaggccttcatcgttggaacaccgaccttcaaagctgtagaccacttcttgatcctgaggtatcccataaggagaacatctgggatatggcacatgtttcgttttgcagcgaacatccctgctttcgcaaaagggaatcgcgtcacatgccccgccatgtgagtcaaacttggctgaacggtgaatgcatctgatcggcctttctgcgatggtttcgggctgcggcgtccatgtgaaattactggccagaccagttgctgttcatggctatctcattctcatgattggcaccagctgtgatatcactggt

SEQ ID NO: 200474 - DNA, 1062 bp, Zea Mays
taaaacgccgcgaccacacaagaagtgacctctgacctccacagtctataacggcacgaccctcgctcatgttctcatcttcccactccttccatttgtcctcttcctctccctcccacgccaccgtcaacgagctccagagccccgcaccgcgccgcccgccagcaaccaccccctcctcacccagatgccgcggctgccgggatcgcagcctgcgccggagcggcgactcgccgtgctcctgtcccacttccacccgtgttgcgaacctccacgcaccatcgcctgcgtcgccagcgtggagtgcctccggaccgcagccgaggaggaggccgagatgcagttgagcctctccacgtcgccctgcgcaggaggtgagaaggggggatcctcgggtggcgggcactgcgtgttctgcaacatcgtcgcgggcaccgcgcaggccttcaagctctacgaggatgatatgtgcttgtgcatcctggatgctaaacctctaacaagcgggcattcccttatcattccaaaaagtcattatccatcagtgcaaacaacaccaccaactgtactagcagctatctgctctaaattgccactcctgggtactgcaatcatgaaggctactcaatgtgatgcattcaatgtgctaatcaacaatggagagaaggcagggcaagttatttttcatactcatgtgcacatcattccacgtagcaaagatgataacctgtggtcttcagaggaaactacgcatcttgttagcagcatcaaggaaataatctcttcttcccccgaagactacagtactgtaatgtcatccacgccaaaggaactctgaaacaaattgaaaagaatgtagacaaccgattaaaagggcatcttttacttttcctctcgttcagcttcaagagcattgctgcgagatgaattgatgtacagctttgtctcagtcatgccttgaaattttgatagatattgataaagtactggttttagagaaggcaaatgcggtagatcctaaggtcgtagttggtacgtgacagtgatcaggaaccatcttgt

SEQ ID NO: 200475 - DNA, 285 bp, Zea Mays
gagcgagcgcataacttgctcacattcatactcgcaagcagctattcatgagccactatattattatttatagtctctagggacataatcgcattggaaccaacgcggcgtaatcatggcgagtagaaagcctttttgacctgtaaagcatccgtttccaggatgaggttgtcaatgcccccccgcctgctgacctcgtggatctcgacatctcagaagagcccgttgctgaggatcctggtgagcagcaggttggagtagctgagcaggagctcattgaaggca

SEQ ID NO: 200476 - DNA, 1781 bp, Zea Mays
ccgacagccgcttggcaccgggccggtccaggtccaccccacccgagacagagaccaaccgccgctgccccatctccggagtcccgctcctaaaaccccgccagccagcggtgccgccgccggtgacatggacgacggcgacactcccagacgcaaatccgtcccagattggctgaacagcccgatctggtctgcgcctccgccgtctccacgccacagctcccttccccccacggcaccgtccccccctcagccgccaccatctcctctgccccctccccagccacggcgggatccgactcccatccctcctcccaacgccccacgcgacgccgatgtttcagacgacgaaggcaagggcgcgggcgccccgtcgtgcgcccacctcgtcgctgagttcaaagtcgcgctggataggaaggtggtggatctggcagagctccggaggctcgcatgccagggcgtgcccgacgccgctggtattcggcccatcgtctggaagttagcagcttctcttgggatatgtgccaactgatcgtgctctatggccgtatgaactggagaaaaagaggtcccaatactgtgatttcaaagatgaacttctggttaatccttcagaagttactcgaagaatggaggaaatgacagcttctgaaagagaggaacataatgctgaaggcaccggtgtgctaccaagggcggaaatcgttcgtgatgagcatcctctaagccttgggaaaactagtgtttggaaccaatacttccaggagtctgagattgtagagcagattgatagagatgttaagcgcactcatccggagatggaatttttcaatggggactcttcagattcgctgtctaatcaggagtcactaaagcgtatacttacaatatttgcaaaattgaatccgggtataagatatgtacaaggaatgaatgaggttttggcacctctctattatgttttcaagaatgaccctgaccaaagtcaagctgctttagcagagccagatgccttcttctgttttgtcgagctgcttagcgggttccgagacaacttttgcaagcaacttgacaacagcgtggttggcatacgctccacaattactacactatcacagcttctgagaagacacgacgaggaactctggcggcatttagaagttgtaaccaaggtcaatccacagttctacgcattcagatggatcaccttgctgctaacgcaggagttccagttccgtgactgcctcagcctgtgggacacactgttgggcgacccagaggggcctcaggctacgttgttgcgggtctgctgcgcgatgctaattcttgtccggagaaggctcttggctggcgatttcactgcgaatctcaagcttctccagaactacccacccacaaacatcgaccacatcctacacattgctaacaagctgcgaggaccgcttcctttctgaccagttggatcccttgcgtactttgttaccgtatacggttttgtgctagactatgtttatccagggaaagaaagctgcgttaagaactcttttaaaatgaacctacaaagcaacagttggttctcgtgtagtttccgttccggctttatgccggaatctggatgcccgtgcggctttgctgtttgtgaatgtcgactgaacgagtgccctgcacctctcaacttcagtcgaagtccgtggccacagggcaacatcaacacaagcatgtagcagcgcagtgttttgtgcaccaaactaaccctctctatactcactttccggtgc

SEQ ID NO: 200477 - DNA, 2225 bp, Zea Mays
gtcagctttctcctcgtggtcgtggtcgtggccccgccgtcccgtgcgccaacgccaagtcgaggcacgcggccagtggtgccctcgtcctcgaatcgtcaatgagcaccggcgccgcgcccctcctccactctacccgcacagcgcccctcgcccccacaccccaacccaaccatccgctccttgtcgccttccgacgctgagtttgctggtgtcgatttacgccggcggatgctcgatctggtagctgcatgtgccgacctactcgtcgaatccgttatctaacgtaatggatgggcaaggcacaaagcacaggattttgatggtgtccgactttttctttccaaactttggtggggtggaaagccatatctactacctgtcacaatgtctacttaagcttggccataaggttgttgtcatgacacatgcatatggaaacagatctggagtacgatatgtcacaaatggtttaaaggtctattatgtaccatggaggccattcctgatgcagaatacacttcctacactatccttgacgtttccaattgtaaggacaattattattcgagagaagatttctgtcgtgcatggacatcaagctttttcaacactgtgtcatgaagcattaatgcatgctaggacaatggggtacaaagttgtcttcacagatcactcactttatggttttgctgatgctggaagcattcacatgaataaggttctgcagtttactcttgcagatattgatcaggcaatatgtgtctcacatacaagcaaagagaacactgtcttgaggtctgggatatctccagagaaggttttcatggttcctaatgcagttgacactgcaatgtttactccctctcccaagcgcttaaactgtgatgaaatagttattgttgtggtcagtaggttagtataccgaaaaggcgccgaccttcttgttgaagtcattccagaagtgtgtcggctatttccaaaggttcactttattgttggtggtgatggtccaaaacgtgtgcgccttgaagaaatgagggagaagttctcccttcaggatagagttgagatgttaggagctgtacctcatgctcaggtgcgatcggttctgatatctggacatatatttttgaacagccattctagaagcagctagctgtggactgttgacagtgagcactagagtcggtggtgtccctgaggttcttccagatgacatgatagtacttgcagaaccagctcctggagatatggtaagagctgtcaagaaagccatcgacatgctacctggaatagacccccagattatgcatcttcggatgaaagaactttatagttgggacgatgttgccaaaagaactgagattgtttatgatcgtgcaatggaatctccaacaacaaatttactagatcgccttccccggtatcttacttgtggatcttgggctggaaaactgttttgcctagttatgatcatcaattacctactatggcgccttttagaatttctacagcctgctgtaggtattgaagaagtcccagatataggcccactacatgctcatttaggttcaaggaatgatgaggctcaagagaagtgaaacttaaacctttgtcagttttgaaactgttggggacttgaggtggcagtcatggtatcttctgcttgtcagcattcgttctgatccacatgccagtgtatgcctttatgatatggcccccgcacagcattttctcttgaagcttcctgtctccgtagtcgcagctgaaagagagtggaacgccttgatttgtaggatttcttgtcatgctggttaaagatatggtccgagtctctgtcattgccagcttctttttcttcttctgcgtaatgcgtagtgagtggatggcctgcgttttaggcacgtcatcaaaaccaattatctgctggaaagttggtactctcttgccaccatattgcagtgatttagcaactagaagtcttgattggcatgttgacacacaaattcctactatgtttgatgtcttgtatcatgtcggagcaccaattcctgctgtgtttgtgatgtaataaggccaattccaaccagcgacgtgagaccaatcgtccaatctgcatggatccagtcgatgatacttttttgaattgtttgataagttcgtcaaatcctcaaaaacaagtacacaagctttgtctatgaaatacccttatattcttttgg

SEQ ID NO: 200478 - DNA, 2546 bp, Zea Mays
cagcccagcagctgctgctatcctgcatcgtctccttccccgcaccacacaagcagcccatatcatccatcgcctccagcgcggcgccgacctgcctctccattatttatgcatttccgcccccacccttacctttcccaattcagccgaggaccgcaatcgcagggcactgggagcgattaaaaaaggcagcctcccccgcaagggtaaaaaacaaacaaccaccgcatcgcggcaggcaaggcatcgcccgccagccaccgagcggagggggaagcaaaagcttgataaaaaggagaggaggagacgagacgtgccgtccggacccaagcaacttcctcccaccacctcctccctcccatgcccgcatcgagatcttagcgggacagcgagaggagaggcgacgccgacgcgggcgccccctgatccctcctcgccgccgccgccgaccgaccgaccgggggaggaggaggggaggggaggacggacacgatggaggcggactccgggaagctcttcgtcggcggcatctcttgggagacggacgaggatcgcctccgcgcgtacttcggtcgctttggcgaggtcaccgaggccgttatcatgcgggaccgcaacaccggccgcgcccgtgggttcgggttcgtcgtcttcgccgattccgggatcgccgaacgcgtcaccctcgataagcacatgatcgacgggcgcatggtggaagcaaagaaggccgttcctagggacgaccagagtattgcgagcaagaacaacagcagcatagggtcacctggaccaggacgcactagaaagatcttcgttggaggtctggcctcaaatgttaccgaggtcgaatttaggaggtattttgagcaatttggtgtgataaccgatgtggtagtgatgtatgaccacaacacgcagaggcctaggggctttggtttcatcacatatgactcagaagacgcagtggacaaggcactgcacaagaacttccatgagctgaatggtaaaatggtcgaggttaagagggctgtgccaaaggagcagtctcctggtcctattgcacgttcacctgcgggagggcagaactatgctatgagcagggttcataacttcctaaatggcttcaaccagggttacaacccgaaccccctgggtggttatggcatgagggtggatggaaggtatggtctccttacgggtgcacggaatgggttctcttcgtttggtccaggttatggaatgggcatgaatgctgaaggtggaatgagtgcatattttggtgcaagttctggttttgccaatagctccaatgggcggcaaataggttcttacttcaatagtagttcaaacagattaggcagtccaattggttatgttggccttaatgatgattcaggatcaatactgagttcaatgtctagaaatgtttggggcaatggaaatcttaactacacagggcaaccctacaaacacgaattcttttgctccacctgtaggtggtgggggtattcctggtgatgaaattagttggggaaaccttacttctgttcatgggatgggcaacatttcaagccttggaccgggaaaccttggccgtggaaccggagataacaactttggattgccttctggaacctatgtgaggagcaactcaactggtacaattggcgagccattttctgcatcagccaatccatatgaatcgaacaatctaggtgcatatggcagcagttctatttatggtgactccacctggaggttcaactcatctgaggttgatatacctccttttggtcatgatcttggaaatgttgatccagatattaaatcagaaatatcagcaaactatatgggcaactatactgttaataataatcagacaagcagaggtatcacttcctaggaagagtattattatattcatacatgacttgggataggtgaaatacccactactatatcaggctttcaggtgcatgactgtgaattggtgatgtcagattaatatacaggtaaggtactgggagctgatttgcagtggcagacaacgtaatgacggccgcgccgatccaacagtgggttgacaagcgttacagatgggaggaggacgcatcaacgccgaccgactaatccactatagccagtggattaatgccaatcacgtagcttgaaatcgcacactctcaccaccgtcatcctcgtatatgttcgcaatgtaaaaacatcaatcgtgtgtggtgactgtggtcgccgtatacctgacgtaaaaaaacagcagtccacattcggggggtcgtcgacacttgcaccacgcactcatcgctgcacccttgagaacacgagacacatctaatggtcatcgtgtcttgacagagtagtacaatagttaccatcgtgtcttgtcggttaatgtgatatgatccaattttgggttgggtgatctaatggtcatggtttttttttggtagactttcactggtacgactatttggtcgattggagctataaatacccaccaatcagccaacacatgtgctttttcc

SEQ ID NO: 200479 - DNA, 754 bp, Zea Mays
tatgaatgaagtagggattcaggaactcatgacacggcataaatcaactgctgctgagttcttttccaagaattatgattggttctttgcggaattcaactcgaaactgatattatctgcttccaattacttcatccggaggaaagccattcagctcttgcgagacattcttttggaaaggtcaaacgctgcagtgatggtgcgctatgttagttcgaaagagcatctcatgattcaaatgaaccttctaagggatgaaagcatagccattcaagtagaggctttccatgtcttcaagctgttcgtcgctaacaaggagcaggcacctgagatcaccggcatactgctcgccaacagaagcaagctcctgaggttcttgaaagacttcaccaccgtcgagaaagacgacaagaagttcgaagccgataaagctacggtcatctcggagatcctagcgctaaatggtgctgaaaagtaatagaaagacaagttgaaagcatcgcgagttcgcgacgtgcaaagagcagtagccagctagtgtctgtctccctgtgtttgtgtttcatgcatgcataatcgagtgtgaaggtgaaagcccggtgcgggctcattggtttcttttaatttgggcccacgcggcgccgcgccgcgccacaattgagcgcgcagcgtgatgcagtgctgacaggttgttgtctttgcgacaaattgtcttttaatttatctgttgcttcagtggatgtttggtttttag

SEQ ID NO: 200480 - DNA, 1909 bp, Zea Mays
ctagtttatagaaagttttagagatcctaattcctcatcctcttagacgtcacctgtcctttcatagacaaaacgaaagagggagcaaacaagaatgagccagtttcatgggccgttctcccaaactaattagccttttttttgcgtccaacggcggaacaagaaaaatcaaaacaaaaaagacagatcagcccagagtatcgttcgacgaggagaagccgagaagagccccccgggaaagccctcgctcatacggtcatacctgtttgctgtacgtttttcttttcccgttcgcgtcgcttgcgcgacacctagggcgaccgccgccggcctatgcccagctgcccaaagtactcgtcggaccctttgccggcgacgagcaccgaccacaccagccaccagacaccttttaggtcttggacgacgcacctgcgtcgccgacggcggcggtatcatcggtgagcggacgcgcggccggccaggcgagcgtgatcctcgatccaagaggtcggtagggatcgagatgaccgggtgcctgtggccgtgcgtgggagcggcggtggctgggcatggggccggccatcggaaggcggggctgttccgctccaagcccaggacccccgcggaggtggtgcagcacgccagggacctagtcacctacatcctcgacaacaaggacggctgcggcgccggcaagcgcgacgccaagcatgagcacaggatggtagaactaagcaaagaagtcaaggagatgaaaggcattctgtatggtaatggcgaagaagatccttgtgaagaagcatgcaagcaattgactaaggagttcttcaagaaggacactgacaccttccgtcaactaattgtttgccttcaatatgtggacctggaaacgcaaaaggatattacacaagtgatagcaaatttgcaaaggcaaaaggttgattcaagattggttgcctctgattacttagaaaccaacttggatcttttggatattttgatgtctgggtatggaaacttggacattgcaatacattatagtactctattgagagattgcatacgccaccaagttgctgcaaggtacgtactggaatctccacactttaggactttctttgatcatatacagtttccagacttcaatgtgcaatcagatgtttttaaaacttttaaggaactcatgacacggcataaatcaactgctgctgagttcttttccaagaattatgattggttctttgcggaattcaactcgaaactgatattatctgcttccaattacttcatccggaggaaagccattcagctcttgcgagacattcttttggaaaggtcaaacgctgcagtgatggtgcgctatgttagttcgaaagagcatctcatgattcaaatgaaccttctaagggatgaaagcatagccattcaagtagaggctttccatgtcttcaagctgttcgtcgctaacaaggagcaggcacctgagatcaccggcatactgctcgccaacagaagcaagctcctgaggttcttgaaagacttcaccaccgtcgagaaagacgacaagaagttcgaagccgataaagctacggtcatctcggagatcctagcgctaaatggtgctgaaaagtaatagaaagacaagttgaaagcatcgcgagttcgcgacgtgcaaagagcagtagccagctagtgtctgtctccctgtgtttgtgtttcatgcatgcataatcgagtgtgaaggtgaaagcccggtgcgggctcattggtttcttttaatttgggcccacgcggcgccgcgccgcgccacaattgagcgcgcagcgtgatgcagtgctgacaggttgttgtctttgcgacaaattgtcttttaatttatctgttgcttcagtggatgtttggtttttag

SEQ ID NO: 200481 - DNA, 2682 bp, Zea Mays
gctatggagcagttttttagtgtttcgctgcacggaagtgactctgctagcccctaatcatatgagagtgattttgagtgtgccaaacgccccctattgaaattcccacgcgcccgtcgtttgccaccttccccaccagcaccaagcggcgagagcgggacggggcagagcaagagctagggataaccctcgcccaccatggcgacgcccggcgagcagcaggcaccggctgcggcggagtaggtcgtgtccgtcgagatgcctgcacccgacgggtggaccaagaagtttactccccagagagggggaagatccgagattgtttttgtttcgccaactggcgaggaaattaagaacaagaggcaactaagccaatacctaaaggcacaccctggaggccctgctgcttcagattttgattggggaactggtgataccccaaggcgttctgctcgcattagcgagaaagtcaaggtttttgatagcccagagggcgagaagatcccgaaacgcagcaggaactccagtggtaggaagggtaggcagggaaagaaggaagcccctgaaactgaagaagccaaagatgctgaaaccggccaggacgccccaagtgaagatggcacaaaggagactgacgtggagatgaagcctgctgaagaggcgaaggaagctcctactgaaactgatgacgctgagaagatgagaaagaaactgagaaaccagctgaagctgttgtagctcctcttgcgcaatcggaggagaagaaagaagatgccaagccagatgagcctgaagctgtggctccagctccagtaagcaacccaactgagaactcagcccctgctcctgccgagcctgctgctgttcctgccccagtgcctgagaccgaatcagttgccgagcctgctgctgttctcgccccagcgcctgaaaccaaaccagatgccaagcctgctgctgttcctgccccagcgcctgaaaacaaaccagatgccgagcctgctgctgctgctgctccagtgcctgacaccaaatcagttgctgagcctgctgctgctccagcgcctgacaccaaatcagttgctgaacctgctgctgctgctccagtgcccgagaccaaactagttgctgaatctgctgctgatgctgttgctgctccggcgcctgaaaccaaatcagatgccgagcctgctgctgctccagtgcccgagaccaaaccagttgctgaatctgctgctgatgctgttgctgctccagcgcctgaaaccaaatcagatgccgagcctgctgctgccgctgatccagcacctgaaatcaaatcagatgctgccgccgctgatccagcacccgggaccaaggcagatgctgccgccactgatgccgcgcctggagccgagccagacgccgctccactagagaacaccgctgccgacaaaggcggaagcgaggagagcagccagcccgtgaacaacgtgaacaacgggcactcaacgtgaagtgcatctgaggccggaacggaacaccccttccagcaccgtgtatctcatgtaggaacaaacatttgcattcgcattgtaatctgatggatcggtaagcatgttgattagtcagtctgacgctgctgggtgacatgttggtaattaggctctgcatttgagctctttttttttgtatggctgctgtcgccgccgtacatgtatcctgtatccaccaccatcatcatccccttggactattggttgtgttgtacctaactgcgtaagcatattattatcaatgttaggccatgtatactccgctctaatgtttgtattttgtgaaatttggataaccagctgaatgttgtttatcatcatctccagtgtctatgagaaaatagtaagagtgcctggctgggtatgtataaaaaaaatgcgttttattttactgcatgtgaaaatgaaatcgaccagaggctagagctgggtaggcgtcgcggccgggctgggcaccggcggcgagcggcagacggggcacgtcgggcgcagcctcagccagcggtcgacgcacagctggtggaaggcgtgcgcgcactcgggcagcacgcggagcacgtccccgctggcgtactcgcccaggcacaccgcgcagcacgtcgtcgtcccggtggcggcggtcgtcgtcgcagtcttcctctccgctttctcctcgccgtacaccacctcgggcagcgccttgagcgcggcctcgtctagccccgcctcgacgtccgcgcccacgtccacggcggtgccctcctcctcccgccgcgcgcgcgctgccgccgtcgcgggcgcggcgctgcggacgcacgtccgcagcaggaaggccacggcgacgatggccatggcgctgacgacgccgaaggcgacctccacctccagctccaccatcccttcggctggccggccggcgcccctgcgtttgtcagtgcctgcgacgacgagctacgtggaccggaccggatcggaggcgctagctgctgggctgctgttccattgcaaccaccagctgagccgccaacctactcgatcgagctgctaggtcgacgcaattgagctgatgagcttctcttagtttcagctggtgcagcgttgcttgttcgagctggcgactggtcggggttccatggcgaaaggtcatgaagcgcctagccaacccaag

SEQ ID NO: 200482 - DNA, 2597 bp, Zea Mays
gctatggagcagttttttagtgtttcgctgcacggaagtgactctgctagcccctaatcatatgagagtgattttgagtgtgccaaacgccccctattgaaattcccacgcgcccgtcgtttgccaccttccccaccagcaccaagcggcgagagcgggacggggcagagcaagagctagggataaccctcgcccaccatggcgacgcccggcgagcagcaggcaccggctgcggcggagtaggtcgtgtccgtcgagatgcctgcacccgacgggtggaccaagaagtttactccccagagagggggaagatccgagattgtttttgtttcgccaactggcgaggaaattaagaacaagaggcaactaagccaatacctaaaggaactccagtggtaggaagggtaggcagggaaagaaggaagcccctgaaactgaagaagccaaagatgctgaaaccggccaggacgccccaagtgaagatggcacaaaggagactgacgtggagatgaagcctgctgaagaggcgaaggaagctcctactgaaactgatgacgctgagaaggctgcagacaaggcggacgatactcctgctccggcgccaatggaagaagatgagaaagaaactgagaaaccagctgaagctgttgtagctcctcttgcgcaatcggaggagaagaaagaagatgccaagccagatgagcctgaagctgtggctccagctccagtaagcaacccaactgagaactcagcccctgctcctgccgagcctgctgctgttcctgccccagtgcctgagaccgaatcagttgccgagcctgctgctgttctcgccccagcgcctgaaaccaaaccagatgccaagcctgctgctgttcctgccccagcgcctgaaaacaaaccagatgccgagcctgctgctgctgctgctccagtgcctgacaccaaatcagttgctgagcctgctgctgctccagcgcctgacaccaaatcagttgctgaacctgctgctgctgctccagtgcccgagaccaaactagttgctgaatctgctgctgatgctgttgctgctccggcgcctgaaaccaaatcagatgccgagcctgctgctgctccagtgcccgagaccaaaccagttgctgaatctgctgctgatgctgttgctgctccagcgcctgaaaccaaatcagatgccgagcctgctgctgccgctgatccagcacctgaaatcaaatcagatgctgccgccgctgatccagcacccgggaccaaggcagatgctgccgccactgatgccgcgcctggagccgagccagacgccgctccactagagaacaccgctgccgacaaaggcggaagcgaggagagcagccagcccgtgaacaacgtgaacaacgggcactcaacgtgaagtgcatctgaggccggaacggaacaccccttccagcaccgtgtatctcatgtaggaacaaacatttgcattcgcattgtaatctgatggatcggtaagcatgttgattagtcagtctgacgctgctgggtgacatgttggtaattaggctctgcatttgagctctttttttttgtatggctgctgtcgccgccgtacatgtatcctgtatccaccaccatcatcatccccttggactattggttgtgttgtacctaactgcgtaagcatattattatcaatgttaggccatgtatactccgctctaatgtttgtattttgtgaaatttggataaccagctgaatgttgtttatcatcatctccagtgtctatgagaaaatagtaagagtgcctggctgggtatgtataaaaaaaatgcgttttattttactgcatgtgaaaatgaaatcgaccagaggctagagctgggtaggcgtcgcggccgggctgggcaccggcggcgagcggcagacggggcacgtcgggcgcagcctcagccagcggtcgacgcacagctggtggaaggcgtgcgcgcactcgggcagcacgcggagcacgtccccgctggcgtactcgcccaggcacaccgcgcagcacgtcgtcgtcccggtggcggcggtcgtcgtcgcagtcttcctctccgctttctcctcgccgtacaccacctcgggcagcgccttgagcgcggcctcgtctagccccgcctcgacgtccgcgcccacgtccacggcggtgccctcctcctcccgccgcgcgcgcgctgccgccgtcgcgggcgcggcgctgcggacgcacgtccgcagcaggaaggccacggcgacgatggccatggcgctgacgacgccgaaggcgacctccacctccagctccaccatcccttcggctggccggccggcgcccctgcgtttgtcagtgcctgcgacgacgagctacgtggaccggaccggatcggaggcgctagctgctgggctgctgttccattgcaaccaccagctgagccgccaacctactcgatcgagctgctaggtcgacgcaattgagctgatgagcttctcttagtttcagctggtgcagcgttgcttgttcgagctggcgactggtcggggttccatggcgaaaggtcatgaagcgcctagccaacccaag

SEQ ID NO: 200483 - DNA, 1552 bp, Zea Mays
tggggtctgttcaggcacagccaatactgctggtccctctccaagttctgcaccctcgacaccttccactcatacaccaggagatgcaatgtctgtgccacagctgcagcagaatggcggttcagctaaacccatggtaatgtttggctctgatggaactgggagcttgacatctccagcaaacccattggatgatgtggaccgtttgctggaagatggctcattggatgataatgttgaatcttttctatcacaggatgacatggatcctagggacaacttggggcgatgcatggatgctagcaaaggttttggtttttctgaggttgccaaagcacgtgcaagtgcagccaaagttgtctgttgccacttctcagctgatggtaagctgcttgctactggtggtcatgataaaaaggttactttgtggtgtacagattctctgaagcctaaatccttcctggaagagcactcgtttcttatcactgatgttagatttagcccaagcatgtcgcgccttgcaacatcctccttcgacaaaactgtgcgggtttgggatgcagataacactgactattcactccgaactttcacgggccattcagcatctgtcatgtcacttgattttcatccaaacaaagaggatatgatatgctcctgtgatggtgatggggaagtgcgcagctggagcataaataatggtagctgtttgacatgtgttaaggtgtttaaggcaggtgctactcagatgagatttcaacctcgtaagggaaagtatctagcagctgcctcagagaaagcaatctacatacttgatggggagacacaacatgcttgtagaagccccttgcaggggcacaataagaatattcaatcgctttgttgggactctgctggtgaatatctggcttctgtcagtgaagactcagtcagaatatggtcattcagttctggacgtgatggtgaatttgtgcacgaattgaatcgcagtggaaatcagttccactcatgtgttttccacccaacttatcaatccttgttagtgattggttgttacgagtccttggaactttgggacataagggagaagaacaccatgaccttcaacaatgcgcatgacggtttggttgcagccctggcagcatccagtgcaacagggaaggttgcctcagtaagccatgataggactctcaagctctggaaatgacttgtatgaaacccatgttggacttctgtattctggctgttagatgatagacaaacaagactttgccaaaaatgaccacatgacgaaaaggttgctgacaagatactctggagccgcgtgggctcaagaactaacagtgttttgttttgtggtcgttgtatgctgttcagtatgccactgaagcttgtaacttgtaactcgtaatagaaactttggttgaagaaagattgtacctcggacaagtggcaaatatttattctctaaaatattctgcattttgttttttgaccttgtattttaacgtaattgagcctgaagcatagttttattgccggtaaaactaca

SEQ ID NO: 200484 - DNA, 2789 bp, Zea Mays
gtttgggccagtagtttatgttgttttagactcagctcatgaaggccagggagcaacagcagccacaaacacctcaacagaggcagcagcaaccacagcatatacaaatgcaacaaatgctgttacaaagagctgtgcatcagcagcaacagcagcaacagcagcagcagcaacaacaacaacaacaacaacaacaacctcagcagcagcagcagctgcaacagcagcgcagagatggttctcatcttctcaatggttctgcgaatggaatttctggaaacaatcctttaatgcgacaaaaccaaagtactgcaaatgttatggcaacaaaaatgtatgaggaaaggttaaaggtaccttcccagagagactctttcgaagaggcatcattgaagcaaagatacggagagaacgctgggcaactacttgattcaaatgaagcatcattgttgaaagcagcttcaagtgcacaatcctcagggcaaattttgcatggaactgttggtggcttatcaggcactctgcaacaagttcaggccaggagcccccaacttcctgggcctgctcagggtatcaagacagagattaatcacgttctgactcccagaggtgcaggcccagaagggtcatttataggtgtccaaggatctaatcaagctgggaacaatttgactctgaaaggatggccactcacgggacttgagcaacttaggtcaggaattcttcagcagaagtcatttatacagaatcaacagcaattgcaccagcaaatccagatgctgactccacagcagcagcagcagcttatgctgcaggctcagcaaaatatgtcttcaccaacatctagtgacgtcgacaacagaagattgaggatgatgctaaatagaaatgctgttcttggccgggatggacagacaaatagtggtagtgatattattccaaatattggctctcctagtcaaagtggcggagatatagatatgcttataaagtagaagaaacttgctcagcagcagcaactattacaacagcaaagcaatagccaacagctcccacagcaacatcagcttcagcaacctgctgtctctagccagcaatctcaaagttcaaatcaacatcttcaacaagaaaaactaggaattggaagtatgcctgttgatgggggcataccaaactcatttgggggagctgaacagacagcgaaaaagagaaagaagccaggctcatcctctggtagagccaatagttcaggcacagccaatactgctggtccctctccaagttctgcaccctcgacaccttccactcatacaccaggagatgcaatgtctgtgccacagctgcagcagaatggcggttcagctaaacccatggtaatgtttggctctgatggaactgggagcttgacatctccagcaaacccattggatgatgtggaccgtttgctggaagatggctcattggatgataatgttgaatcttttctatcacaggatgacatggatcctagggacaacttggggcgatgcatggatgctagcaaaggttttggtttttctgaggttgccaaagcacgtgcaagtgcagccaaagttgtctgttgccacttctcagctgatggtaagctgcttgctactggtggtcatgataaaaaggttactttgtggtgtacagattctctgaagcctaaatccttcctggaagagcactcgtttcttatcactgatgttagatttagcccaagcatgtcgcgccttgcaacatcctccttcgacaaaactgtgcgggtttgggatgcagataacactgactattcactccgaactttcacgggccattcagcatctgtcatgtcacttgattttcatccaaacaaagaggatatgatatgctcctgtgatggtgatggggaagtgcgcagctggagcataaataatggtagctgtttgacatgtgttaaggtgtttaaggcaggtgctactcagatgagatttcaacctcgtaagggaaagtatctagcagctgcctcagagaaagcaatctacatacttgatggggagacacaacatgcttgtagaagccccttgcaggggcacaataagaatattcaatcgctttgttgggactctgctggtgaatatctggcttctgtcagtgaagactcagtcagaatatggtcattcagttctggacgtgatggtgaatttgtgcacgaattgaatcgcagtggaaatcagttccactcatgtgttttccacccaacttatcaatccttgttagtgattggttgttacgagtccttggaactttgggacataagggagaagaacaccatgaccttcaacaatgcgcatgacggtttggttgcagccctggcagcatccagtgcaacagggaaggttgcctcagtaagccatgataggactctcaagctctggaaatgacttgtatgaaacccatgttggacttctgtattctggctgttagatgatagacaaacaagactttgccaaaaatgaccacatgacgaaaaggttgctgacaagatactctggagccgcgtgggctcaagaactaacagtgttttgttttgtggtcgttgtatgctgttcagtatgccactgaagcttgtaacttgtaactcgtaatagaaactttggttgaagaaagattgtacctcggacaagtggcaaatatttattctctaaaatattctgcattttgttttttgaccttgtattttaacgtaattgagcctgaagcatagttttattgccggtaaaactaca

SEQ ID NO: 200485 - DNA, 3192 bp, Zea Mays
ctcaatccatgtggattggtcaaacaagtcaaattctttcataattttttccaatcctatccaattcatatgagccgaacaaggcctaaaccctttgtttgttctcgaggtcgaggagagctgatttgagggttgccccaggctggatgtttacatatatgactattttatgaagagaaatttgcaggcaactgcaaaggccttccaagcagaaggaaaggtctcttcagatccagttgccattgatgcacccggtggctttcttttcgagtggtggtcggttttctgggatatattcatagcaagaactaacgagaagcattcagatgttgcagcctcatatattgagactcagctcatgaaggccagggagcaacagcagccacaaacacctcaacagaggcagcagcaaccacagcatatacaaatgcaacaaatgctgttacaaagagctgtgcatcagcagcaacagcagcaacagcagcagcagcaacaacaacaacaacaacaacaacaacctcagcagcagcagcagctgcaacagcagcgcagagatggttctcatcttctcaatggttctgcgaatggaatttctggaaacaatcctttaatgcgacaaaaccaaagtactgcaaatgttatggcaacaaaaatgtatgaggaaaggttaaaggtaccttcccagagagactctttcgaagaggcatcattgaagcaaagatacggagagaacgctgggcaactacttgattcaaatgaagcatcattgttgaaagcagcttcaagtgcacaatcctcagggcaaattttgcatggaactgttggtggcttatcaggcactctgcaacaagttcaggccaggagcccccaacttcctgggcctgctcagggtatcaagacagagattaatcacgttctgactcccagaggtgcaggcccagaagggtcatttataggtgtccaaggatctaatcaagctgggaacaatttgactctgaaaggatggccactcacgggacttgagcaacttaggtcaggaattcttcagcagaagtcatttatacagaatcaacagcaattgcaccagcaaatccagatgctgactccacagcagcagcagcagcttatgctgcaggctcagcaaaatatgtcttcaccaacatctagtgacgtcgacaacagaagattgaggatgatgctaaatagaaatgctgttcttggccgggatggacagacaaatagtggtagtgatattattccaaatattggctctcctagtcaaagtggcggagatatagatatgcttataaagtagaagaaacttgctcagcagcagcaactattacaacagcaaagcaatagccaacagctcccacagcaacatcagcttcagcaacctgctgtctctagccagcaatctcaaagttcaaatcaacatcttcaacaagaaaaactaggaattggaagtatgcctgttgatgggggcataccaaactcatttgggggagctgaacagacagcgaaaaagagaaagaagccaggctcatcctctggtagagccaatagttcaggcacagccaatactgctggtccctctccaagttctgcaccctcgacaccttccactcatacaccaggagatgcaatgtctgtgccacagctgcagcagaatggcggttcagctaaacccatggtaatgtttggctctgatggaactgggagcttgacatctccagcaaacccattggatgatgtggaccgtttgctggaagatggctcattggatgataatgttgaatcttttctatcacaggatgacatggatcctagggacaacttggggcgatgcatggatgctagcaaaggttttggtttttctgaggttgccaaagcacgtgcaagtgcagccaaagttgtctgttgccacttctcagctgatggtaagctgcttgctactggtggtcatgataaaaaggttactttgtggtgtacagattctctgaagcctaaatccttcctggaagagcactcgtttcttatcactgatgttagatttagcccaagcatgtcgcgccttgcaacatcctccttcgacaaaactgtgcgggtttgggatgcagataacactgactattcactccgaactttcacgggccattcagcatctgtcatgtcacttgattttcatccaaacaaagaggatatgatatgctcctgtgatggtgatggggaagtgcgcagctggagcataaataatggtagctgtttgacatgtgttaaggtgtttaaggtatgatgttatctttatatttcatggggtcataagcttaatcattaagattttctctgatcaatcgtattttgtcgtcccaggcaggtgctactcagatgagatttcaacctcgtaagggaaagtatctagcagctgcctcagagaaagcaatctacatacttgatggggagacacaacatgcttgtagaagccccttgcaggggcacaataagaatattcaatcgctttgttgggactctgctggtgaatatctggcttctgtcagtgaagactcagtcagaatatggtcattcagttctggacgtgatggtgaatttgtgcacgaattgaatcgcagtggaaatcagttccactcatgtgttttccacccaacttatcaatccttgttagtgattggttgttacgagtccttggaactttgggacataagggagaagaacaccatgaccttcaacaatgcgcatgacggtttggttgcagccctggcagcatccagtgcaacagggaaggttgcctcagtaagccatgataggactctcaagctctggaaatgacttgtatgaaacccatgttggacttctgtattctggctgttagatgatagacaaacaagactttgccaaaaatgaccacatgacgaaaaggttgctgacaagatactctggagccgcgtgggctcaagaactaacagtgttttgttttgtggtcgttgtatgctgttcagtatgccactgaagcttgtaacttgtaactcgtaatagaaactttggttgaagaaagattgtacctcggacaagtggcaaatatttattctctaaaatattctgcattttgttttttgaccttgtattttaacgtaattgagcctgaagcatagttttattgccggtaaaactaca

SEQ ID NO: 200486 - DNA, 3020 bp, Zea Mays
gttatcgcgttcgtggggacgcgttgcagctgtctccagtattgtgtgcgaggctggatgtttacatatatgactattttatgaagagaaatttgcaggcaactgcaaaggccttccaagcagaaggaaaggtctcttcagatccagttgccattgatgcacccggtggctttcttttcgagtggtggtcggttttctgggatatattcatagcaagaactaacgagaagcattcagatgttgcagcctcatatattgagactcagctcatgaaggccagggagcaacagcagccacaaacacctcaacagaggcagcagcaaccacagcatatacaaatgcaacaaatgctgttacaaagagctgtgcatcagcagcaacagcagcaacagcagcagcagcaacaacaacaacaacaacaacaacaacctcagcagcagcagcagctgcaacagcagcgcagagatggttctcatcttctcaatggttctgcgaatggaatttctggaaacaatcctttaatgcgacaaaaccaaagtactgcaaatgttatggcaacaaaaatgtatgaggaaaggttaaaggtaccttcccagagagactctttcgaagaggcatcattgaagcaaagatacggagagaacgctgggcaactacttgattcaaatgaagcatcattgttgaaagcagcttcaagtgcacaatcctcagggcaaattttgcatggaactgttggtggcttatcaggcactctgcaacaagttcaggccaggagcccccaacttcctgggcctgctcagggtatcaagacagagattaatcacgttctgactcccagaggtgcaggcccagaagggtcatttataggtgtccaaggatctaatcaagctgggaacaatttgactctgaaaggatggccactcacgggacttgagcaacttaggtcaggaattcttcagcagaagtcatttatacagaatcaacagcaattgcaccagcaaatccagatgctgactccacagcagcagcagcagcttatgctgcaggctcagcaaaatatgtcttcaccaacatctagtgacgtcgacaacagaagattgaggatgatgctaaatagaaatgctgttcttggccgggatggacagacaaatagtggtagtgatattattccaaatattggctctcctagtcaaagtggcggagatatagatatgcttataaagtagaagaaacttgctcagcagcagcaactattacaacagcaaagcaatagccaacagctcccacagcaacatcagcttcagcaacctgctgtctctagccagcaatctcaaagttcaaatcaacatcttcaacaagaaaaactaggaattggaagtatgcctgttgatgggggcataccaaactcatttgggggagctgaacagacagcgaaaaagagaaagaagccaggctcatcctctggtagagccaatagttcaggcacagccaatactgctggtccctctccaagttctgcaccctcgacaccttccactcatacaccaggagatgcaatgtctgtgccacagctgcagcagaatggcggttcagctaaacccatggtaatgtttggctctgatggaactgggagcttgacatctccagcaaacccattggatgatgtggaccgtttgctggaagatggctcattggatgataatgttgaatcttttctatcacaggatgacatggatcctagggacaacttggggcgatgcatggatgctagcaaaggttttggtttttctgaggttgccaaagcacgtgcaagtgcagccaaagttgtctgttgccacttctcagctgatggtaagctgcttgctactggtggtcatgataaaaaggttactttgtggtgtacagattctctgaagcctaaatccttcctggaagagcactcgtttcttatcactgatgttagatttagcccaagcatgtcgcgccttgcaacatcctccttcgacaaaactgtgcgggtttgggatgcagataacactgactattcactccgaactttcacgggccattcagcatctgtcatgtcacttgattttcatccaaacaaagaggatatgatatgctcctgtgatggtgatggggaagtgcgcagctggagcataaataatggtagctgtttgacatgtgttaaggtgtttaaggcaggtgctactcagatgagatttcaacctcgtaagggaaagtatctagcagctgcctcagagaaagcaatctacatacttgatggggagacacaacatgcttgtagaagccccttgcaggggcacaataagaatattcaatcgctttgttgggactctgctggtgaatatctggcttctgtcagtgaagactcagtcagaatatggtcattcagttctggacgtgatggtgaatttgtgcacgaattgaatcgcagtggaaatcagttccactcatgtgttttccacccaacttatcaatccttgttagtgattggttgttacgagtccttggaactttgggacataagggagaagaacaccatgaccttcaacaatgcgcatgacggtttggttgcagccctggcagcatccagtgcaacagggaaggttgcctcagtaagccatgataggactctcaagctctggaaatgacttgtatgaaacccatgttggacttctgtattctggctgttagatgatagacaaacaagactttgccaaaaatgaccacatgacgaaaaggttgctgacaagatactctggagccgcgtgggctcaagaactaacagtgttttgttttgtggtcgttgtatgctgttcagtatgccactgaagcttgtaacttgtaactcgtaatagaaactttggttgaagaaagattgtacctcggacaagtggcaaatatttattctctaaaatattctgcattttgttttttgaccttgtattttaacgtaattgagcctgaagcatagttttattgccggtaaaactaca

SEQ ID NO: 200487 - DNA, 3362 bp, Zea Mays
gtcccactcctcccgtctctattccccaattggccctcgcctccattaccttccccgtccccctcgtacatttcgacatcccctcccccccgactctcccgtcccgctcccgccgctaccagcgattccaatccgccctcccttccgccgctcaccgccgcggccccgccgcaagcgtttcgcctcgatatctccaccccgccttgctcgagccacgctcccaccgtccaggcgtccgctgcggaggtgtcggtggcccatctgaacaggctctcctcgtcggggcttttttgcttcggagggagaggcttcctgttcggcgcgccgtgagaagagcaccggccatgtcgcagactaactgggaggcggacaagatgctggatgtttacatatatgactattttatgaagagaaatttgcaggcaactgcaaaggccttccaagcagaaggaaaggtctcttcagatccagttgccattgatgcacccggtggctttcttttcgagtggtggtcggttttctgggatatattcatagcaagaactaacgagaagcattcagatgttgcagcctcatatattgagactcagctcatgaaggccagggagcaacagcagccacaaacacctcaacagaggcagcagcaaccacagcatatacaaatgcaacaaatgctgttacaaagagctgtgcatcagcagcaacagcagcaacagcagcagcagcaacaacaacaacaacaacaacaacaacctcagcagcagcagcagctgcaacagcagcgcagagatggttctcatcttctcaatggttctgcgaatggaatttctggaaacaatcctttaatgcgacaaaaccaaagtactgcaaatgttatggcaacaaaaatgtatgaggaaaggttaaaggtaccttcccagagagactctttcgaagaggcatcattgaagcaaagatacggagagaacgctgggcaactacttgattcaaatgaagcatcattgttgaaagcagcttcaagtgcacaatcctcagggcaaattttgcatggaactgttggtggcttatcaggcactctgcaacaagttcaggccaggagcccccaacttcctgggcctgctcagggtatcaagacagagattaatcacgttctgactcccagaggtgcaggcccagaagggtcatttataggtgtccaaggatctaatcaagctgggaacaatttgactctgaaaggatggccactcacgggacttgagcaacttaggtcaggaattcttcagcagaagtcatttatacagaatcaacagcaattgcaccagcaaatccagatgctgactccacagcagcagcagcagcttatgctgcaggctcagcaaaatatgtcttcaccaacatctagtgacgtcgacaacagaagattgaggatgatgctaaatagaaatgctgttcttggccgggatggacagacaaatagtggtagtgatattattccaaatattggctctcctagtcaaagtggcggagatatagatatgcttataaagtagaagaaacttgctcagcagcagcaactattacaacagcaaagcaatagccaacagctcccacagcaacatcagcttcagcaacctgctgtctctagccagcaatctcaaagttcaaatcaacatcttcaacaagaaaaactaggaattggaagtatgcctgttgatgggggcataccaaactcatttgggggagctgaacagacagcgaaaaagagaaagaagccaggctcatcctctggtagagccaatagttcaggcacagccaatactgctggtccctctccaagttctgcaccctcgacaccttccactcatacaccaggagatgcaatgtctgtgccacagctgcagcagaatggcggttcagctaaacccatggtaatgtttggctctgatggaactgggagcttgacatctccagcaaacccattgaaccctttttcttttcaggatgatgtggaccgtttgctggaagatggctcattggatgataatgttgaatcttttctatcacaggatgacatggatcctagggacaacttggggcgatgcatggatgctagcaaaggttttggtttttctgaggttgccaaagcacgtgcaagtgcagccaaagttgtctgttgccacttctcagctgatggtaagctgcttgctactggtggtcatgataaaaaggttactttgtggtgtacagattctctgaagcctaaatccttcctggaagagcactcgtttcttatcactgatgttagatttagcccaagcatgtcgcgccttgcaacatcctccttcgacaaaactgtgcgggtttgggatgcagataacactgactattcactccgaactttcacgggccattcagcatctgtcatgtcacttgattttcatccaaacaaagaggatatgatatgctcctgtgatggtgatggggaagtgcgcagctggagcataaataatggtagctgtttgacatgtgttaaggtgtttaaggcaggtgctactcagatgagatttcaacctcgtaagggaaagtatctagcagctgcctcagagaaagcaatctacatacttgatggggagacacaacatgcttgtagaagccccttgcaggggcacaataagaatattcaatcgctttgttgggactctgctggtgaatatctggcttctgtcagtgaagactcagtcagaatatggtcattcagttctggacgtgatggtgaatttgtgcacgaattgaatcgcagtggaaatcagttccactcatgtgttttccacccaacttatcaatccttgttagtgattggttgttacgagtccttggaactttgggacataagggagaagaacaccatgaccttcaacaatgcgcatgacggtttggttgcagccctggcagcatccagtgcaacagggaaggttgcctcagtaagccatgataggactctcaagctctggaaatgacttgtatgaaacccatgttggacttctgtattctggctgttagatgatagacaaacaagactttgccaaaaatgaccacatgacgaaaaggttgctgacaagatactctggagccgcgtgggctcaagaactaacagtgttttgttttgtggtcgttgtatgctgttcagtatgccactgaagcttgtaacttgtaactcgtaatagaaactttggttgaagaaagattgtacctcggacaagtggcaaatatttattctctaaaatattctgcattttgttttttgaccttgtattttaacgtaattgagcctgaagcatagttttattgccggtaaaactaca

SEQ ID NO: 200488 - DNA, 3344 bp, Zea Mays
cttgtcccactcctcccgtctctattccccaattggccctcgcctccattaccttccccgtccccctcgtacatttcgacatcccctcccccccgactctcccgtcccgctcccgccgctaccagcgattccaatccgccctcccttccgccgctcaccgccgcggccccgccgcaagcgtttcgcctcgatatctccaccccgccttgctcgagccacgctcccaccgtccaggcgtccgctgcggaggtgtcggtggcccatctgaacaggctctcctcgtcggggcttttttgcttcggagggagaggcttcctgttcggcgcgccgtgagaagagcaccggccatgtcgcagactaactgggaggcggacaagatgctggatgtttacatatatgactattttatgaagagaaatttgcaggcaactgcaaaggccttccaagcagaaggaaaggtctcttcagatccagttgccattgatgcacccggtggctttcttttcgagtggtggtcggttttctgggatatattcatagcaagaactaacgagaagcattcagatgttgcagcctcatatattgagactcagctcatgaaggccagggagcaacagcagccacaaacacctcaacagaggcagcagcaaccacagcatatacaaatgcaacaaatgctgttacaaagagctgtgcatcagcagcaacagcagcaacagcagcagcagcaacaacaacaacaacaacaacaacaacctcagcagcagcagcagctgcaacagcagcgcagagatggttctcatcttctcaatggttctgcgaatggaatttctggaaacaatcctttaatgcgacaaaaccaaagtactgcaaatgttatggcaacaaaaatgtatgaggaaaggttaaaggtaccttcccagagagactctttcgaagaggcatcattgaagcaaagatacggagagaacgctgggcaactacttgattcaaatgaagcatcattgttgaaagcagcttcaagtgcacaatcctcagggcaaattttgcatggaactgttggtggcttatcaggcactctgcaacaagttcaggccaggagcccccaacttcctgggcctgctcagggtatcaagacagagattaatcacgttctgactcccagaggtgcaggcccagaagggtcatttataggtgtccaaggatctaatcaagctgggaacaatttgactctgaaaggatggccactcacgggacttgagcaacttaggtcaggaattcttcagcagaagtcatttatacagaatcaacagcaattgcaccagcaaatccagatgctgactccacagcagcagcagcagcttatgctgcaggctcagcaaaatatgtcttcaccaacatctagtgacgtcgacaacagaagattgaggatgatgctaaatagaaatgctgttcttggccgggatggacagacaaatagtggtagtgatattattccaaatattggctctcctagtcaaagtggcggagatatagatatgcttataaagaagaaacttgctcagcagcagcaactattacaacagcaaagcaatagccaacagctcccacagcaacatcagcttcagcaacctgctgtctctagccagcaatctcaaagttcaaatcaacatcttcaacaagaaaaactaggaattggaagtatgcctgttgatgggggcataccaaactcatttgggggagctgaacagacagcgaaaaagagaaagaagccaggctcatcctctggtagagccaatagttcaggcacagccaatactgctggtccctctccaagttctgcaccctcgacaccttccactcatacaccaggagatgcaatgtctgtgccacagctgcagcagaatggcggttcagctaaacccatggtaatgtttggctctgatggaactgggagcttgacatctccagcaaacccattggatgatgtggaccgtttgctggaagatggctcattggatgataatgttgaatcttttctatcacaggatgacatggatcctagggacaacttggggcgatgcatggatgctagcaaaggttttggtttttctgaggttgccaaagcacgtgcaagtgcagccaaagttgtctgttgccacttctcagctgatggtaagctgcttgctactggtggtcatgataaaaaggttactttgtggtgtacagattctctgaagcctaaatccttcctggaagagcactcgtttcttatcactgatgttagatttagcccaagcatgtcgcgccttgcaacatcctccttcgacaaaactgtgcgggtttgggatgcagataacactgactattcactccgaactttcacgggccattcagcatctgtcatgtcacttgattttcatccaaacaaagaggatatgatatgctcctgtgatggtgatggggaagtgcgcagctggagcataaataatggtagctgtttgacatgtgttaaggtgtttaaggcaggtgctactcagatgagatttcaacctcgtaagggaaagtatctagcagctgcctcagagaaagcaatctacatacttgatggggagacacaacatgcttgtagaagccccttgcaggggcacaataagaatattcaatcgctttgttgggactctgctggtgaatatctggcttctgtcagtgaagactcagtcagaatatggtcattcagttctggacgtgatggtgaatttgtgcacgaattgaatcgcagtggaaatcagttccactcatgtgttttccacccaacttatcaatccttgttagtgattggttgttacgagtccttggaactttgggacataagggagaagaacaccatgaccttcaacaatgcgcatgacggtttggttgcagccctggcagcatccagtgcaacagggaaggttgcctcagtaagccatgataggactctcaagctctggaaatgacttgtatgaaacccatgttggacttctgtattctggctgttagatgatagacaaacaagactttgccaaaaatgaccacatgacgaaaaggttgctgacaagatactctggagccgcgtgggctcaagaactaacagtgttttgttttgtggtcgttgtatgctgttcagtatgccactgaagcttgtaacttgtaactcgtaatagaaactttggttgaagaaagattgtacctcggacaagtggcaaatatttattctctaaaatattctgcattttgttttttgaccttgtattttaacgtaattgagcctgaagcatagttttattgccggtaaaactaca

SEQ ID NO: 200489 - DNA, 694 bp, Zea Mays
agccgcagccgccgccgccgcctctctctcccttccctcttctctctgccctcacctctctcccccttccatcacctcgctagtaacaggtcaccgtgtgtgtgcgcgccatggggattcatctgccgccgcctgccctcgccttctgcctctcggcgcccactcggttctagtggccgcttcgaggaggcgctcgcgcgcatcgaggagctccaggagcgcgacactggcgccgacgatagcagcacagcctcgtcgttcttgagcgacggagaggcggcgtccggtggcattcagagacgtgcgtgacggtcggaggtcgtcgagcgcgtctagatagcatccaagacaaatagcgttgttcgcgatctgaggcagctggtaggcagtctgggcttgggcgcacgcgagccagagagggagggctgggagcacgtcatctccaagagcagcgacgacgtctcctacaaggcctggtgcgacaagcccacggtagttgccaattgcgtacatgcattgcaacagatctgggctctagaagctgctaacttggtagcagaaagattgaggcattgcatagcaaaccactggatcaaagagtttagtgaatggccacagtgcatgttcttgagttgcaatcaaagttccttccatataataataacaaaatatttgacataatgaatctgttgga

SEQ ID NO: 200490 - DNA, 760 bp, Zea Mays
tttcgttcaagaaatagcatccaagacaaatagcgctgttcgcgatctgaggcagctggtaggcagtctgggcttgggcgcacgcgagccagagagggagggctgggagcacgtcatctccaagagcagcgacgacgtctcctacaaggcctggtgcgacaagcccacggtagttgccaattgcgtacatgcattgcaacagatctgggctctagaagctgctaacttggtagcagaaagattgaggcattgcatagcaaaccactggatcaaagagtttagtgaatggccacagtgcatgttcttgagttgcaatcaaagttccttccatataataataacaaaatatttgacataatgaatctgttggaggatagacttcaacatgcaaatggagtcgttgttttggcaacaattaaagtttttctccattcccatgactgttgttcatcaacagcaagagaagaaggaagacaagtcagacaaaacagaagacgagaagaactgatgtagccatgttcatgcttccactgttgaaatgcatattcaacatagcttgctcagctcctatctgttgtttcaacgttgatttaaaagaagagctggtagttgtgggctttcgaacaatagctggaatgatctagctagctatatgtaaatgatctagttgtgaatgatattataactgtgatgcttttgtgaatatataattgtggtgcttttgtgtttgtgatggatctatgactgtggtatactgatt

SEQ ID NO: 200491 - DNA, 815 bp, Zea Mays
agccgcagccgccgccgccgcctctctctcccttccctcttctctctgccctcacctctctcccccttccatcacctcgctagtaacaggtcaccgtgtgtgtgcgcgccatggggattcatctgccgccgcctgccctcgccttctgcctctcggcgcccactcggttctagtggccgcttcgaggaggcgctcgcgcgcatcgaggagctccaggagcgcgacactggcgccgacgatagcagcacagcctcgtcgttcttgagcgacggagaggcggcgtcgcggccagcaggcgagcagcagtcgcactccgcagatttcttgagcgacggagaggcggcgtccggtggcattcagagacgtgcgtgacggtcggaggtcgtcgagcgcgtgtaagcttgttgaccattttcagcatgtgtaaattggcggttagatttcgttcaagaactagatagcatccaagacaaatagcgttgttcgcgatctgaggcagctggtaggcagtctgggcttgggcgcacgcgagccagagagggagggctgggagcacgtcatctccaagagcagcgacgacgtctcctacaaggcctggtgcgacaagcccacggtagttgccaattgcgtacatgcattgcaacagatctgggctctagaagctgctaacttggtagcagaaagattgaggcattgcatagcaaaccactggatcaaagagtttagtgaatggccacagtgcatgttcttgagttgcaatcaaagttccttccatataataataacaaaatatttgacataatgaatctgttgga

SEQ ID NO: 200492 - DNA, 945 bp, Zea Mays
agccgcagccgccgccgccgcctctctctcccttccctcttctctctgccctcacctctctcccccttccatcacctcgctagtaacaggtcaccgtgtgtgtgcgcgccatggggattcatctgccgccgcctgccctcgccttctgcctctcggcgcccactcggttctagtggccgcttcgaggaggcgctcgcgcgcatcgaggagctccaggagcgcgacactggcgccgacgatagcagcacagcctcgtcgttcttgagcgacggagaggcggcgtcgcggccagcaggcgagcagcagtcgcactccgcagatttcttgagcgacggagaggcggcgtccggtggcattcagagacgtgcgtgacggtcggaggtcgtcgagcgcgtgtaagcttgttgaccattttcagcatgtgtaaattggcggttagatttcgttcaagaagtaagtgctacatttcttgtgtccttaaatcaattaataccactgctgcttgttcactggacatgttttagctagatagcatccaagacaaatagcgttgttcgcgatctgaggcagctggtaggcagtctgggcttgggcgcacgcgagccagagagggagggctgggagcacgtcatctccaagagcagcgacgacgtctcctacaaggcctggtgcgacaagcccacgaacatcaaacctgagttgcttaaatgagcttatgtttgtcacgtggcttctaccaaaaggtagttgccaattgcgtacatgcattgcaacagatctgggctctagaagctgctaacttggtagcagaaagattgaggcattgcatagcaaaccactggatcaaagagtttagtgaatggccacagtgcatgttcttgagttgcaatcaaagttccttccatataataataacaaaatatttgacataatgaatctgttgga

SEQ ID NO: 200493 - DNA, 1065 bp, Zea Mays
gaccaccatcagcgtacttcactctgtcttttcacaacaagttcattcaatatacttagggtggtttcatccggcaagaactgtattaccttctgaaagacgagaaagatgtgcatttctcatttggaagcgtagccggtaatgggatcgagcaagcaacacaagggatgcggtcatccaagttctgcctcaacattgcagcgatgagattgagctcccgtttgaggatgtcctcgactactcgaagttcagtgtcatagtacgtggcgcagacgcagtcaagaaggggtttctaatgaacctgatcaaagggatcagccgagaagagtggacacgcatgtggaacaggctaaaggaagtggaaaagcactttgagtaccaatacccatctcagaccgatgatgccgtgcagatgatatggaaggccattgctcggaaggtgccgtctatccggctgaagattaacagactgcaaagattttctctgtttgagactaacaggacagatgagactctacccccatcttcttcttggctacagaatcaggctccttgattttggactagcaagctcaggctttcgccatgttttcaatctcgtagaatcaagagttgatactgaagaccaaatcttaatcgcttgactgggggcagatgttagtatgttacagctgcagacattagcggatagtaaagttgaaacactttagcatagcagaattacatatccagtggcacatcattttcttcatttttttttcttttgcttgcgattcatccaaagtgtcctcggctgcagactaaggacaatgaattttgtatgtgaagctgtatattctaggcggcaatatagttactgatcagttacagttgctgagcacttccgattcatgtccactaagtctaaagtcacgtagggaagggaggttctgcagctggagaaaagggtgaatatcacactgtgggtggtaggttattagctggagggttgagataggtgtgtggcatccggatagtcatatgccactgaaagcttggcaaaactgtgaacggggcgggctcacc

SEQ ID NO: 200494 - DNA, 554 bp, Zea Mays
tactctcatctactacttgaaatgactacttcaaggcgccttgctgacaggaagaccgcaaagttccagaagaacatcaccaggaggggttctgtgcctgaaaccactgtcaagaagggaaatgactaccctgttggccctctagtgcttgggttcttcatctttgtcgtcattggatcatcgttgtttcagatcatcaggacggcaaccagcggcggggtggcttgagagccggcccacatctaatccccagtatagagagttgcttgttatacatgcatccagctaggattgggtagcagctaaaatgttaaacgtgacaagactgccctgcattccgttcatttggtgggccttgaatctggaactgaaccataaggcagaatcatgtaccttatataaagtgttaaatgggtaactggatctcagtgtttcatttaatctttccccggtgttggattttttgtgtgtgtgattctaagatactatgcctttgttcacctgtgttggcttgtgacaattgaagtttcagtagctgcactcaacatagcccc

SEQ ID NO: 200495 - DNA, 652 bp, Zea Mays
ataaagcaccctctccttgcgcgaattcggacacggccaccacacatcccttcctctctttctcctcgaggctcgagcattcgtgctgctccgaccccaccgccacaggctcggcggtccggcgatctcgctcaccggcgggaacatggaagaccgcaaagttccagaagaacatcaccaggaggggttctgtgcctgaaaccactgtcaagaagggaaatgactaccctgttggccctctagtgcttgggttcttcatctttgtcgtcattggatcatcgttgtttcagatcatcaggacggcaaccagcggcggggtggcttgagagccggcccacatctaatccccagtatagagagttgcttgttatacatgcatccagctaggattgggtagcagctaaaatgttaaacgtgacaagactgccctgcattccgttcatttggtgggccttgaatctggaactgaaccataaggcagaatcatgtaccttatataaagtgttaaatgggtaactggatctcagtgtttcatttaatctttccccggtgttggattttttgtgtgtgtgattctaagatactatgcctttgttcacctgtgttggcttgtgacaattgaagtttcagtagctgcactcaacatagcccc

SEQ ID NO: 200496 - DNA, 560 bp, Zea Mays
gtagaaaccagcttcactatagctaaccaggctatggtcctgttgctgaaggaagacctgtgagaatgaggcgtctcccatgttgtggcctcggcttaggctggtgtctgttcataactgggtttttcttggctgccattccatggttcattggagctttcgttcttatatgtgtgcgggtacatgaccaacgagagaaaccaggatacgttgcttgcacaattgctgccgttgttgctgccgttgccatcctcttgggggtaactaaaggaacgcacgtgtggtgaattgcctccagagaaggcaatcaatgtgtatttgcgttgtatatctgtgtgtgctaaaaagtgtggagcaacatccatgtgatcttatgtccatatatattctactttgcaatgaagtttgaaatgtagtaatgtaccatctgcttcttgtaagcagcactgcatcatatataataagataccttttatttaaattgcggaatttctgttttcgaatgaagatgcagcactggacgtctcagatattatatagtacttcctccgtttcttttt

SEQ ID NO: 200497 - DNA, 2489 bp, Zea Mays
gaaaaaagggaccagagggccggaagcccggaaccaaaacctagacgaaccacacaggcagtcaggcacagcgcgggccggggagatagataggcagacaggcaggcaggggggcgacggcacggggcggggctagccaaccagaccaacccaaaccctagctcaccgctcgttccattccaatccatggaggtggcgctatgagccgccgccgggacggcgggacgtggagctggtgcggccggggaagacgagtcgaggatgacggccagatcggacgatcccggcgtctcgccagggacgtcggcggcggctggcggcgagatctggggcacgtgggaggagctcctcctggcgtgtgccgtacggaagcacggtaccgccagctgggactccgtggccatggagatgctgtcccgctgccctcccgccgcggccgacagcctcacgcccgctgggtgccgcctgcggtatcgcctgctccaccgccggttcaccgccgccgccgccgtaaacggtgacgaggagcccgacgcggcctccgccgactgctgcgtggaggagctccgcaagctgcgcgtcgccgagctccgccgcgaggtcgagagatacgacctctcgatcgggtcattgcaatctagagtggaaaggcttaaagaggagagagcgaggagcatctccggcgaggccaatccagtaccggcggtgaaggaggacggcgaggaggagccggcggaggggaggaaagaatctctggaggaggagggcgacgatgccggcggcggggaggaggatcgtgtctccggcggcgagtccgggcggtcgtgcaaggagtccaactcgtcagatctgaagcggccgcggccagcgcgagacgccggggacggcgacgcggcggcgaggagggaggacgagggggcaggagacgccgcccgcgagtcgtcggctgtgaagcgcgagcaggtctccggtgagtcggtggttgggtccaaggacacggtggcggcggctgacacggagaaggagagcagcgacgtgcagagctcggccagcccgtcccgtcgccgcgagcgggagatcggcgccggcgaggacgcggatgtggcctcagcgccgccgccgccagcgcccgcagcggcggtcctccccgctgcggaggccgaggcgttgcgcgcgttcctcgaggtggtgcgaaccagcaagccgggctccgtgttcgagcgccggctcgagagccaggacgacgcgaaatacaggtgcaccatcaggcgccacgtggacctggagacggtgaggtccaggctggacggtgggtccggcagctacgcctcggcgaccgagttctaccgcgacctgctcctgctgtgcgccaacgcgctggtcttctacccgcgcggctcgcccgagcgttccgccgcggcgcggacgcgcgcgctcgtcgccaagcacatgtccaaggaccagccggggccctcggggaaggctgtcgcggggccggcggcgtccaagaaggccaaggcggaggccgacgttgggtcgctgctggagaagacggcgcccatcatcgtgtgccggaagcggagctctatcgccaaggccgccgcggcggccaccgccaaagaggagagatcggagaaggcggagtccgacaaggagggcgagaagcagcaggaggcggtgggcaagaggaaggcggcggccgccgccaaggacagggcggcgtggggcccgagaacgaacaagacccgcggcgggcctgctgtccggaaggcgtcggctcagagccacaagggggcgtcggcggcggcggacaacggctcggacagcgacgcaccgcccgaggaggccaagaagcagcctgccgctgacaagaaaggtggtggtggcggcggtgtcgccaagaagcgcaacgccgtcaacttcctcaaccggatgaagcaaggtggctcggcgccgtcgacggagcgggtgtcgctactggagacgctgaagctctcggccgcggcggagcagaagaaggccgggaaaggcgagggcaaggagcccgcgggcgggtccggttccaagaaggccacgccggggaggaggaacgttggcaggccaccgaaacgcgcggctgcccctccatccccgccaccgtccaagagggcaaagggcggcggcggcggcgggaaacgcgggggcaggaagtgaagccaagtgggatggagtgggaagcattaggaagctgtaggcccagtctcagaccgtcccagctcaaccgtgtgtaaatgacgtagggttgtaggagcgttcggtccgagcttttgtaccgtatgccagtggtgtaggggtggtactgttttttgggaggaaaacaggatgagttgacctgcgctcgcgggactgcattgatgaagagatggattgtggaagacgattcgtttagaaactgtcgtcgaggaatacatttttttggctgaaatttgaaacctgtagcgatggaatag

SEQ ID NO: 200498 - DNA, 2538 bp, Zea Mays
gaaaaaagggaccagagggccggaagcccggaaccaaaacctagacgaaccacacaggcagtcaggcacagcgcgggccggggagatagataggcagacaggcaggcaggggggcgacggcacggggcggggctagccaaccagaccaacccaaaccctagctcaccgctcgttccattccaatccatggaggtggcgctatgagccgccgccgggacggcgggacgtggagctggtgcggccggggaagacgagtcgaggatgacggccagatcggacgatcccggcgtctcgccagggacgtcggcggcggctggcggcgagatctggggcacgtgggaggagctcctcctggcgtgtgccgtacggaagcacggtaccgccagctgggactccgtggccatggagatgctgtcccgctgccctcccgccgcggccgacagcctcacgcccgctgggtgccgcctgcggtatcgcctgctccaccgccggttcaccgccgccgccgccgtaaacggtgacgaggagcccgacgcggcctccgccgactgctgcgtggaggagctccgcaagctgcgcgtcgccgagctccgccgcgaggtcattgcaatctagagtggaaaggcttaaagaggagagagcgaggagcatctccggcgaggccaatccagtaccggcggtgaaggaggacggcgaggaggagccggcggaggggaggaaagaatctctggaggaggagggcgacgatgccggcggcggggaggaggatcgtgtctccggcggcgagtccgggcggtcgtgcaaggagtccaactcgtcagatctgaagcggccgcggccagcgcgagacgccggggacggcgacgcggcggcgaggagggaggacgagggggcaggagacgccgcccgcgagtcgtcggctgtgaagcgcgagcaggtctccggtgagtcggtggttgggtccaaggacacggtggcggcggctgacacggagaaggagagcagcgacgtgcagagctcggccagcccgtcccgtcgccgcgagcgggagatcggcgccggcgaggacgcggatgtggcctcagcgccgccgccgccagcgcccgcagcggcggtcctccccgctgcggaggccgaggcgttgcgcgcgttcctcgaggtggtgcgaaccagcaagccgggctccgtgttcgagcgccggctcgagagccaggatattttttcttttccactttgtcggttctttcgctgctccactgaccgctgggcccaaaaatgccgctcgcaggacgacgcgaaatacaggtgcaccatcaggcgccacgtggacctggagacggtgaggtccaggctggacggtgggtccggcagctacgcctcggcgaccgagttctaccgcgacctgctcctgctgtgcgccaacgcgctggtcttctacccgcgcggctcgcccgagcgttccgccgcggcgcggacgcgcgcgctcgtcgccaagcacatgtccaaggaccagccggggccctcggggaaggctgtcgcggggccggcggcgtccaagaaggccaaggcggaggccgacgttgggtcgctgctggagaagacggcgcccatcatcgtgtgccggaagcggagctctatcgccaaggccgccgcggcggccaccgccaaagaggagagatcggagaaggcggagtccgacaaggagggcgagaagcagcaggaggcggtgggcaagaggaaggcggcggccgccgccaaggacagggcggcgtggggcccgagaacgaacaagacccgcggcgggcctgctgtccggaaggcgtcggctcagagccacaagggggcgtcggcggcggcggacaacggctcggacagcgacgcaccgcccgaggaggccaagaagcagcctgccgctgacaagaaaggtggtggtggcggcggtgtcgccaagaagcgcaacgccgtcaacttcctcaaccggatgaagcaaggtggctcggcgccgtcgacggagcgggtgtcgctactggagacgctgaagctctcggccgcggcggagcagaagaaggccgggaaaggcgagggcaaggagcccgcgggcgggtccggttccaagaaggccacgccggggaggaggaacgttggcaggccaccgaaacgcgcggctgcccctccatccccgccaccgtccaagagggcaaagggcggcggcggcggcgggaaacgcgggggcaggaagtgaagccaagtgggatggagtgggaagcattaggaagctgtaggcccagtctcagaccgtcccagctcaaccgtgtgtaaatgacgtagggttgtaggagcgttcggtccgagcttttgtaccgtatgccagtggtgtaggggtggtactgttttttgggaggaaaacaggatgagttgacctgcgctcgcgggactgcattgatgaagagatggattgtggaagacgattcgtttagaaactgtcgtcgaggaatacatttttttggctgaaatttgaaacctgtagcgatggaatag

SEQ ID NO: 200499 - DNA, 1505 bp, Zea Mays
cttaatgatagccacacggatcaagcagcactcaccaaaccacatttgatggccacatcacccctgagctgcttctccgcgcgtcccagacccagatctccgggcaccgccgtctggttgcttccggccgccgttctcctcctcctcctcaaccggtggtcgcacatggcctcttacccttctgtctcccctcgtggctccggctcggtgcaggtcgggcgcgccgagctttactcgaagatggcgcgtgacctcgacgagcgcggcgcggcgttcctgaagggcggcgagacgtcgcagtcgctcacgctctcggacctcttcgacaccgcagatgacggcgccgtcgtacccaggctcaaggccgccgacccgccagtgcgcgcgaatgtgctctatatggaccccaagttcgccgctgtgatctcggagaagaactaagttagcccgtgattggtcagatggctgtataagttcctttgggaggtcaggtcagggcagtgctcattcagtatgttttgggcttgcaggaaagctgtaaaggacgtgtttcttccttattttgaccaagctatctggttccaaaatacgagcatgtatcacttcagcatgtttcatgcctcccatcacttggagcccattgtagcaactgaggatgagattgaagccgaagtggaggcagtaaaaggtgtcaccaagaatttgtgtccgcttaaaattgtattggacagagtggttttgacctcaaccggtgtgcttcttggcctgtggcaggttgaatctggtactgatcctgcagaaatccgctcaagattgagagaagctcttcctcgtgcacctcaaaagcaactgtatgaccctgttctgcttcacacctcgtttgcacgaattctgggacatcccaggctccctaaagagcaaagtgcatcatcgtttgataatgtcaagttcttccatgagctagttgctcaaattaatgagaagatctgtggctttcaggcgacgatatcagagctatggtatgtcgaagagtacgatgttcttgcattggcactgaatggaaagatgaaggtgcggaggctccaccttggctgcaatcgtcagggcatctgaagctagagaggtcatggaaacgggaaaggattaggagatgcacagccaccaaacagacttttttcgcttgcatgtctcgccgaaagggccaccttggtactgcccagctgagcgagatgtgctacaatctgcctttacataccgagaactgacaagttatattgacctagactatcttcagcagattatctatcatcatttctatattcaaatttcactttacgaacattagtctatagtacagaataaactgttggacacagactaatgtttatgtaggaacagtatgcatgttttaacaatatataatacaattatttgagcacaacaactattaaagtgatgtttggttcagacattgttaagggaatggtaatgaaatctcttactgg

SEQ ID NO: 200500 - DNA, 3840 bp, Zea Mays
ctcatacgacaccacaccaccgccgtggctccttcctcattgtggtttcctcagcgactacttttttaacagttgttcatcgcattgaggaagggaggccggctggtgctactgcttttctagtacctgcccacctgcacttgcatctcctgcttccctgagcggcctcccggctgcgaatccaccagcatttcccgaggcccagcgccgcgtgtgcctgtggggcggagtcaggaaatgctcggagctccattccacggctgaaacttctgggaaggtttaagtttagggagaccggcagcactaaagaaactagcctgagcctctctttcagcctctcacccactatcgtgagggcattttgtaccttccaagaaagagagtaaggagaacttgacctcagcgctagagaagaatatggcagccactgaagctgccacggacacaggcagttcaaggaggtcacaagatgacactacaacattagtcccacacagtgggaatttgggagaaccaatccagaagggcgtgaagaccaccagattcaaagatgatgacgaggttgtggaaatcaccattgtacagcgcgattcagtggcaatcgaagatgtcagggtagtcgatgatggtggctcagggcatagtaatgggtttgatggcctgtcacttgtgtcaccttcctcatcaaggagcggcaagctatcatcaaagattaggcaagtgaaaaatggactaaagatgaagaactcaagcactaaggcgccacagacacagttgggaaagaacatgaggaagagattggacagaagcaagagcggggctgctgtagcgctcaagggcttgcagtttgtgactgcaaaagttggtcatgatggctgggctgtagtggagaaacggttcaacgagctacaggttgatggtgtgctgctacgttcaagatttgggaaatgcattgggatggatggatctgatgagtttgcagtgcaattgtttgattcattagcaagaaagagagggataacaaagcaggtgctgactaaagatgagctcaaagatttctgggagcaactcagtgatcagggttttgacaaccgtttacagatattctttgacatggttgataagaatgccgatggaagaatcacagaagaggaggttaaggagattattaccctcagtgcatcagcaaacaaactttccaagctcaaggaacgagctgatgagtacacggcactcataatggaagaacttgaccgtgacagccttggatacattgagcttgaggatctgaaggcacttttgctgcaatcaccttctcaagttgttgcaagatcaacaacgcatagctcgaaacttagcaaagctcttagcatgaagcttgcatcaaacaaggacacaggtccattttaccactactggcaagagttcatgtacttccttgaggagaactggaagcgcatttgggttatgactctctggctctcaatctgcattggcctctttatttggaagttcatccaataccgtaatcgagcagtatttcacatcatgggttattgtgtgaccactgcaaaaggtgctgcagagaccctcaaattcaatatggccctggttctttttcctgtttgccgaaatacaatcacatggattcgatcaaagacaaagatcggtgctgttgtgcccttcaatgacaacataaacttccataaggtaatagcagcaggtgttgcagttggtgttgttttgcatgcaggtgctcacctgacatgtgattttcctctgctgctgcatgcaagtgatgctgcctatgaaccaatgaagcctttctttggagacaaaaggccaccaaattactggtggtttgtaaagggaactgaagggtggacaggtgtggtcatggttgtacttatgactatagctttcgtattggcccagccatggtttcggcgtaataagctcaaggattctaatcccctcaagaaaatgactggcttcaatgccttttggtttactcaccacttatttgttattgtgtatgcactgctcattgtccatgggacctgtttatatctaagcaggaaatggtacaagaaaacgacatggatgtaccttgctgtccctgtgctcttgtatgtaagtgagcgcattcttcggctatttaggagccatgatgctgttaggattcagaaggttgcagtatatccagggaatgttttggctctctatatgtccaagccacctggattcaggtatcggagtgggcagtatatcttcataaaatgcagtgatgtctctccatacgaatggcacccattttcgattacatcagcaccaggagatgattatcttagtgtccacattcgcacaaggggtgattggacttcacgtcttaggactgtcttctctgaggcatgccgccctccatctgatggagaaagtggactccttagagctgacccttccaaggggatcaccgagaccaacgcgaggttcccgaaactcttgattgatggaccatacggtgctccagcgcaagactatcaggaatatgatgtgctcctgctcattggactgggcattggagccacaccattgattagcattgtgaaggatgtacttaaccacatccagcttggaggatctgttgcaggcacggagcctgagggcagtggcaaggccaagaagaggccattcatgacaaagagggcctacttctactgggtgaccagggaagaggggtcctttgaatggttccgaggggtcatgaatgaggtggctgagaaggacaaggatggagtcattgaactccacaaccactgctcgagtgtgcaccaggaaggggatgtacgttctgccctcattgtcatgctccaggagctccagcacgcgaagaagggagtcgacatcttgtctggaactagtgtcaagacgcattttgcacggccgaattggcgaagcgtcttcaaacatgttgcagtgaaccacgagaaccaacgcatcggagttttctactgtggtgagcccgtccttgtgccacagctacggcagctgtcagcggacttcacccacaagacaaatactaagttcgagttccacaaggagaacttctaatggaggaactggagaaaagctctaggcgtggccctctaatggtttcagaatatgtgaattacgatggttgtaacatatatacgagtagaagaataagacgatgggagttgttttgttgtacatgtcaagagtagatgaattgtctttgcaagcatacaaccttaaaagttgtaacacatgtcagctggttttgacaggtctgtttgttttgtctgctcctgttggagtgttgggcatacactgcttctgtcttttaaagcaccaccactacattgaaagccctgaggaaggtattttacggcacaaatgagtcaggttcacttgtgaattgtgatcctcaactcctgatgctgagtaactggttgtgccttccgtaagtttgctcaaaatgtatgttaaattttatgttgcttgatctcttggcacttccaaaaagtttgtgtgataaatgataagaaatgagatttcccctttttttgcagaatgggtaggtgttctgctgtttcattaagttgaaagcatgtgcaatgtgtgcaaggatctgactgcaatactactcggctaaaatgaagaagaaaacgaaaccacaacaccctaccaaaacaaagatgaaagaaaagaaagaaaaggactgaatatagccactgtgactcacatccagcctctacatgctgcatactctgtcgatcactcgaattcttcacaggcaaagcctcaaaaaaatatcag

SEQ ID NO: 200501 - DNA, 3866 bp, Zea Mays
ttagggagaaaagacaaatgcacattgttcatcgcattgaggaagggaggccggctggtgctactgcttttctagtacctgcccacctgcacttgcatctcctgcttccctgagcggcctcccggctgcgaatccaccagcatttcccgaggcccagcgccgcgtgtgcctgtggttcgtcctccacttactttgtcctttcgctcattctgttccatccctgaaatctgaagggcggagtcaggaaatgctcggagctccattccacggctgaaacttctgggaaggtttaagccaaaccttgttgcagtttagggagaccggcagcactaaagaaactagcctgagcctctctttcagcctctcacccactatcgtgagggcattttgtaccttccaagaaagagagtaaggagaacttgacctcagcgctagagaagaatatggcagccactgaagctgccacggacacaggcagttcaaggaggtcacaagatgacactacaacattagtcccacacagtgggaatttgggagaaccaatccagaagggcgtgaagaccaccagattcaaagatgatgacgaggttgtggaaatcaccattgtacagcgcgattcagtggcaatcgaagatgtcagggtagtcgatgatggtggctcagggcatagtaatgggtttgatggcctgtcacttgtgtcaccttcctcatcaaggagcggcaagctatcatcaaagattaggcaagtgaaaaatggactaaagatgaagaactcaagcactaaggcgccacagacacagttgggaaagaacatgaggaagagattggacagaagcaagagcggggctgctgtagcgctcaagggcttgcagtttgtgactgcaaaagttggtcatgatggctgggctgtagtggagaaacggttcaacgagctacaggttgatggtgtgctgctacgttcaagatttgggaaatgcattgggatggatggatctgatgagtttgcagtgcaattgtttgattcattagcaagaaagagagggataacaaagcaggtgctgactaaagatgagctcaaagatttctgggagcaactcagtgatcagggttttgacaaccgtttacagatattctttgacatggttgataagaatgccgatggaagaatcacagaagaggaggttaaggagattattaccctcagtgcatcagcaaacaaactttccaagctcaaggaacgagctgatgagtacacggcactcataatggaagaacttgaccgtgacagccttggatacattgagcttgaggatctgaaggcacttttgctgcaatcaccttctcaagttgttgcaagatcaacaacgcatagctcgaaacttagcaaagctcttagcatgaagcttgcatcaaacaaggacacaggtccattttaccactactggcaagagttcatgtacttccttgaggagaactggaagcgcatttgggttatgactctctggctctcaatctgcattggcctctttatttggaagttcatccaataccgtaatcgagcagtatttcacatcatgggttattgtgtgaccactgcaaaaggtgctgcagagaccctcaaattcaatatggccctggttctttttcctgtttgccgaaatacaatcacatggattcgatcaaagacaaagatcggtgctgttgtgcccttcaatgacaacataaacttccataaggtaatagcagcaggtgttgcagttggtgttgttttgcatgcaggtgctcacctgacatgtgattttcctctgctgctgcatgcaagtgatgctgcctatgaaccaatgaagcctttctttggagacaaaaggccaccaaattactggtggtttgtaaagggaactgaagggtggacaggtgtggtcatggttgtacttatgactatagctttcgtattggcccagccatggtttcggcgtaataagctcaaggattctaatcccctcaagaaaatgactggcttcaatgccttttggtttactcaccacttatttgttattgtgtatgcactgctcattgtccatgggacctgtttatatctaagcaggaaatggtacaagaaaacgacatggatgtaccttgctgtccctgtgctcttgtatgtaagtgagcgcattcttcggctatttaggagccatgatgctgttaggattcagaaggttgcagtatatccagggaatgttttggctctctatatgtccaagccacctggattcaggtatcggagtgggcagtatatcttcataaaatgcagtgatgtctctccatacgaatggcacccattttcgattacatcagcaccaggagatgattatcttagtgtccacattcgcacaaggggtgattggacttcacgtcttaggactgtcttctctgaggcatgccgccctccatctgatggagaaagtggactccttagagctgacccttccaaggggatcaccgagaccaacgcgaggttcccgaaactcttgattgatggaccatacggtgctccagcgcaagactatcaggaatatgatgtgctcctgctcattggactgggcattggagccacaccattgattagcattgtgaaggatgtacttaaccacatccagcttggaggatctgttgcaggcacggagcctgagggcagtggcaaggccaagaagaggccattcatgacaaagagggcctacttctactgggtgaccagggaagaggggtcctttgaatggttccgaggggtcatgaatgaggtggctgagaaggacaaggatggagtcattgaactccacaaccactgctcgagtgtgcaccaggaaggggatgtacgttctgccctcattgtcatgctccaggagctccagcacgcgaagaagggagtcgacatcttgtctggaactagtgtcaagacgcattttgcacggccgaattggcgaagcgtcttcaaacatgttgcagtgaaccacgagaaccaacgcatcggagttttctactgtggtgagcccgtccttgtgccacagctacggcagctgtcagcggacttcacccacaagacaaatactaagttcgagttccacaaggagaacttctaatggaggaactggagaaaagctctaggcgtggccctctaatggtttcagaatatgtgaattacgatggttgtaacatatatacgagtagaagaataagacgatgggagttgttttgttgtacatgtcaagagtagatgaattgtctttgcaagcatacaaccttaaaagttgtaacacatgtcagctggttttgacaggtctgtttgttttgtctgctcctgttggagtgttgggcatacactgcttctgtcttttaaagcaccaccactacattgaaagccctgaggaaggtattttacggcacaaatgagtcaggttcacttgtgaattgtgatcctcaactcctgatgctgagtaactggttgtgccttccgtaagtttgctcaaaatgtatgttaaattttatgttgcttgatctcttggcacttccaaaaagtttgtgtgataaatgataagaaatgagatttcccctttttttgcagaatgggtaggtgttctgctgtttcattaagttgaaagcatgtgcaatgtgtgcaaggatctgactgcaatactactcggctaaaatgaagaagaaaacgaaaccacaacaccctaccaaaacaaagatgaaagaaaagaaagaaaaggactgaatatagccactgtgactcacatccagcctctacatgctgcatactctgtcgatcactcgaattcttcacaggcaaagcctcaaaaaaatatcag

SEQ ID NO: 200502 - DNA, 3725 bp, Zea Mays
gtcaagctgtcaatccatccagcgtttgttagggagaaaagacaaatgcacattgttcatcgcattgaggaagggaggccggctggtgctactgcttttctagtacctgcccacctgcacttgcatctcctgcttccctgagcggcctcccggctgcgaatccaccagcatttcccgaggcccagcgccgcgtgtgcctgtggggcggagtcaggaaatgctcggagctccattccacggctgaaacttctgggaaggtttaagagagtaaggagaacttgacctcagcgctagagaagaatatggcagccactgaagctgccacggacacaggcagttcaaggaggtcacaagatgacactacaacattagtcccacacagtgggaatttgggagaaccaatccagaagggcgtgaagaccaccagattcaaagatgatgacgaggttgtggaaatcaccattgtacagcgcgattcagtggcaatcgaagatgtcagggtagtcgatgatggtggctcagggcatagtaatgggtttgatggcctgtcacttgtgtcaccttcctcatcaaggagcggcaagctatcatcaaagattaggcaagtgaaaaatggactaaagatgaagaactcaagcactaaggcgccacagacacagttgggaaagaacatgaggaagagattggacagaagcaagagcggggctgctgtagcgctcaagggcttgcagtttgtgactgcaaaagttggtcatgatggctgggctgtagtggagaaacggttcaacgagctacaggttgatggtgtgctgctacgttcaagatttgggaaatgcattgggatggatggatctgatgagtttgcagtgcaattgtttgattcattagcaagaaagagagggataacaaagcaggtgctgactaaagatgagctcaaagatttctgggagcaactcagtgatcagggttttgacaaccgtttacagatattctttgacatggttgataagaatgccgatggaagaatcacagaagaggaggttaaggagattattaccctcagtgcatcagcaaacaaactttccaagctcaaggaacgagctgatgagtacacggcactcataatggaagaacttgaccgtgacagccttggatacattgagcttgaggatctgaaggcacttttgctgcaatcaccttctcaagttgttgcaagatcaacaacgcatagctcgaaacttagcaaagctcttagcatgaagcttgcatcaaacaaggacacaggtccattttaccactactggcaagagttcatgtacttccttgaggagaactggaagcgcatttgggttatgactctctggctctcaatctgcattggcctctttatttggaagttcatccaataccgtaatcgagcagtatttcacatcatgggttattgtgtgaccactgcaaaaggtgctgcagagaccctcaaattcaatatggccctggttctttttcctgtttgccgaaatacaatcacatggattcgatcaaagacaaagatcggtgctgttgtgcccttcaatgacaacataaacttccataaggtaatagcagcaggtgttgcagttggtgttgttttgcatgcaggtgctcacctgacatgtgattttcctctgctgctgcatgcaagtgatgctgcctatgaaccaatgaagcctttctttggagacaaaaggccaccaaattactggtggtttgtaaagggaactgaagggtggacaggtgtggtcatggttgtacttatgactatagctttcgtattggcccagccatggtttcggcgtaataagctcaaggattctaatcccctcaagaaaatgactggcttcaatgccttttggtttactcaccacttatttgttattgtgtatgcactgctcattgtccatgggacctgtttatatctaagcaggaaatggtacaagaaaacgacatggatgtaccttgctgtccctgtgctcttgtatgtaagtgagcgcattcttcggctatttaggagccatgatgctgttaggattcagaaggttgcagtatatccagggaatgttttggctctctatatgtccaagccacctggattcaggtatcggagtgggcagtatatcttcataaaatgcagtgatgtctctccatacgaatggcacccattttcgattacatcagcaccaggagatgattatcttagtgtccacattcgcacaaggggtgattggacttcacgtcttaggactgtcttctctgaggcatgccgccctccatctgatggagaaagtggactccttagagctgacccttccaaggggatcaccgagaccaacgcgaggttcccgaaactcttgattgatggaccatacggtgctccagcgcaagactatcaggaatatgatgtgctcctgctcattggactgggcattggagccacaccattgattagcattgtgaaggatgtacttaaccacatccagcttggaggatctgttgcaggcacggagcctgagggcagtggcaaggccaagaagaggccattcatgacaaagagggcctacttctactgggtgaccagggaagaggggtcctttgaatggttccgaggggtcatgaatgaggtggctgagaaggacaaggatggagtcattgaactccacaaccactgctcgagtgtgcaccaggaaggggatgtacgttctgccctcattgtcatgctccaggagctccagcacgcgaagaagggagtcgacatcttgtctggaactagtgtcaagacgcattttgcacggccgaattggcgaagcgtcttcaaacatgttgcagtgaaccacgagaaccaacgcatcggagttttctactgtggtgagcccgtccttgtgccacagctacggcagctgtcagcggacttcacccacaagacaaatactaagttcgagttccacaaggagaacttctaatggaggaactggagaaaagctctaggcgtggccctctaatggtttcagaatatgtgaattacgatggttgtaacatatatacgagtagaagaataagacgatgggagttgttttgttgtacatgtcaagagtagatgaattgtctttgcaagcatacaaccttaaaagttgtaacacatgtcagctggttttgacaggtctgtttgttttgtctgctcctgttggagtgttgggcatacactgcttctgtcttttaaagcaccaccactacattgaaagccctgaggaaggtattttacggcacaaatgagtcaggttcacttgtgaattgtgatcctcaactcctgatgctgagtaactggttgtgccttccgtaagtttgctcaaaatgtatgttaaattttatgttgcttgatctcttggcacttccaaaaagtttgtgtgataaatgataagaaatgagatttcccctttttttgcagaatgggtaggtgttctgctgtttcattaagttgaaagcatgtgcaatgtgtgcaaggatctgactgcaatactactcggctaaaatgaagaagaaaacgaaaccacaacaccctaccaaaacaaagatgaaagaaaagaaagaaaaggactgaatatagccactgtgactcacatccagcctctacatgctgcatactctgtcgatcactcgaattcttcacaggcaaagcctcaaaaaaatatcag

SEQ ID NO: 200503 - DNA, 3905 bp, Zea Mays
ctagcagcagactagcagcccgagggagtcaagctgtcaatccatccagcgtttgttagggagaaaagacaaatgcacagtgagtaaaatttatagagataaaatactgtaaaagtggtatcagcaagcagcagccaacaaacctcaactcgccgcaaactgacacgaacaccagcgctactcatacgacaccacaccaccgccgtggctccttcctcattgtggtttcctcagcgactacttttttaacagttgttcatcgcattgaggaagggaggccggctggtgctactgcttttctagtacctgcccacctgcacttgcatctcctgcttccctgagcggcctcccggctgcgaatccaccagcatttcccgaggcccagcgccgcgtgtgcctgtggggcggagtcaggaaatgctcggagctccattccacggctgaaacttctgggaaggtttaagccaaaccttgttgcagtttagggagaccggcagcactaaagaaactagcctgagcctctctttcagcctctcacccactatcgtgagggcattttgtaccttccaagaaagagagtaaggagaacttgacctcagcgctagagaagaatatggcagccactgaagctgccacggacacaggcagttcaaggaggtcacaagatgacactacaacattagtcccacacagtgggaatttgggagaaccaatccagaagggcgtgaagaccaccagattcaaagatgatgacgaggttgtggaaatcaccattgtacagcgcgattcagtggcaatcgaagatgtcagggtagtcgatgatggtggctcagggcatagtaatgggtttgatggcctgtcacttgtgtcaccttcctcatcaaggagcggcaagctatcatcaaagattaggcaagtgaaaaatggactaaagatgaagaactcaagcactaaggcgccacagacacagttgggaaagaacatgaggaagagattggacagaagcaagagcggggctgctgtagcgctcaagggcttgcagtttgtgactgcaaaagttggtcatgatggctgggctgtagtggagaaacggttcaacgagctacaggttgatggtgtgctgctacgttcaagatttgggaaatgcattgggatggatggatctgatgagtttgcagtgcaattgtttgattcattagcaagaaagagagggataacaaagcaggtgctgactaaagatgagctcaaagatttctgggagcaactcagtgatcagggttttgacaaccgtttacagatattctttgacatggttgataagaatgccgatggaagaatcacagaagaggaggttaaggagattattaccctcagtgcatcagcaaacaaactttccaagctcaaggaacgagctgatgagtacacggcactcataatggaagaacttgaccgtgacagccttggatacattgagcttgaggatctgaaggcacttttgctgcaatcaccttctcaagttgttgcaagatcaacaacgcatagctcgaaacttagcaaagctcttagcatgaagcttgcatcaaacaaggacacaggtccattttaccactactggcaagagttcatgtacttccttgaggagaactggaagcgcatttgggttatgactctctggctctcaatctgcattggcctctttatttggaagttcatccaataccgtaatcgagcagtatttcacatcatgggttattgtgtgaccactgcaaaaggtgctgcagagaccctcaaattcaatatggccctggttctttttcctgtttgccgaaatacaatcacatggattcgatcaaagacaaagatcggtgctgttgtgcccttcaatgacaacataaacttccataaggtaatagcagcaggtgttgcagttggtgttgttttgcatgcaggtgctcacctgacatgtgattttcctctgctgctgcatgcaagtgatgctgcctatgaaccaatgaagcctttctttggagacaaaaggccaccaaattactggtggtttgtaaagggaactgaagggtggacaggtgtggtcatggttgtacttatgactatagctttcgtattggcccagccatggtttcggcgtaataagctcaaggattctaatcccctcaagaaaatgactggcttcaatgccttttggtttactcaccacttatttgttattgtgtatgcactgctcattgtccatgggacctgtttatatctaagcaggaaatggtacaagaaaacgacatggatgtaccttgctgtccctgtgctcttgtatgtaagtgagcgcattcttcggctatttaggagccatgatgctgttaggattcagaaggttgcagtatatccagggaatgttttggctctctatatgtccaagccacctggattcaggtatcggagtgggcagtatatcttcataaaatgcagtgatgtctctccatacgaatggcacccattttcgattacatcagcaccaggagatgattatcttagtgtccacattcgcacaaggggtgattggacttcacgtcttaggactgtcttctctgaggcatgccgccctccatctgatggagaaagtggactccttagagctgacccttccaaggggatcaccgagaccaacgcgaggttcccgaaactcttgattgatggaccatacggtgctccagcgcaagactatcaggaatatgatgtgctcctgctcattggactgggcattggagccacaccattgattagcattgtgaaggatgtacttaaccacatccagcttggaggatctgttgcaggcacggagcctgagggcagtggcaaggccaagaagaggccattcatgacaaagagggcctacttctactgggtgaccagggaagaggggtcctttgaatggttccgaggggtcatgaatgaggtggctgagaaggacaaggatggagtcattgaactccacaaccactgctcgagtgtgcaccaggaaggggatgtacgttctgccctcattgtcatgctccaggagctccagcacgcgaagaagggagtcgacatcttgtctggaactagtgtcaagacgcattttgcacggccgaattggcgaagcgtcttcaaacatgttgcagtgaaccacgagaaccaacgcatcggagttttctactgtggtgagcccgtccttgtgccacagctacggcagctgtcagcggacttcacccacaagacaaatactaagttcgagttccacaaggagaacttctaatggaggaactggagaaaagctctaggcgtggccctctaatggtttcagaatatgtgaattacgatggtctgtttgttttgtctgctcctgttggagtgttgggcatacactgcttctgtcttttaaagcaccaccactacattgaaagccctgaggaaggtattttacggcacaaatgagtcaggttcacttgtgaattgtgatcctcaactcctgatgctgagtaactggttgtgccttccgtaagtttgctcaaaatgtatgttaaattttatgttgcttgatctcttggcacttccaaaaagtttgtgtgataaatgataagaaatgagatttcccctttttttgcagaatgggtaggtgttctgctgtttcattaagttgaaagcatgtgcaatgtgtgcaaggatctgactgcaatactactcggctaaaatgaagaagaaaacgaaaccacaacaccctaccaaaacaaagatgaaagaaaagaaagaaaaggactgaatatagccactgtgactcacatccagcctctacatgctgcatactctgtcgatcactcgaattcttcacaggcaaagcctcaaaaaaatatcag

SEQ ID NO: 200504 - DNA, 2128 bp, Zea Mays
caaggacaatcgcggacgtctcacgcccagcaatctcccttctggtcccacccaatccacttcgcaagccccgccgcacacttcttccccctgcctccaaaaactcagaaaaccctgaccgccggcggcggccatgcttctccaccaccgcctcctccctcgcctacttcttgttccttccacacatacctccacactcctctgcccctcccgtttgccgcgccgcctctccctctcgccacgcttctacgcgctgccccacctcgcggcaccccagaccgtcgaccactccgacgatgagggggcaccccagggggaggggcagatcaagctcccgctcgaccatctcttcgtgccgcccggggcaacaatggatgcgggggaccaggaggccgtgagcgcacgggtgcttaagggctccaacatcgtgctgggcccatacgcgcgcggcgacgcacaggtggtcaacgcagattttgtaaagagcagcgtgcgtcccgatgactgccctcgggacggccttccggagtttgcactcgttggccggtccaacgtcggcaaatcgtcgctgctcaactcgcttgtccgccgcaagcgccttgcccttacctccaagaagcctgggaagacccaatgtatcaatcatttcaaagtaaatgacagctggtatcttgttgacttgcctggttatggtcctgcccgtccatttcttggagaaatagagggggagagcagagcgttgctactgcaaatattactggaatggatctggcaacaaagtccaacacatggtctgtccaagaaactagtaagaatgtaagaaagagtattttattggataaacttatgaagcatatggcatcgctactatatgcatgaaggagatacggtttgatacttcaatatacatgtgaaaaaccaccatgtcatctaattggtgtttgtgagttcaaaagtttgttttacagactcacaatattgactaagaatgtgtatgcctaatatttttacgtattctacttcgatctatatctgaaaaactctacgtcactgcatgatcttggacttttctctgggaaaattaatcagactacttgttatttgtcatgattcatgtatataacaatgagacatgaattcacagaaatagaaaataaattcgcatcctattatttggaggacatattagttgaaatatttattcgttttcttgcaataacaagagcttttattggacagatatgcttctgcaccacaggaagctcgtaccaattgggatgaatttactagaaattactttctcagtcgggagaatttggtatctgtttttcttcttatagatgcaagtatacctgccaagaagattgatcttgactatgctagttggcttggccaaaacaaggttcccatgacccttgtgttcacaaaatgtgacaagcgcaagaagaagaagaacggcggcaggaaacctgaagaaaacgtggaaactttccagggcctaatccgcgaatacttcgaggccgcgcctccttggatcatgacgagcagcgtgaccaaccagggccgcgacgagatactcctgcacatgtctcagcttaggaattattggctcaagcattgagatgcaatgataaccaaaccagggcgaagcaactagaacagcatgcaaagcactgtcgtccattgatgcatggacattcagcagtcggcgcctccgcaatcaggcgttcgcaccaactaatccagccttttgagctgttgactgtccaatatggccccctgtacatgattacccaatcaacactctggggatgcggacaaggtgctaaaatcagctgatcatggtttttttctttatttctattgtgtacacgtacaatcccaaccaacgttttccccttgttcccatctgattataggcttgtgtatactgtggggttaaatgattaataaattctggtgttagctaatcaccagcgggaatctcacttttttgtctgccacctatatcatatgctcccttggaccctgcagcatacaaatggcaggaggtgcatgaacctgacctgttaagaactggctttgtggtgtacagaatgtattgagagcgccacattattgggatccc

SEQ ID NO: 200505 - DNA, 2077 bp, Zea Mays
ctcgggccttgcagccgcggtccacaaagacaattatctcgctgtctgccgactgccggtgtcagcttcctccggatcaagaagcggcaggtagagcagagaagccagctagctagcgagctgaggagagatggaagcgcagaacggctacagcccgcttcttgccggggacgaccacgaggcgatccacgccaccggcgccggtgatgaaggcgacgacgtcaagctcaggctgctcggatacaagcagcagctcaagcgcgacctctcggtggtagccaacttctccgtgagcttctccatcgtgtcggtggtaacgggcgtgacgacgctgttcgggacgggcctccagttcggcgggccggcgacgatggtgtacggctggcccatcgccggcgccttcaccgcggccgtgggcctcgccatggccgagatctgctccgcctaccccacctccggcggcctctacttctggagcgccaggctctgcacccaccgccgctggggacccttcgccgcctggctcaccggctggttcaatgttgtcggacagtgtgtgccgctctatgcagtgggcggtgaccaccagcgtggactactccctggcgcagctgatccaggtgatcatcctgctcgccaccggcggcaagaacggcggcggctacctggcgtccaagtacatggtgatcggcttccacgccgccatcctgctcagccacgccgtcatcaacagcctccccatcaccttcctctcctttttcggccagttcgccgcggcctggaacatgctaggtgtgtttgtcctgatggttgccgtgccgaccgttgccaccgagagggccagcgccgagttcgtgttcacccacttcaacaccgacaacggcgccggcatccgcagcaacttgtacatctttgtcctgggcctgctcatgagccagtacacgctcacaggatacgacgcctcggcgcatatgaccgaagagacgaagaacgcggacaagaacggccccatcggcatcatcagcgccatcggcatctccatcctcgtgggctggggctacatcctcggcgtcaccttcgcggtcaaggacataccctacctgctgagccccgacaacgacgccggcggctacgccatcgccgaggtgttctacctcgccttcaagagccgctacggcagcggcgccggcgggatcgtctgcctgggggtcgtcgccgtcgccgtctacttctgcggcatgagctccgtcaccagcaactccaggatggcctacgccttctccagggacggcgccatgcccttctcctccgtctggcacaaggtcaacaagcaggaggtgcccatcaacgccgtctggctctcggctctcgtcgcgctctgcatggcgctgccgtctctgggaagcctggtggcgttccaggccatggtttccatcgcgacgatcgggctgtacatctcgtacgcgctgccgatcctgttccgggtgacgctggcgcgcaagtacttcgtgccggggccattcaacctgggccgctacggcgtcctggtcggctgggtcgccgtgctctgggtggccaccatcaccgtgctcttctcgctgccggtcacgtacccggtcaccaaggacacgctcaactacacccccgtcgccgtcggcggcctcctcttcctcgtcctcgcgtcctggctgctcagcgccaggcactggttcaagggccccgtcaccaatctggacggatgaatatgtataattggacatgtatagtagagaggctggcagagacggaagagttgttgccaacgacatgttgtaactactttgttccaaaaattaactagcaaggaaaccgacaggatgaattttctcgatcgtgaaatgcatcagcatgtcgattgcgagcaccatgttttgggtgactcaaatcttcatcgtgagggctcaagggtattatgcccagtccgtaggagaagatcatcaaagctagttgaagtgttctttgttgattggattgttgtggcacccaagttgaacgttaagcttaattaggaggcttcttcaatacagaactacataat

SEQ ID NO: 200506 - DNA, 3066 bp, Zea Mays
ctgtaaacaaattcgccgcgaggggatcgaaaattttctcctccccaaatttctttatttattcggcttggaaactagtgcctcctttatatacacaaacatcgctgctgcccccctccgctctctcacctctctccccccttccgtttcctctctctcctcgcccgagaggccaaaaacccagcctcgagtcctcactccccgcagattcgcgtcatagcgcggcggcggcgatggcgtacggcttctccatcaggggatacgcggcgagcatgcggggcacggccgagctcggcccgtttagtttggcggcccgggaactgcagcccatggaggtgcgcgccttccggtggtgggaggacgagctcgcgtccatcaaggcggcggaggcggaggcggagaaggagaaggagaaggaagcggtggcgggggcgggggcggagggggaggaggaagaagaggaagaggaggcgtcggggaacggccgggcgccgaagaaacgctccatcaccgacctgttcgctgaggcgcctgccgtgggcgccggcagcggacccgacgctgtcgtggacgacgaggaggaggttcttcgctccatcgtccgccggagcaaggagctgcgaagaaagaggcgtctggagcaagctgcgttggcgtcggtagcggaggagccggagacgtcggcggcaggcgaacggcgtgcggccgaggggaatttccccagaaagaaatcagctgacaaaccaagtttgggagatgaattggatacttctggtccatcaaaggaacatcagaatgatctcattacagagaagcaaaagatcccagatcttaagagaaggaagcatggaagactcagtaatagtttacagaagaaggctgagaggctaaagtaccttgagagtagaaaggctgtcaaggttggaaaacagcgagatattaaaaaagtgctccctttgcacagcattctgaagaagtacacaaaacatacgtctgttaaaatggttaaggaaaaacatgggaattcaaaaggcactggagtcatacaactctgtcgcaaatcagtcaagcgtgtcaaattctcagaaacagatgatgccaaaaagcaatgttccaaaagaccaccactggaaagcatccgcgagcttctctctgctattagttcttcttcgtcgtcatctatagagatgtcaagtgaagaggaacatgttattgcggaaagtagtagttctcacatgacagagaaagctgtcactatggctagcgaagcaaatgagaacacaaatcatgacaatcaatatgagctcagcagtaccagattgtccaccggtttgcttgatctgaatcaagctcttccagaacctacggacttaaacaatccatatgttccaaattcagaggtttcaaatcttgagcaggcacaggtaggaacttggaatctggatcaacaagttcttggtaatggaagaaaaaacatagactcatcttttgatctgcatggacaggaacaactgagacattctactgagttggacaccacatcaaaaggcaagtccccttgtactctgtcaaacggattccaggattcagtgcatctccaacagaattggagctctatgactttgcatcatggtgtctctcaactctcaactggaggtgaaccatcttcctttgaagttcgagaaagtaatatatcacacagtgagaaacgaaattttagttctgaaacgaacgtggaacaagagttgaggccttctgctggacaaaccttgcgcttgatgggtcatgatcttacagtatccgatactagagttgactatttatctgacgcggcacagaatcacacaaataatactgcagaccatcttaccacaaaggtggtgttggaattgccacgacaaggtcagcctttcctagcattacaaactcagagtattcccagtgtttcagcaagttctgcaaggacagctcaggcacattttggatacagaacaacacataacatcagccacccgttgctcgctgccaatgtgttctctggtgatccatcagtatatgaagacaggtgcagggacttcacaaacttgcaatcacatcgaaattctatattgggatatcctcctctttccaatcatggcagtgctgcatttcttcagaattcaccaccttggcgttattactctgatcattccaccaggagagattcactctcagcgccatttacaccaacagtgatgcagcatgtggcaacaccttcagattaccgtgccaatctgcctcatcagtcatatggtgtgtactctggaagctcaacagttcgacctcttaactctgcaagttttacatgcacaaaccagatagtacaagcagttgacagtagggctactgcaaaccttccgtccagaagtccaacaactggaacgacaagaactcatcacaactccaatacttcatctagcagccgtttggttctgagatcaggccctgtaaagctcagtgccggggcgaagcatatcctgataccaaatgagaatacggaggacgacaattctgcaccaatgtactcttgtgtgtcctttggcagcagtggtgggaatgtttcggcagcttatcagaataaaggagcaggttcccataggcatcagaataaaggagcaggttcccgtaggttctgatccaaaagctggattatcttgctcgttcgttttctggacagctgctgggcaagaggctgcatgttttgaaggaactgaagctgatgacctaggcaatgctgagatgaagatgcaatgcgcagttcggaggatacctgagaccgtgttaattaaaggaggggcatacctggagtgtctatgtagctaccggtgatgaagtagaatgttaatgcgactcaaaagctggttgattgtacaacctgtgtcatcaggagttccctatttcatttgagccagctagatcatttttatttagcggtcatctaatataatatatcctcaatatatagatattatgttagctcaatattgtttttacaagtattattgagagagttgatgcagcactgcc

SEQ ID NO: 200507 - DNA, 423 bp, Zea Mays
ctatggattaaggttttgggcgaggtataaaagggtcttgctggataatggtcttacagtgcttgcaccaccttttattgaagcgggtgagaatattgtaatcagtacagccgatgattcttatatgacgagagcgtaaggggtatcgtggatgacgttttgttctaccaaatggggatcgattacaatgtggctaccagaataattttatttacactcagttgtggagttgccgtaaacagtgagccttggcggacaccaaccaagaacttttagttcttcgctaataacccacacattttgtactcacatgtcttttcgttttgttcctcacttcaaatatttatgcaacagaatccattcatggcaaaccgtggaatcttttttggggaaggtgtaggctctgtttgtttcggctttttg

SEQ ID NO: 200508 - DNA, 618 bp, Zea Mays
gagtttttgttgaggagaagtcattcacatatctgtatcaggaaggagatactgtgactcttatggagcctgaaacgtttgagcaacttgaagtttcgaaggaactgtttggcaaagctgctgcatacctaaaagatgaaatgaaagtgaatctacaatactttgatggccggccaatgtctgggacagttcctcaacgagtgacttgcactgttgttgaagcacaaccaaatacaaaagggctaactgctcaaccacagcaccaccttttattgaagcgggtgagaatattgtaatcagtacagccgatgattcttatatgacgagagcgtaaggggtatcgtggatgacgttttgttctaccaaatggggatcgattacaatgtggctaccagaataattttatttacactcagttgtggagttgccgtaaacagtgagccttggcggacaccaaccaagaacttttagttcttcgctaataacccacacattttgtactcacatgtcttttcgttttgttcctcacttcaaatatttatgcaacagaatccattcatggcaaaccgtggaatcttttttggggaaggtgtaggctctgtttgtttcggctttttg

SEQ ID NO: 200509 - DNA, 4896 bp, Zea Mays
ctcaagtggtggccggagcacggagctgtttcgtttccgctcgcaggcaggcacagcgccaagcggcgaccgagagtccgagacccattcccatccacgcgaccacgctgccgttctctccccttcctccccgtcgcttccattcccgtccctcacaatctcacccccgccagccgagccccaaccctaacgaaatttacacctgcttcgtcggcgtgagcggtcttaggcgccgggcgtcgctgcggtccagcggtgtcggatccgggtcccgcgccgttaggtcgaggtttcttcggcgacggtgcagccgctggatgttagtctggcagatcggggccgaggtaatttccacgaacttagggggcaccttttcgcgttggtgctcaaaatggagaatttcggtgccgttcgggcaggtagctcctgatgaattgtgagttttaataggtgctaccttctcatctgttatcctagtgatctgtaatctttgcatatgattcaagtgtgatgtagtattggttttacctgatattgtgttagttcctgccacaaattcgtcaggtagatttaatttaccatcggctctttcgtgatttatcagttaaatatcgaaacatttagttacttatcgacgggggaaaaattacacggagaataattgttgcttgaaggcaatataatcatgacctgtcgaattgcgcatcgtattgtattctggctttgctttaattggataccgatcaataaaatactatacaggctagtttgggaaccccattttcccagagatttccattttcccaagggaaattagttcatttttccttgggaaaatagaaatcgcttagaaaatggaattctcaaactagctctacttgttccatcctgccatggttttgcacagtgcttattcggcagtaagaatagttgcgatatgctattttgttgtttggggtgaaggatctggcctttgagtgaactttggttttggaatatcttgttgctggtctacctaacagttgctttcttcctccacacattttcatccgactgtagttagccagcttccctaactttgtgccttcaattataaacaaacatctacttttgattatttttagctttcttattgtgaataagtgaagtggttgctttatagatgttgggggctgtttggtttgtggctaaacctgccacactttgcctaaggttagtcgttcgaattgaataactaaccttaggcataaaagttaggcaaagtgtggcaagttagtcatcaaaccaaacagacccttgatgttcccacctcttaagtatttagggatgtatgagaaatgcaaatgtactaaaaacatggtactagtgttcttccatttgctacaacatttgttttctccatacacttctgcctacccaaataaattcaaatacagcagaaacacgtagtattttgtttttttatatcctaaattcctaatttggacttatggccccctatctgatcattcttgtcttgttggactcattagtttatctttctccttttgtgacttcgtcacgttccattgcctctctccagtcccttcagtagtccaacccctgcaatatgctgcccaattcgttgtggattgcatttgtagtactccctgcattctaaattataggacgtcttggcttttctagatacatagcttttattatttatctagacatagtgtatctagaaaaacgaagatgtcttataatttggaacctagggaatagattcctaaaggctacaagattatcatgtgcatttctattcgacaaataataataattccaatcatactggttcttttgatgatcttgttgtggatgccccttagcttcctctttgggggtgttttcttctgtctatgtggtacccctagctccctctgtaggcttagagtgcacatgtctatactacatactatcgtgtttaactttatactaagtttttgctcatttctttattgaagacgaccttattattgttattgtatccctgtacagctaggcagtgttgggttgtaaaatttgtatcgcgtgaatgaactcagagcatctcaatgttaaaactgtaaaaggggcagacctggtgccagaggctcccacatgagtgggttctagggaagggataatccgaagcaagcctcccccctgcaaatgcagagatgtggctttgaacccgtgacctggtgactcagtgagacacctctcaccactgcaacgggcgtgtccttcctcagcgttaaaactgagcatattaattcccctgcttaagcaatatgggagctaattgctgcgttgctgcaaaggagaggacacagccgtgcatcactcctatagaagtatcgacatacaggaatgtgaggcgctcgccatcatggaacattcgatgggacaatcgcacacatatagaagacataatggatattcctactctgttctccaaccatagtagtggaagcattcatcctgatacaaagagtggttccattgctccaactgaagggttctctaatggaaatagccttggaactagcccttccaatgtgttccatggagcaaagtggcacaaatctgataaaaaaatggaagcacgcaaggttacaaagtctgattctcgagctgatcgctccacagcaagtaactcttctcctgagacaaagctttccaggaaatcactggacatatcaagtgttgcttcagatttgaagacttcagtgtctgttccttcaacgccacccttagtatccagagcagatccgtcatcctccaaggggcattctcaacctacagattcagatttgatgaagaaagcatggcggtcaccagggtatcaattatacagacaggtttcggacagtaaaattccatctctcagatctctcaatgagataaggtctcctgaaggaaggcctccctcttccatgttatcagcctgcagcaacgacttgtcagcagcaggatcctatggtgagtcatccgatggttggtcaatgcgcacattttctgaaatggtctcaacatcccaaagagagaggtggtcacttgacagtgagctcttgggatccatttctagtaaaatgacaagatcaagtgcttcgagttctactacacgcccccctgaccaagacgtgtgcaagctgtgtttaaagctgctaaaggagagatcgacatggaacgcgcaggagctggctgttgttgctgttttgttgtgtggacatgcataccatgctgactgtctggacagcataactacagaagctgacaaatatgatcctccatgccctgtgtgcacgcacggtgagaaattttcagtgaagctatttgggaagctggaatcaaagatcaagaacaagataccaaaaaatgtgtcagttgatattaatctagatgggaatagtagtaataagcaccagaagaaaggtagaagagagcccaggttaggtacaagttcaagcatgaaggtcccatttagtcgtccatttttgaggagacatttctccattggatctcgaccacctcggtcggtctcagaaactgattccacaagaaagaagggattctgggcaagacactgggagagagtagaatagaatccaattgtcgttaggaaggatctttaagaagaggtgaactcctcagcatgcaagctagtggaggtgaactccccagtatacaagggctgccgagcaaccaacatatttggaagtttctctcagccatcgtattctgatactggtgcagagcgcacaacaaggtttcttataccatgcgaggcagggtcgttgtaggccccgcttgcatctaagtaatagtagtatcgatctaacagaaacggtgtggccttcctggatttaaggcccaatgctgggttataagattacacaaccagcatgctagattatttactgtacccgcagtttttttaattattggctaaggtatttgttggtggttgatggaatgcgtttaatttgaaggctttagtggtactgtagaacttttcaatcagattggctgaactgatcatccttgcgttcacatatactaaatatagacgcacttatagggtgtttggtttgaggagtgagttagtctcatctttttattccgtattttttgtttggtttgtggaatagaatgagctgattcatcatcaacttatttctcatagttagttaatactaatataataattctcatagttagttaatactaataatgattctcatagttagttaaaactaatataatgaatgtgatcatctaaccaaatttgaaaaatagatctatgatgtactattttattttggatgaagtgatttttcaaatcaaacacctcgtagagaatgcttttctacttgttgcacccagctgacagtcaataattgttggtagtaaatttgagcttcgcttctgactgtttgcagaagatttgctctggaactcttacaaatttgggtatctccttgaagataaggtagtttgcgttgcaaagtttgatgaggcaacaaaatagttattgaagtcttcatcggagggtaagagcatctacaagaacaacttacaaaatgactcctcaaaatcagttttaacagttttaaggggcatctaaaaaattagtggggatagattttaatcctttctccaacagatactttaaagcggtagattgtttctagggagctaaaaaaactctcatttgtagctacaaattagggagttttaagggctatgaaaaagtttgtagcgtttcagaggaactgttggacacgtttttatgattttcctaaaaaaaacttgatttaggagagaagctctaaagacacccatctagtgtctagtgctgtaacaccctga

SEQ ID NO: 200510 - DNA, 4909 bp, Zea Mays
gagcacggagctgtttcgtttccgctcgcaggcaggcacagcgccaagcggcgaccgagagtccgagacccattcccatccacgcgaccacgctgccgttctctccccttcctccccgtcgcttccattcccgtccctcacaatctcacccccgccagccgagccccaaccctaacgaaatttacacctgcttcgtcggcgtgagcggtcttaggcgccgggcgtcgctgcggtccagcggtgtcggatccgggtcccgcgccgttaggtcgaggtttcttcggcgacggtgcagccgctggatgttagtctggcagatcggggccgaggtaatttccacgaacttagggggcaccttttcgcgttggtgctcaaaatggagaatttcggtgccgttcgggcaggtagctcctgatgaattgtgagttttaataggtgctaccttctcatctgttatcctagtgatctgtaatctttgcatatgattcaagtgtgatgtagtattggttttacctgatattgtgttagttcctgccacaaattcgtcaggtagatttaatttaccatcggctctttcgtgatttatcagttaaatatcgaaacatttagttacttatcgacgggggaaaaattacacggagaataattgttgcttgaaggcaatataatcatgacctgtcgaattgcgcatcgtattgtattctggctttgctttaattggataccgatcaataaaatactatacaggctagtttgggaaccccattttcccagagatttccattttcccaagggaaattagttcatttttccttgggaaaatagaaatcgcttagaaaatggaattctcaaactagctctacttgttccatcctgccatggttttgcacagtgcttattcggcagtaagaatagttgcgatatgctattttgttgtttggggtgaaggatctggcctttgagtgaactttggttttggaatatcttgttgctggtctacctaacagttgctttcttcctccacacattttcatccgactgtagttagccagcttccctaactttgtgccttcaattataaacaaacatctacttttgattatttttagctttcttattgtgaataagtgaagtggttgctttatagatgttgggggctgtttggtttgtggctaaacctgccacactttgcctaaggttagtcgttcgaattgaataactaaccttaggcataaaagttaggcaaagtgtggcaagttagtcatcaaaccaaacagacccttgatgttcccacctcttaagtatttagggatgtatgagaaatgcaaatgtactaaaaacatggtactagtgttcttccatttgctacaacatttgttttctccatacacttctgcctacccaaataaattcaaatacagcagaaacacgtagtattttgtttttttatatcctaaattcctaatttggacttatggccccctatctgatcattcttgtcttgttggactcattagtttatctttctccttttgtgacttcgtcacgttccattgcctctctccagtcccttcagtagtccaacccctgcaatatgctgcccaattcgttgtggattgcatttgtagtactccctgcattctaaattataggacgtcttggcttttctagatacatagcttttattatttatctagacatagtgtatctagaaaaacgaagatgtcttataatttggaacctagggaatagattcctaaaggctacaagattatcatgtgcatttctattcgacaaataataataattccaatcatactggttcttttgatgatcttgttgtggatgccccttagcttcctctttgggggtgttttcttctgtctatgtggtacccctagctccctctgtaggcttagagtgcacatgtctatactacatactatcgtgtttaactttatactaagtttttgctcatttctttattgaagacgaccttattattgttattgtatccctgtacagctaggcagtgttgggttgtaaaatttgtatcgcgtgaatgaactcagagcatctcaatgttaaaactgtaaaaggggcagacctggtgccagaggctcccacatgagtgggttctagggaagggataatccgaagcaagcctcccccctgcaaatgcagagatgtggctttgaacccgtgacctggtgactcagtgagacacctctcaccactgcaacgggcgtgtccttcctcagcgttaaaactgagcatattaattcccctgcttaagcaatatgggagctaattgctgcgttgctgcaaaggagaggacacagccgtgcatcactcctatagaagtatcgacatacaggaatgtgaggcgctcgccatcatggaacattcgatgggacaatcgcacacatatagaagacataatggatattcctactctgttctccaaccatagtagtggaagcattcatcctgatacaaagagtggttccattgctccaactgaagggttctctaatggaaatagccttggaactagcccttccaatgtgttccatggagcaaagtggcacaaatctgataaaaaaatggaagcacgcaaggttacaaagtctgattctcgagctgatcgctccacagcaagtaactcttctcctgagacaaagctttccaggaaatcactggacatatcaagtgttgcttcagatttgaagacttcagtgtctgttccttcaacgccacccttagtatccagagcagatccgtcatcctccaaggggcattctcaacctacagattcagatttgatgaagaaagcatggcggtcaccagggtatcaattatacagacaggtttcggacagtaaaattccatctctcagatctctcaatgagataaggtctcctgaaggaaggcctccctcttccatgttatcagcctgcagcaacgacttgtcagcagcaggatcctatggtgagtcatccgatggttggtcaatgcgcacattttctgaaatggtctcaacatcccaaagagagaggtggtcacttgacagtgagctcttgggatccatttctagtaaaatgacaagatcaagtgcttcgagttctactacacgcccccctgaccaagacgtgtgcaagctgtgtttaaagctgctaaaggagagatcgacatggaacgcgcaggagctggctgttgttgctgttttgttgtgtggacatgcataccatgctgactgtctggacagcataactacagaagctgacaaatatgatcctccatgccctgtgtgcacgcacggtgagaaattttcagtgaagctatttgggaagctggaatcaaagatcaagaacaagataccaaaaaatgtgtcagttgatattaatctagatgggaatagtagtaataagcaccagaagaaaggtagaagagagcccaggttaggtacaagttcaagcatgaaggtcccatttagtcgtccatttttgaggagacatttctccattggatctcgaccacctcggtcggtctcagaaactgattccacaagaaagaagggattctgggcaagacactgggagagagtagaatagaatccaattgtcgttaggtgggttggtctcaattattatgttttggaaggatctttaagaagaggtgaactcctcagcatgcaagctagtggaggtgaactccccagtatacaagggctgccgagcaaccaacatatttggaagtttctctcagccatcgtattctgatactggtgcagagcgcacaacaaggtttcttataccatgcgaggcagggtcgttgtaggccccgcttgcatctaagtaatagtagtatcgatctaacagaaacggtgtggccttcctggatttaaggcccaatgctgggttataagattacacaaccagcatgctagattatttactgtacccgcagtttttttaattattggctaaggtatttgttggtggttgatggaatgcgtttaatttgaaggctttagtggtactgtagaacttttcaatcagattggctgaactgatcatccttgcgttcacatatactaaatatagacgcacttatagggtgtttggtttgaggagtgagttagtctcatctttttattccgtattttttgtttggtttgtggaatagaatgagctgattcatcatcaacttatttctcatagttagttaatactaatataataattctcatagttagttaatactaataatgattctcatagttagttaaaactaatataatgaatgtgatcatctaaccaaatttgaaaaatagatctatgatgtactattttattttggatgaagtgatttttcaaatcaaacacctcgtagagaatgcttttctacttgttgcacccagctgacagtcaataattgttggtagtaaatttgagcttcgcttctgactgtttgcagaagatttgctctggaactcttacaaatttgggtatctccttgaagataaggtagtttgcgttgcaaagtttgatgaggcaacaaaatagttattgaagtcttcatcggagggtaagagcatctacaagaacaacttacaaaatgactcctcaaaatcagttttaacagttttaaggggcatctaaaaaattagtggggatagattttaatcctttctccaacagatactttaaagcggtagattgtttctagggagctaaaaaaactctcatttgtagctacaaattagggagttttaagggctatgaaaaagtttgtagcgtttcagaggaactgttggacacgtttttatgattttcctaaaaaaaacttgatttaggagagaagctctaaagacacccatctagtgtctagtgctgtaacaccctga

SEQ ID NO: 200511 - DNA, 2505 bp, Zea Mays
ggacttcgtgcttattgaccatctatacacagcacgcggtccaaccaacctaccaaaacctagctagatttagaggaaaaaaaaaactgtccccaaccgtgagatggctgagtacggcgagcgctaccagggcaacggcgacccggccacgcccgagggtggctacgcgcagaccgagtacgccgccgccggtggctcgccgcccgccgaccgcaagccctccgtgttctccgaccacgctgacggtcgctcctcccagccccagcatgagactcaatcacatggcagtggttcctccaaatctcgagaaagggaccgagaacgtgataagggaaaggacagggagcgaggcagagaccgtgtccgcgaaaaggagagggaccgagacagggacaaggatcgtgaaagaggtgacagagacagggatcgtgatcgccaccacatggatcgtcgcgagcgcagcgagataagggaacaccgtgatcgttctgatgatcgtgaccgtcaccgcgatgatcgtgaccgtcgcaggagtcatgattctgagaggagaagagatcgtgacagagatggccatcgtaggcatcgctcccgttccccttctatgagtcgtgaccgtgaccgcagatctagatctcgttcacgctctagatcgaagagcaagcgcgtgagtggttttgaccaagcacctacacaacaggcacttcctattgttgctgctggtgttatccctggaggcaaacttggcccacattgtcatcggcttccactggattgagctgactgctgtagctttaatgtcagctgcctggtgtcaccgctcctattcctggggttggggtgcttccaaacttgtataatttggctgcaggacagccacaagccatgacacaacaggctaccaggcatgctcggcgtgtctatgtgggcggacttcctccaactgctaatgagcagaccgttgccatattcttcaatggagttatggctgctattggaggaaacacagctggtccaggtgatgctgttcttaatgtctacataaaccacgacaagaaatttgcttttgtggagatgagatctgtggaggaagcaagcaatgcaatggtcttagatggcataatgtttgagggagcaccggtcaagattagaagaccaacggactataatccttccctagcagctgctctgggcccgagccagccaaatccaaatctcaatctttctgctgttggcttaacacctggctctgctggaggattagaaggtccagaccggatctttgtaggtggtctacaatattacttcactgaggcccaagtgcgggagttgcttgagtcctttggacctctgcgtggatttgatcttgtaaaggatagagaaactggtaactcgaagggatatgccttctgtgtgtaccaggatcttaatgttaccgacattgcctgtgctgctcttaatggcatcaagatgggagacaagactcttactgttaggcgggcaaaccaaggagcttctcagcctaggccagagcaagaaagcatcctgttgcaagcacagcagcaggtgcaaatgcagaaattcgtataccaagttggaggtgccctgccaacaaaagttgtatgcctgacacaggtagtgacagaagatgaactgagagatgatgaggaatatgatgacattgtggaggacatgagggaggaaggacacaaatatggtaaaccgcacgagactcatcgacttctattaccctctttgttttaaaagctcctctacgttctgctgtcactaccctcagttactgaattggtttcctttttgtgtttttgtcttgtgtgtcttttttgtagtcccgcataatgccattgcagattgttttgtagtccgaccttatgcaatagtggcaatcgggccttaacccacagaagacactattcttttgactttgattaatcattttattattagcgcgtcttgtctatatatatctactctgctcactaagatttggacaggtaacttggtgaaagttgcaattccacggcctgaccccagcggtgctcctgttgctggtgttggaaagatgtggagggctcaaccaaagcaaagacagggatgcatgggcggaaattcggcgggaaccaggtggtggcggtgttctaccctgaggacaagtttgcagctgagcagtacgactgaaaagttttagaacccctattctagagttgcagttgtggcacacaatgtggttgttttgaccttttgtagttaagtttggtgattgatccgctgataagtgatataagtttcgtgctcaagtattatatcagctggtaagagtgatacaagtctcgtgcccaagtttcggtctatcaatcgactgcatgttgccctgttggcttcttgcacactgagtgatgtgatcttgtatgacatatacaacatctaggatctagtagttgctgcattagaatgctcattttaagcggttatattgccaatgcg

SEQ ID NO: 200512 - DNA, 1563 bp, Zea Mays
gtcagatcagatcaaaccaactctcaacctcctctgcttcttgttccttgacttccttcacactccttctagaaccctctagaagcaatcgcaaaaatgccgctccatcaccctaagcaccgccaccatgacgaagatctcctcccctaccgccgctccgatgacgaggccaagccgcgccggccgtacacccccaccttcccctcctcccccgcctctaccaaccgcctcctcctcttcttcgccgtcgcctgcctcgtcctcgccgctgcctccttcgccttcgccgtttccaccagccgcaaccgtcagtccctgccgcagcctccgcctactgtcgccttccgctgtggccgcgccgaggattcgctccgttccttcctagcggcctcctcgcacggcaacttctctgccggcgacagggagaaggtgctcgctgtcgttggcgtacacacggagcatgggaatttctccgctgcccgacgcgctgcgctccgcgctacctggttcccgctcaaccccgaaggcatcaacatggaactggattatcatttaggtttgtcgctagacggccaaaggacaaagataaaatggaagatcttcagaaagaggcggatacttatcatgactttttgtttattgatgctgatgaggccacaaagcccccacagacgatgttagcatttttcaaagcagcttaccacatgttcaatgcagaattctatgtcaaagctagtgatgatatctacctgcgcccagatagacttgctgctcttcttgcaaaagaaagacctcagcacaagacatacatcggttgcatgaaaaaaggaccagttgtcaatgatccaaatttgaaatggtacgaaagttcttgggaactgttgggtaacgagtacttcatgcatgcatctggttcactatatgctctttcttctgaggtggttgaagctctagctactgcaaagagtgatagcttaaggatgtttgattatgaagatgttacaatcggcgcatggatgcttgctatgaatgtaaagcatgaagacaaccgagcaatgtgtgattcagtatgtacccctacctccatcgctgtatgggacagtaagaaatgctcaggtacttgtaacgtcgctgacaaaataaagcagctccataacaccactgtgtgctcaaagagcccaacgttgccacctgaggtggaggaggaagaatagaaaccgaaacagttttggcccttgaaaaagctatggcggtgatactccaattagagcactggttttgtcgtcgactgcatttccatactgctgtatcattagtgacctttcaacaccagcgatggagagttcttggagaatcgacaccatcacattacatgtagtatttcgagtctacccaatatgggttcagatgacgtgttgtacttgtaccttttactaatcggtggaaccaatgagggcacagagacattcttggctgtatgatgtagtataaattgtacacagagtgacctatgtggtttcattcttcgctgaccagacggtgggcattccatggtttgttttc

SEQ ID NO: 200513 - DNA, 2501 bp, Zea Mays
cctgcgaccacaacgatgtttcctgcgacagcaacgatgtttgttgggttggtgaagcgagggagttcgaataatcagtcctcagttcctcacgcatgtggcacgcgatgggccggatctgaggttgagacgttgagtgtgcgatcccgttggcatctcgacaaagtttggtgggtcccaccgcagatcccggcccggtaggtactagttccgccgtcccccctccctagtctccggggaggaccgtctcggccgagagagtgcgctcgtcgactccactcagctctctcgctcactctcctcccccaaggtcctagagacaggcagccggcgaggcgcgccgccgcgaagcaatggatttcaaggggttctgggagtccagattcggtggcaagaaggaacccgagccggagcagaacgggcacgccaacggggtccagaaccagaagaggacctccgatctggcggtctacgagcagttcgagcagcaggccaggcagacccaggtccgagccgccgcgattcgcgacggagacgctgatgtcataagccccttctaccttcatttgagtcagctgaaatgcgtaatctcgcagagacattgttgagggatattattcgcgggagcccagatgtgaaatgggagagcatcaaaggactggaaaatgcaaaacgccttctaaaagaggctgttgtcatgcccataaagtacccaaaatacttcactggtctcctttctccatggaaaggcatcttactttttggccccccagggacaggaaagacaatgctggcaaaagcggtcgctactgagtgcaaaaccaccttcttcaacatttcagcatcatcaattgtcagcaaatggcgtggagattcagagaagcttgtcaaagttctgtttgagcttgctaggcatcatgcaccatccacaatattccttgatgaaatagatgctatcatcagccagcgtggtgaagctcgcagtgagcatgaagctagtcgtcgcttgaagactgagctacttattcagatggatggtttgacaaagacaaacgacttggtatttgtacttgcagctacaaatcttccctgggaattggatgcagccatgctccgccggcttgagaagcggattcttgtaccgcttcctgaaggtgaagcaaggcaagcgatgtttgaggaacttctgccagcaactacctcaaagttagaaatcccgtacgacatactagttgaaaagactgaaggttactctggttcagatattcgtctcgtgtgcaaagaagctgccatgcaaccactgagacgtctcatgtcagttcttgaagccagtgacgagttggttccggaggaagaactgcctgaggttggccctctgaaacctgatgatattgaacttgcattaaggaacactaggccgtcagcacatctccatgcgcatcgctatgagaagttcaaccaggactacggtagccatgtcgtttgttcagagctagcatgatcttattatcgggttgatgtttcgttcaatcatggaaccagagcagagctaatatatgtcctgctccggcgcatcagtttgttggcatgttgatgggggtcgcgtgttgtcaaaacggttgctgcgctggtaacgcgactcccaacatattgcagtttccctctggccgcagtaccttgcattttgcatgggttaaagtgcgaggtgcaggtgcttgctgctcagatctatgtgggcatgtggctttgttcatgcaatctgagattttcccgaatccttgaactcagaaaaaaaagattcgttctctagttacgtgtctaataaatgttagttaccctgcagaaaagtacactctggtttatatttaaaggaaaacgagccagagagcttgtataagtttcttctgattgttggtgtaattacccagctcgttaaaccaagctttaacaacaaattcttgcatgttgtggtcaactgctatccaatgtccagtgtggcttgttgctcttggctagtcagcgaagcatcccgtgcgccgccacgtccagtgcctttcaagtttcaacacccctgcagtcgctttcttcccagttccaggcgagagcctcgctttcctgtttgacatcggccgtggcagacgagcaatctgcgtatactcgagcgctcattctcaaccggagcctggtatcaccaccaggtagactggcagagcgtcgcttgaaagaggcctggggctgcttgtgcccgccgccaagggtcacggagccgttcgatttatctggctagccggtaatcagtggtggccggttttgtgttaccgatttttatagtttgaatttagaatattttgtaaattttgataaaataaataatgtcagtttttgtataaatactatggattatttgatgactttctaaaaaaccaaaatttaaaatcgcaacaaaatgaaactaaaaaccaaacaagttttgtaaaatttaaaaataaaaaagaaaactc

SEQ ID NO: 200514 - DNA, 1460 bp, Zea Mays
tcatacgttttgaaaaaaaaaacagagttacacagcccactttcattttaggtgcattgtttatttcctagaaagagatcacatttagggtaccattggagcgttttgttgtccatgtgttcaacttcttcatgcggtgacaaacctgtcctttcaaggtaatgtacatggtttgggagtggaagccttgcagatgctcactcagatggtgctcagcaatgaagaagagctcaagatcaaatatttcaaggatgactccctgaacagactttgcccagttgatgtttttttgaaggcaatgctggatgttccatttgtgttcaagagagtagatgccatgctttacattgccagcttctatttggagatcaatcggctgagaatgtcgtatgctactcttgagggggcttgccaggagatgagaagcagcaggctgttccacaaagtccttgaggctgttgtgaatttcggcaatttcatgagcaccaattcggggtctccaagttcaaaaggcttggagccaaacactgttctgaagatagctgatgtgaaaggagctgatgggaaggctgctctcatgcagttcattgtccaggaaattgtgaaacctgaaggatatgatgtgatgcagcatggttcaggtgcatgcaagatgagcacaaacactctgcagtgtgatgccgagtgcaggaagcatggccttgaggttgttgccaaacttgcagcccagctgagcaacaccaagaaagccgcctccattgacataaaaaggctgagccaaagcgtgtcagagcttggaatggggcttgggaaggtccacgacgtggtgaggctgaacagcatggttacatctgttgatagcgctcggcgtttccacaatagcatgagcacatttctaaggcacgcccgaggaggagatcctgaagctccagtcccaggagagcatctgcttgtcatcagtgaaggagatggcggagtggttttattggggagtcagtcaacgatgaagctcacatgttcagaatctttgctggagtgaaggagttcctagctatgctcgatcatatctgcaaggaggctggggaggtgagcagcaacaattgggtcggcgcgacaacggcgagctggatggctgcacccatggggatgatgccttaagccgctggagctgtcttggcaaaatctgtagctaccctttttgtagaatatttcatatcaagctatttggactagtatggttcctagtattagcagtagatgagaacgatgttatggtatgttaagccgaagcctctctctatataaatatatctggataatgtatgctggacacccgtctattgtaaagtttactgttactggtaatggggttttgccgtccttttcctgaatgctgctacagtcttctttgtcaatggagtagcctgctactccaactccattggggccctgctttctaa

SEQ ID NO: 200515 - DNA, 2165 bp, Zea Mays
gttgtgccacttatccccatgcggatcttctcttatctcttctcgcgactcacgaaggaggcgcgacgtgcgcgtgccgctgtgctgcactgctagtgttcctgcgcgccgtgctgtccggcccgcccgcgccgcgcaccgatgccgccaccgtcttcctcgcgctactccccgggccggctgctcgccgcgcgcccggcgtccgccaccacggtggggagatgggcgcgcttgtcgtgctcgctgtccatgaacgggtgcgcgccgggcgccggggaccgcggcgcggtgtgcgtgcgcgagacgcgggcgctgccggccgcgccggcgccgcacgacgcagtggggcggctcagggccgccgtggacgcgctctggtccaacgcagcgccaccggccgcgccctccggcatcatccgcatcgaggtgcccatcacgcagcgggtggacgccgtggagtggctgcacgcgcagaccacgctgccccgctgcttcttctcggcccgggcgccgttgcccgacgcgcccgccctcgccggcaacggcaacggcaacggcagtgtccatcggcagcagccggtgagtgtcgcgggcgtgggttcggcggtcttcttccgagggacggagcccttttctctagctgattggcgcgcaatcaagagatttcttccaagggactgtccactggtccgcgcatatggcgccatccgtttcgacgccacgagtgacgcttccgttgaatgggaggactacggctcattctacttcgttgttcctcaagtcgagttcaatgagctcgaggagagctcagtcctcgcgacgaccatcgcgtgggacgactcgctctcatggacatggcacaacgccgtggaggagctccaatcgactctgcgaaagatatcgccttgctcttctgttcaagcgaacaaggccagcctacagacagccatcgtaagtctcaatcatgtcccgaccaaggcgtcttgggatcttgcagttactaaagctctccatatgatcaagggcaggcaaagagaattggtaaaggttgtactggcaaggtgtagcagatacattactgacacttgcattgaccctgtggaactgctggcttgcttgaaggctgagggccaaaatgcttatcaattctgcatacagccaccgggtgctcctgcgtttgtcggaaatagcagcaactatttcatcggaagtacttgaacatttccagcgaggctctagctggtactcgggcaagagggaagacaagggcagatgactttcaaatcgtagcaaagaggacatcgaattcactatagtacgggacagcatcaagaacaagctggagatgatctgtgatgaggtggttgtccatcccagcaaggctctgcggaaacttccaagagtccagcatctgtcagcgcagttagctgcgcgaataaggaacgaagatgatgaggtgacctatgacaaaacttctactacttgagttgggtgaacatcatataaggtaacgatagcaacttgtgctggcgatgcagtttgagattctaaacaccctccatccgagtccagctgtttgtggcttgcccactgaagaggcacgccaattcatacgggattgtgaaatttttgaccgtggaatgtatgctggtcctgttggctggcttggaggagctgagtgcgagttcgctgtcgggattagatcagcgttacttggaaaaggtcacagcactctggtgtacgccggtgcggggatcgttgaaggtacaaacccatcttttgaatgggatgagcttgatctcaaagcatctcagtttgcaaagctgttgcggtaccaagaacgacctattcgctaccaagaggctgaaaatctgggaacggtgatctgaatagagaagtacagaagaaactagaaagtcatcacaaagttcggcattcatttagcgagttatttatacaattgtttgtttgatatagtaagctagaagggggattcagttggatttgtgtaattatggaatccagaacagcggcagtgctgaaaaatacattgattgaacctgaatgggaaattgttcaatgtaacaaaaatatgtttacaacataaactatttgattgaatcagtgcgtgaatgtgacaactagcaatagagtatcctcgcgtg

SEQ ID NO: 200516 - DNA, 2041 bp, Zea Mays
gactcacgaaggaggcgcgacgtgcgcgtgccgctgtgctgcactgctagtgttcctgcgcgccgtgctgtccggcccgcccgcgccgcgcaccgatgccgccaccgtcttcctcgcgctactccccgggccggctgctcgccgcgcgcccggcgtccgccaccacggtggggagatgggcgcgcttgtcgtgctcgctgtccatgaacgggtgcgcgccgggcgccggggaccgcggcgcggtgtgcgtgcgcgagacgcgggcgctgccggccgcgccggcgccgcacgacgcagtggggcggctcagggccgccgtggacgcgctctggtccaacgcagcgccaccggccgcgccctccggcatcatccgcatcgaggtgcccatcacgcagcgggtggacgccgtggagtggctgcacgcgcagaccacgctgccccgctgcttcttctcggcccgggcgccgttgcccgacgcgcccgccctcgccggcaacggcaacggcaacggcagtgtccatcggcagcagccggtgagtgtcgcgggcgtgggttcggcggtcttcttccgagggacggagcccttttctctagctgattggcgcgcaatcaagagatttcttccaagggactgtccactggtccgcgcatatggcgccatccgtttcgacgccacgagtgacgcttccgttgaatgggaggactacggctcattctacttcgttgttcctcaagtcgagttcaatgagctcgaggagagctcagtcctcgcgacgaccatcgcgtgggacgactcgctctcatggacatggcacaacgccgtggaggagctccaatcgactctgcgaaagatatcgccttgctcttctgttcaagcgaacaaggccagcctacagacagccatcgtaagtctcaatcatgtcccgaccaaggcgtcttgggatcttgcagttactaaagctctccatatgatcaagggcaggcaaagagaattggtaaaggttgtactggcaaggtgtagcagatacattactgacacttgcattgaccctgtggaactgctggcttgcttgaaggctgagggccaaaatgcttatcaattctgcatacagccaccgggtgctcctgcgtttgtcggaaatagcccagagcaactatttcatcggaagtacttgaacatttccagcgaggctctagctggtactcgggcaagagggaagacaagggcagatgactttcaaatcgtagcaaagaggacatcgaattcactatagtacgggacagcatcaagaacaagctggagatgatctgtgatgaggtggttgtccatcccagcaaggctctgcggaaacttccaagagtccagcatctgtcagcgcagttagctgcgcgaataaggaacgaagatgatgagtttgagattctaaacaccctccatccgagtccagctgtttgtggcttgcccactgaagaggcacgccaattcatacgggattgtgaaatttttgaccgtggaatgtatgctggtcctgttggctggcttggaggagctgagtgcgagttcgctgtcgggattagatcagcgttacttggaaaaggtcacagcactctggtgtacgccggtgcggggatcgttgaaggtacaaacccatcttttgaatgggatgagcttgatctcaaagcatctcagtttgcaaagctgttgcggtaccaagaacgacctattcgctaccaagaggctgaaaatctgggaacggtgatctgaatagagaagtacagaagaaactagaaagtcatcacaaagttcggcattcatttagcgagttatttatacaattgtttgtttgatatagtaagctagaagggggattcagttggatttgtgtaattatggaatccagaacagcggcagtgctgaaaaatacattgattgaacctgaatgggaaattgttcaatgtaacaaaaatatgtttacaacataaactatttgattgaatcagtgcgtgaatgtgacaactagcaatagagtatcctcgcgtg

SEQ ID NO: 200517 - DNA, 2236 bp, Zea Mays
gactcacgaaggaggcgcgacgtgcgcgtgccgctgtgctgcactgctagtgttcctgcgcgccgtgctgtccggcccgcccgcgccgcgcaccgatgccgccaccgtcttcctcgcgctactccccgggccggctgctcgccgcgcgcccggcgtccgccaccacggtggggagatgggcgcgcttgtcgtgctcgctgtccatgaacgggtgcgcgccgggcgccggggaccgcggcgcggtgtgcgtgcgcgagacgcgggcgctgccggccgcgccggcgccgcacgacgcagtggggcggctcagggccgccgtggacgcgctctggtccaacgcagcgccaccggccgcgccctccggcatcatccgcatcgaggtgcccatcacgcagcgggtggacgccgtggagtggctgcacgcgcagaccacgctgccccgctgcttcttctcggcccgggcgccgttgcccgacgcgcccgccctcgccggcaacggcaacggcaacggcagtgtccatcggcagcagccggtgagtgtcgcgggcgtgggttcggcggtcttcttccgagggacggagcccttttctctagctgattggcgcgcaatcaagagatttcttccaagggactgtccactggtccgcgcatatggcgccatccgtttcgacgccacgagtgacgcttccgttgaatgggaggactacggctcattctacttcgttgttcctcaatatgttggtgcaggtcgagttcaatgagctcgaggagagctcagtcctcgcgacgaccatcgcgtgggacgactcgctctcatggacatggcacaacgccgtggaggagctccaatcgactctgcgaaaggtgttgcgcgttcctcgtcgtccggttttttaaccgtctgctagaagactgtaacagcctgtagtactttttttccctcagatatcgccttgctcttctgttcaagcgaacaaggccagcctacagacagccatcgtaagtctcaatcatgtcccgaccaaggcgtcttgggatcttgcagttactaaagctctccatatgatcaagggcaggcaaagagaattggtaaaggttgtactggcaaggtgtagcagatacattactgacacttgcattgaccctgtggaactgctggcttgcttgaaggctgagggccaaaatgcttatcaattctgcatacagccaccgggtgctcctgcgtttgtcggaaatagcccagagcaactatttcatcggaagtacttgaacatttccagcgaggctctagctggtactcgggcaagagggaagacaagggcagatgactttcaaatcggtcaggatttgcttctaagtagcaaagaggacatcgaattcactatagtacgggacagcatcaagaacaagctggagatgatctgtgatgaggtggttgtccatcccagcaaggctctgcggaaacttccaagagtccagcatctgtcagcgcagttagctgcgcgaataaggaacgaagatgatgaggtgacctatgacaaaacttctactacttgagttgggtgaacatcatataaggtaacgatagcaacttgtgctggcgatgcagtttgagattctaaacaccctccatccgagtccagctgtttgtggcttgcccactgaagaggcacgccaattcatacgggattgtgaaatttttgaccgtggaatgtatgctggtcctgttggctggcttggaggagctgagtgcgagttcgctgtcgggattagatcagcgttacttggaaaaggtcacagcactctggtgtacgccggtgcggggatcgttgaaggtacaaacccatcttttgaatgggatgagcttgatctcaaagcatctcagtttgcaaagctgttgcggtaccaagaacgacctattcgctaccaagaggctgaaaatctgggaacggtgatctgaatagagaagtacagaagaaactagaaagtcatcacaaagttcggcattcatttagcgagttatttatacaattgtttgtttgatatagtaagctagaagggggattcagttggatttgtgtaattatggaatccagaacagcggcagtgctgaaaaatacattgattgaacctgaatgggaaattgttcaatgtaacaaaaatatgtttacaacataaactatttgattgaatcagtgcgtgaatgtgacaactagcaatagagtatcctcgcgtg

SEQ ID NO: 200518 - DNA, 990 bp, Zea Mays
atctcccatcgcaagaaaaaggaaatcaaaacaaagtaaagtggggggaaaagcatggcgatagctcttctcccatccgttcgtcttcttccacaaagtctctccagaaggccaccaccaacctcgtcgccattatccgttcgccgcccacggccaagagcccttcccctccctcgcgtccactgccgcgccggccggaccccggaccccctcaccgctgctagggaggctgctgccttttgggctgggaagctcgccggcgctgtgccatggaaggccgcggtctccggcgtggtcgccctcgccgtctccttcacctgccttgttggtttggccaatgccagaactggggtaaacaaaccagaattgcttcctaaagaatttactaccgtcatcgatgttgctggttttctctcgtcaggccaggaaaaccgtttgcgccaagagatagaagacctggagaaagatacagggtacaaactgcgagttcttgcacaaaattatcctgatacacctggttgatgagcgtactattgtttttgttgctgatccaacctttggtaacataataaattttaacattggtccattagttgatttagacgtccctcggagcttttggagtcaggtttcagggaagtatgggaacatgttctactggaaagaaaagggagaggacgcctcaatcgaagctgctgtgacggcaatatctcgatgtctaaggaaccccgccgggacaaataactgttcggaggtattatagaaagtgatgagttatgccgcacaaaggaacatggaaatgacagatgcatgtgtacagaagtgaaatactagaacaacatagaggctaaagatgtctcatggtctccagagaactaaggcttcactctttgaaatcgagagcttttatctggtcgtgaatatggatagttttacaatgtgactggattttaaaatgtctaaataagagagaaatttgagatcttcaaa

SEQ ID NO: 200519 - DNA, 2827 bp, Zea Mays
agccaaatcattcacgtattcatcttcaagccagccgtctccttatcctgcgatgccgctcacctgggctcatcttccagccgccctctccgcccagcagcagagcacaccatcctctcaactcggatccccaagccctcgcctccagctcttgccacggcatccatcccctgctcggacctccacccggccgcgtcctcgccggtggccagcgccgctgcatcgcccttcctagcgtcggccttggcaccgcttccccgagcgccccagtcgagctcgcccatcctctgctctagccctttctccacgccgtcgctgagctcgcccctcccctcagccatggacacgacgacctgcagcccttcttggtggccaagcccatcttcctgctcgcgccccctcttttccacctctgcgcgtatcagctcgtccaacccccatggtgtttcctccctctcggctcccttgctccctccccatggcgttccccctggatgttggtgatctgttccccacggtgcaggcaaatgttctttccctccctgcagcagcaccttggtggttgtcgagcagcacgtcgcgcttgcgcagcctcggtcacgacgttgttcaccccgctaaccattggtgtcatacctcacgtgtcatgtgttcgccgaaatgcctaaacatgtagtctgtcgtcgtcgtatccacagtcaattttagtcatgccctgcttcaaacccgtgacatggtgacttgagacctctctcgctattgtaccaggccagtcctttacgaaccataatactatgttaatataatattcagatacttctaatttaatctgcagttgtagaaggtaatgagcatgttttaacttcggagattcaaccagagatagctagaactacaacactacaactttcatttaatcaagcttgtttctgctttatcttgctatgctctgaccaaagctttaattcttgtgctactggtatttctgtgttctgcagatcatttagctcaagtaattggtagttcaattgtgataagtaggctgagcaaattgtactgctagtgtagtttgttttgtttgatttgtgtgggcacacttgaaattggcgtgagtctagtaacataagttgtgtcattttgctcagaagccttacatatgagttctttctggttcatctgatgtccacactgagtttatctgatgtccacactctgagtttatctgatgtccacacactgagttttggcaattaatttgcctgtttagaagcagagttctagaacctaaactgtctgtctgaagcagagctctagatcctgaactgtctgtctgattggttgctgcttactttgtgctgcactgaaattggtagtggtgtctgtctagcccattggaagttttcttctcatctctgtttcgttactgcacaggggaacttggtacagccatccatggtatcagaatatgacctgggaggagaaggggacctgttcaaagctccagaagccatcatcgaggaaccgctgctcctgaactgtctgtctgattctgttcatttgttgttgtgtaggctgggcttgtgccaagcttgaatcctcttgtgaaggagtttctcaatgctgctgatgacaagcggaaggaagtcctctctaaaatagaagaggatgttgctaagctcagcggttctgcagccaaatctcgcgtctagaattgccgctagatgggggaggtgagcggctcctggtctcttcgatccaatgtaatggtcagctaagaagctacaagtgaatgccgaggagagcagcgatgacttggctaacccaccgaaggtagaggagaagcttggtgctgtccctcatggcctgtccaccgactctgaggttgcccagagggaagccgagtctatctctaggaagactctcaggagctcagccgagaagtttgagttccaagctgaggtttccagactcatggacatcatcatcaactcactctacagcaacaaggatatcttcctgagggagctcatatctaatgcctctgatgctggataagattaggttcctttcccttactgataaggaagttctgggtgaaggggacactgcaaagcttgagattcagattaagttggacaaagagaagaaaatcctctccattcgggataggggtattggtatgaccaaggaagatcttattaagaaccttggaacgattgctaaatctggcacttcaggtacttcaggtactgccttttcatctttccagctgattactgcactcataatatttgtttatgagtgcaggaacaggagctgctcgagtctcttgtcgaagctgatacgagaaggcaggaaagagctaaaaagatggaagaaaagaaagtgtatctgcaactatacgaagcaatggaggcgttggtcaagatcaatctggagacgaacaagatcatggacttcatcaagtttgacgtcggcaacgtggtcatggtgactggcgggaggaacaccgggcgtgtaggagtcatcaagaacagggagaagcacaagggcagctttgagaccatccacgtgctgcttggagctttttgctatgtctagttttctcctatttgttgtacaggaaaacatagaatagaattcaaatttggtggtcgcaaaagtgtggagactttaattcatataaagttaggcttaacattagtgcaaacagttgtattttagtttagatttagagtacacttatgtatgcattgtttgacaatgtttatttatgatatattaaatggtacttatttatattatattaattataatgttgttcaat

SEQ ID NO: 200520 - DNA, 1656 bp, Zea Mays
gttataaactgttcaggattccctcgtaggcttttcatgttctggtactggatgtgcagttttgggaggcattgctacagagataggacttctagctgaaattgttgcccattgatcacgctttatcctattcctaagttatttgatgaatgttcatgctgtttgtgttctcagttgtcactatcaaataggtagttatccgagggtggtctcattgactgcagatctctaggtgatagctgggcatgaaggaaccagtttgcatctattcagacctacaaccttcaacttgcattgtgtttgttcagtgtcttctaccttgaagtagttaatgattagggtcattattgcaggtcttactgctattttttgcttgggcttgtcatcgtggattatgtgttgggggggaacttggtacagccatccatggtatcagaatatgacctgggaggagaaggggacctgttcaaagctccagaagccatcatcgaggaaccgctgctcctgaactgtctgtctgattctgttcatttgttgttgtgtaggctgggcttgtgccaagcttgaatcctcttgtgaaggagtttctcaatgctgctgatgacaagcggaaggaagtcctctctaaaatagaagaggatgttgctaagctcagcggttctgcagccaactaagaagctacaagtgaatgccgaggagagcagcgatgacttggctaacccaccgaaggtagaggagaagcttggtgctgtccctcatggcctgtccaccgactctgaggttgcccagagggaagccgagtctatctctaggaagactctcaggagctcagccgagaagtttgagttccaagctgaggtttccagactcatggacatcatcatcaactcactctacagcaacaaggatatcttcctgagggagctcatatctaatgcctctgatgctggataagattaggttcctttcccttactgataaggaagttctgggtgaaggggacactgcaaagcttgagattcagattaagttggacaaagagaagaaaatcctctccattcgggataggggtattggtatgaccaaggaagatcttattaagaaccttggaacgattgctaaatctggcacttcaggaacaggagctgctcgagtctcttgtcgaagctgatacgagaaggcaggaaagagctaaaaagatggaagaaaagaaagtgtatctgcaactatacgaagcaatggaggcgttggtcaagatcaatctggagacgaacaagatcatggacttcatcaagtttgacgtcggcaacgtggtcatggtgactggcgggaggaacaccgggcgtgtaggagtcatcaagaacagggagaagcacaagggcagctttgagaccatccacgtgctgcttggagctttttgctatgtctagttttctcctatttgttgtacaggaaaacatagaatagaattcaaatttggtggtcgcaaaagtgtggagactttaattcatataaagttaggcttaacattagtgcaaacagttgtattttagtttagatttagagtacacttatgtatgcattgtttgacaatgtttatttatgatatattaaatggtacttatttatattatattaattataatgttgttcaat

SEQ ID NO: 200521 - DNA, 1932 bp, Zea Mays
gttataaactgttcaggattccctcgtaggcttttcatgttctggtactggatgtgcagttttgggaggcattgctacagagataggacttctagctgaaattgttgcccattgatcacgctttatcctattcctaagttatttgatgaatgttcatgctgtttgtgttctcagttgtcactatcaaataggtagttatccgagggtggtctcattgactgcagatctctaggtgatagctgggcatgaaggaaccagtttgcatctattcagacctacaaccttcaacttgcattgtgtttgttcagtgtcttctaccttgaagtagttaatgattagggtcattattgcaggtcttactgctattttttgcttgggcttgtcatcgtggattatgtgttgggggtactaacttatccaatttactaattcttgtatatgaaccatgatacttgtgagactgcttcgaacctgtgacatggtgacttagagcaactctcgctattgtaccagccctgcttcaaacccgtgacatggggaacttggtacagccatccatggtatcagaatatgacctgggaggagaaggggacctgttcaaagctccagaagccatcatcgaggaaccgctgctcctgaactgtctgtctgattctgttcatttgttgttgtgtaggctgggcttgtgccaagcttgaatcctcttgtgaaggagtttctcaatgctgctgatgacaagcggaaggaagtcctctctaaaatagaagaggatgttgctaagctcagcggttctgcagccaaatctcgcgtctagaattgccgctagatgggggaggtgagcggctcctggtctcttcgatccaatgtaatggtcagctaagaagctacaagtgaatgccgaggagagcagcgatgacttggctaacccaccgaaggtagaggagaagcttggtgctgtccctcatggcctgtccaccgactctgaggttgcccagagggaagccgagtctatctctaggaagactctcaggagctcagccgagaagtttgagttccaagctgaggtttccagactcatggacatcatcatcaactcactctacagcaacaaggatatcttcctgagggagctcatatctaatgcctctgatgctggataagattaggttcctttcccttactgataaggaagttctgggtgaaggggacactgcaaagcttgagattcagattaagttggacaaagagaagaaaatcctctccattcgggataggggtattggtatgaccaaggaagatcttattaagaaccttggaacgattgctaaatctggcacttcaggtacttcaggtactgccttttcatctttccagctgattactgcactcataatatttgtttatgagtgcaggaacaggagctgctcgagtctcttgtcgaagctgatacgagaaggcaggaaagagctaaaaagatggaagaaaagaaagtgtatctgcaactatacgaagcaatggaggcgttggtcaagatcaatctggagacgaacaagatcatggacttcatcaagtttgacgtcggcaacgtggtcatggtgactggcgggaggaacaccgggcgtgtaggagtcatcaagaacagggagaagcacaagggcagctttgagaccatccacgtgctgcttggagctttttgctatgtctagttttctcctatttgttgtacaggaaaacatagaatagaattcaaatttggtggtcgcaaaagtgtggagactttaattcatataaagttaggcttaacattagtgcaaacagttgtattttagtttagatttagagtacacttatgtatgcattgtttgacaatgtttatttatgatatattaaatggtacttatttatattatattaattataatgttgttcaat

SEQ ID NO: 200522 - DNA, 2546 bp, Zea Mays
gttataaactgttcaggattccctcgtaggcttttcatgttctggtactggatgtgcagttttgggaggcattgctacagagataggacttctagctgaaattgttgcccattgatcacgctttatcctattcctaagttatttgatgaatgttcatgctgtttgtgttctcagttgtcactatcaaataggtagttatccgagggtggtctcattgactgcagatctctaggtgatagctgggcatgaaggaaccagtttgcatctattcagacctacaaccttcaacttgcattgtgtttgttcagtgtcttctaccttgaagtagttaatgattagggtcattattgcaggtcttactgctattttttgcttgggcttgtcatcgtggattatgtgttgggggtactaacttatccaatttactaattcttgtatatgaaccatgatacttgtgagactgcttcgaacctgtgacatggtgacttagagcaactctcgctattgtaccagccctgcttcaaacccgtgacatggtgacttgagacctctctcgctattgtaccaggccagtcctttacgaaccataatactatgttaatataatattcagatacttctaatttaatctgcagttgtagaaggtaatgagcatgttttaacttcggagattcaaccagagatagctagaactacaacactacaactttcatttaatcaagcttgtttctgctttatcttgctatgctctgaccaaagctttaattcttgtgctactggtatttctgtgttctgcagatcatttagctcaagtaattggtagttcaattgtgataagtaggctgagcaaattgtactgctagtgtagtttgttttgtttgatttgtgtgggcacacttgaaattggcgtgagtctagtaacataagttgtgtcattttgctcagaagccttacatatgagttctttctggttcatctgatgtccacactgagtttatctgatgtccacactctgagtttatctgatgtccacacactgagttttggcaattaatttgcctgtttagaagcagagttctagaacctaaactgtctgtctgaagcagagctctagatcctgaactgtctgtctgattggttgctgcttactttgtgctgcactgaaattggtagtggtgtctgtctagcccattggaagttttcttctcatctctgtttcgttactgcacaggggaacttggtacagccatccatggtatcagaatatgacctgggaggagaaggggacctgttcaaagctccagaagccatcatcgaggaaccgctgctcctgaactgtctgtctgattctgttcatttgttgttgtgtaggctgggcttgtgccaagcttgaatcctcttgtgaaggagtttctcaatgctgctgatgacaagcggaaggaagtcctctctaaaatagaagaggatgttgctaagctcagcggttctgcagccaaatctcgcgtctagaattgccgctagatgggggaggtgagcggctcctggtctcttcgatccaatctaagaagctacaagtgaatgccgaggagagcagcgatgacttggctaacccaccgaaggtagaggagaagcttggtgctgtccctcatggcctgtccaccgactctgaggttgcccagagggaagccgagtctatctctaggaagactctcaggagctcagccgagaagtttgagttccaagctgaggtttccagactcatggacatcatcatcaactcactctacagcaacaaggatatcttcctgagggagctcatatctaatgcctctgatgctggataagattaggttcctttcccttactgataaggaagttctgggtgaaggggacactgcaaagcttgagattcagattaagttggacaaagagaagaaaatcctctccattcgggataggggtattggtatgaccaaggaagatcttattaagaaccttggaacgattgctaaatctggcacttcaggaacaggagctgctcgagtctcttgtcgaagctgatacgagaaggcaggaaagagctaaaaagatggaagaaaagaaagtgtatctgcaactatacgaagcaatggaggcgttggtcaagatcaatctggagacgaacaagatcatggacttcatcaagtttgacgtcggcaacgtggtcatggtgactggcgggaggaacaccgggcgtgtaggagtcatcaagaacagggagaagcacaagggcagctttgagaccatccacgtgctgcttggagctttttgctatgtctagttttctcctatttgttgtacaggaaaacatagaatagaattcaaatttggtggtcgcaaaagtgtggagactttaattcatataaagttaggcttaacattagtgcaaacagttgtattttagtttagatttagagtacacttatgtatgcattgtttgacaatgtttatttatgatatattaaatggtacttatttatattatattaattataatgttgttcaat

SEQ ID NO: 200523 - DNA, 1801 bp, Zea Mays
gttataaactgttcaggattccctcgtaggcttttcatgttctggtactggatgtgcagttttgggaggcattgctacagagataggacttctagctgaaattgttgcccattgatcacgctttatcctattcctaagttatttgatgaatgttcatgctgtttgtgttctcagttgtcactatcaaataggtagttatccgagggtggtctcattgactgcagatctctaggtgatagctgggcatgaaggaaccagtttgcatctattcagacctacaaccttcaacttgcattgtgtttgttcagtgtcttctaccttgaagtagttaatgattagggtcattattgcaggtcttactgctattttttgcttgggcttgtcatcgtggattatgtgttgggggggaacttggtacagccatccatggtatcagaatatgacctgggaggagaaggggacctgttcaaagctccagaagccatcatcgaggaaccgctgctcctgaactgtctgtctgattctgttcatttgttgttgtgtaggctgggcttgtgccaagcttgaatcctcttgtgaaggagtttctcaatgctgctgatgacaagcggaaggaagtcctctctaaaatagaagaggatgttgctaagctcagcggttctgcagccaaatctcgcgtctagaattgccgctagatgggggaggtgagcggctcctggtctcttcgatccaatgtaatggtcagctaagaagctacaagtgaatgccgaggagagcagcgatgacttggctaacccaccgaaggtagaggagaagcttggtgctgtccctcatggcctgtccaccgactctgaggttgcccagagggaagccgagtctatctctaggaagactctcaggagctcagccgagaagtttgagttccaagctgaggtttccagactcatggacatcatcatcaactcactctacagcaacaaggatatcttcctgagggagctcatatctaatgcctctgatgctggataagattaggttcctttcccttactgataaggaagttctgggtgaaggggacactgcaaagcttgagattcagattaagttggacaaagagaagaaaatcctctccattcgggataggggtattggtatgaccaaggaagatcttattaagaaccttggaacgattgctaaatctggcacttcaggtacttcaggtactgccttttcatctttccagctgattactgcactcataatatttgtttatgagtgcaggaacaggagctgctcgagtctcttgtcgaagctgatacgagaaggcaggaaagagctaaaaagatggaagaaaagaaagtgtatctgcaactatacgaagcaatggaggcgttggtcaagatcaatctggagacgaacaagatcatggacttcatcaagtttgacgtcggcaacgtggtcatggtgactggcgggaggaacaccgggcgtgtaggagtcatcaagaacagggagaagcacaagggcagctttgagaccatccacgtgctgcttggagctttttgctatgtctagttttctcctatttgttgtacaggaaaacatagaatagaattcaaatttggtggtcgcaaaagtgtggagactttaattcatataaagttaggcttaacattagtgcaaacagttgtattttagtttagatttagagtacacttatgtatgcattgtttgacaatgtttatttatgatatattaaatggtacttatttatattatattaattataatgttgttcaat

SEQ ID NO: 200524 - DNA, 3288 bp, Zea Mays
atgtggggacgttctacccgaatcagtataaatatcgcgctcactgagctcaacatccggaccccagaacgtgcacaaacaaatttacttgtcggagtaggttcgaaacaccgacatagtgtttatttaagcgagcatctggagaagtatggaattcctgtgcccagttatgctcttgtcaatagagaatatccggaccaagagctagactacttcatcgagcaagaagattttgttgaggtccatgggaagcggtttttgaagccttttgtggagaaacctgtcaatggggatgatcaccgaataatgatatattatcctagttctgctggtggtggaatgaaggaattattcagaaaggtgggtaaccgatctagtgaatttcatcctgatgttaggagagtgagacgtgaaggatcctacatatacgaggaattcatgcctactggtggcactgatgttaaagtttacactgttggcccaggatatgcacatgctgaggcacgtaaatcgcctgttgttgatggtgttgttatgaggaaccctgacggcaaggaagtacgataccctgtacttttgacccctactgagaaacaaatggcaagagatgtctgcaatgcttttagacagatggtttgtggttttgatctcttaagatgtgatgggagatcatatgtctgtgacgttaatggatggagctttgtgaagaactcatataagtattatgatgatgctgcttgcatcttgagaaaaatatttcttgatgcaaaagctcctcatctttcatcaaccatccctccaactcttccttggaagtctgaaccagttcagcccactgaaggtcttacacgacagggaagtggaattattggtacatttgggcagtcagaagaactgcgctgtgtaattgttgtaatacgccatggcgatcggacaccaaagcagaaggtgaaattgaaagtgacagaagaaaagcttctgaatttgatgttgaagtacaatggtggaaaaccaagagttgagacgaaactaaaaagtgctgtacagttacaagacttgctggatgctacaagacaacttgtaccaccaactaggtctggtcgggagagtgatagtgatgctgatgatattgagcatatcgagaaacttcgtcaagtcaaagcagtcctagaggagggtggacatttctctggcatttataggaaagtgcagctaaagccattgaaatggataaaagttccaaagcgtaatggtgatggtgaagaggaacgaccgattgaagccctgatgattctgaaatatggtggtgtgctcacccatgctgggagaaaacaggcagaggagctgggaagatttttcagaaataacatatatccaggtgaaggaactggtttgcttcgtctgcatagcacttatagacatgatttaaaaatatacagctcggacgaaggtcgtgtacagatgtctgcagcagcatttgcaaaaggccttcttgatttggaagggcagttgactccgatactggtatctttagtaagtaaagactcatctatgctagatggactagaagatgcaagcaccgagatggatgaagctaaggctagattgcatgagattattatttcaagtgagaaagcaaagaacacagaagggccagtggaatttccatggatggttgatggtgcaggattgcctgcaaatgcttcccagctcctgcctaagatggccaagttgacgaaagaagtgacttcacaagtaaagctgcttgctgaaggtgaagatgaaagacttgcgttgacgagcacattttcaaaatatgaccaggcaaaagctcttggaaagacaactattgatgtggctcgtattgctgccgggttgccatgtggtagtgaaagcttcctcttgatgtttgccagatggagaaaacttgagagggatttatacaatgaaagaaaggaccgttttgacattacacagatcccagatgtatatgattcctgcaagtatgaccttttgcataatgctcatctcaatcttaagggtttggaagagctattcaaagttgctcaaatactcgctgatggtgttattccaaatgagtatgggatcaacccaaagcaaaaactgaaaatcggctcaaagatagcgcgccgtttattgggaaaaatcctaatcgatctacgcaacactcgtgaagaagctatcagtgttgccgaaccaaaatttattgaagacgaagctctattcctaccaacaaaagaagcagagcaccagcagaaggttcatgttagaaatgaggatggaagaagatctagctctacgagtgagaagtcattggaccaagaagatgaagatgatagagaaactaaataccgattagatcccaagtatgccaatgtaaggacacctgagcgccatgtccgcactaggctttacttcacatcggaatctcatatacactcattgatgaatgtccttcgttactgcaatttggacgaaagtctacaaggagaggaaagccttgtctgccagagtgctttggaccgtctacatagaactagggagcttgattacatgagtaatattgtgcttagaatgtttgaaaacatagaggttcctttggaagatgagaagaggttcaggattgaaatgacgttcagtcgtggcgccgatctcagtcccctagaggacaaaaccagtgaaagttcttccttgctccaggagcacaccttgcccataatggggcccgagagactgcaggaagttgggtcctgcctgaccatggacaagttcgagaaaatggtgcggccattcgccatgccgccggaggacttccctcctgccgctccgccacaagccttgggctacttctccaaaggggcaggggtgcttgaaaggttggctagcctctggcctttccacaagagcgctaacgggaagtagctggaagctaacaaatccctgaaaccagttcatgtggttattcttgttctgtaacactttctgcacgccagcccaattttgacgatctgaatcatagtgaaaattttgctggttctttttcatgagcgcgagacataattgtgctatcatgttgcttgcatggatctgagatttaagggtgcgtttggttgctggatagccaaaacaggaatgtcccctggtatcctctcttgtccctccaattttaaggaacaactggggacaatactagaataattctgtctcaatccttgatcctgaactaaacaaacttatttaagtgatcatcccatcatgtcatgtcct

SEQ ID NO: 200525 - DNA, 3099 bp, Zea Mays
taagcatctggagaagtatggaattcctgtgcccagttatgctcttgtcaatagagaatatccggaccaagagctagactacttcatcgagcaagaagattttgttgaggtccatgggaagcggtttttgaagccttttgtggagaaacctgtcaatggggatgatcaccgaataatgatatattatcctagttctgctggtggtggaatgaaggaattattcagaaaggtgggtaaccgatctagtgaatttcatcctgatgttaggagagtgagacgtgaaggatcctacatatacgaggaattcatgcctactggtggcactgatgttaaagtttacactgttggcccaggatatgcacatgctgaggcacgtaaatcgcctgttgttgatggtgttgttatgaggaaccctgacggcaaggaagtacgataccctgtacttttgacccctactgagaaacaaatggcaagagatgtctgcaatgcttttagacagatggtttgtggttttgatctcttaagatgtgatgggagatcatatgtctgtgacgttaatggatggagctttgtgaagaactcatataagtattatgatgatgctgcttgcatcttgagaaaaatatttcttgatgcaaaagctcctcatctttcatcaaccatccctccaactcttccttggaagtctgaaccagttcagcccactgaaggtcttacacgacagggaagtggaattattggtacatttgggcagtcagaagaactgcgctgtgtaattgttgtaatacgccatggcgatcggacaccaaagcagaaggtgaaattgaaagtgacagaagaaaagcttctgaatttgatgttgaagtacaatggtggaaaaccaagagttgagacgaaactaaaaagtgctgtacagttacaagacttgctggatgctacaagacaacttgtaccaccaactaggtctggtcgggagagtgatagtgatgctgatgatattgagcatatcgagaaacttcgtcaagtcaaagcagtcctagaggagggtggacatttctctggcatttataggaaagtgcagctaaagccattgaaatggataaaagttccaaagcgtaatggtgatggtgaagaggaacgaccgattgaagccctgatgattctgaaatatggtggtgtgctcacccatgctgggagaaaacaggcagaggagctgggaagatttttcagaaataacatatatccaggtgaaggaactggtttgcttcgtctgcatagcacttatagacatgatttaaaaatatacagctcggacgaaggtcgtgtacagatgtctgcagcagcatttgcaaaaggccttcttgatttggaagggcagttgactccgatactggtatctttagtaagtaaagactcatctatgctagatggactagaagatgcaagcaccgagatggatgaagctaaggctagattgcatgagattattatttcaagtgagaaagcaaagaacacagaagggccagtggaatttccatggatggttgatggtgcaggattgcctgcaaatgcttcccagctcctgcctaagatggccaagttgacgaaagaagtgacttcacaagtaaagctgcttgctgaaggtgaagatgaaagacttgcgttgacgagcacattttcaaaatatgaccaggcaaaagctcttggaaagacaactattgatgtggctcgtattgctgccgggttgccatgtggtagtgaaagcttcctcttgatgtttgccagatggagaaaacttgagagggatttatacaatgaaagaaaggaccgttttgacattacacagatcccagatgtatatgattcctgcaagtatgaccttttgcataatgctcatctcaatcttaagggtttggaagagctattcaaagttgctcaaatactcgctgatggtgttattccaaatgagtatgggatcaacccaaagcaaaaactgaaaatcggctcaaagctatcagtgttgccgaaccaaaatttattgaagacgaagctctattcctaccaacaaaagaagcagagcaccagcagaaggttcatgttagaaatgaggatggaagaagatctagctctacgagtgagaagtcattggaccaagaagatgaagatgatagagaaactaaataccgattagatcccaagtatgccaatgtaaggacacctgagcgccatgtccgcactaggctttacttcacatcggaatctcatatacactcattgatgaatgtccttcgttactgcaatttggacgaaagtctacaaggagaggaaagccttgtctgccagagtgctttggaccgtctacatagaactagggagcttgattacatgagtaatattgtgcttagaatgtttgaaaacatagaggttcctttggaagatgagaagaggttcaggattgaaatgacgttcagtcgtggcgccgatctcagtcccctagaggacaaaaccagtgaaagttcttccttgctccaggagcacaccttgcccataatggggcccgagagactgcaggaagttgggtcctgcctgaccatggacaagttcgagaaaatggtgcggccattcgccatgccgccggaggacttccctcctgccgctccgccacaagccttgggctacttctccaaaggggcaggggtgcttgaaaggttggctagcctctggcctttccacaagagcgctaacgggaagtagctggaagctaacaaatccctgaaaccagttcatgtggttattcttgttctgtaacactttctgcacgccagcccaattttgacgatctgaatcatagtgaaaattttgctggttctttttcatgagcgcgagacataattgtgctatcatgttgcttgcatggatctgagatttaagggtgcgtttggttgctggatagccaaaacaggaatgtcccctggtatcctctcttgtccctccaattttaaggaacaactggggacaatactagaataattctgtctcaatccttgatcctgaactaaacaaacttatttaagtgatcatcccatcatgtcatgtcct

SEQ ID NO: 200526 - DNA, 3131 bp, Zea Mays
taagcatctggagaagtatggaattcctgtgcccagttatgctcttgtcaatagagaatatccggaccaagagctagactacttcatcgagcaagaagattttgttgaggtccatgggaagcggtttttgaagccttttgtggagaaacctgtcaatggggatgatcaccgaataatgatatattatcctagttctgctggtggtggaatgaaggaattattcagaaaggtgggtaaccgatctagtgaatttcatcctgatgttaggagagtgagacgtgaaggatcctacatatacgaggaattcatgcctactggtggcactgatgttaaagtttacactgttggcccaggatatgcacatgctgaggcacgtaaatcgcctgttgttgatggtgttgttatgaggaaccctgacggcaaggaagtacgataccctgtacttttgacccctactgagaaacaaatggcaagagatgtctgcaatgcttttagacagatggtttgtggttttgatctcttaagatgtgatgggagatcatatgtctgtgacgttaatggatggagctttgtgaagaactcatataagtattatgatgatgctgcttgcatcttgagaaaaatatttcttgatgcaaaagctcctcatctttcatcaaccatccctccaactcttccttggaagtctgaaccagttcagcccactgaaggtcttacacgacagggaagtggaattattggtacatttgggcagtcagaagaactgcgctgtgtaattgttgtaatacgccatggcgatcggacaccaaagcagaaggtgaaattgaaagtgacagaagaaaagcttctgaatttgatgttgaagtacaatggtggaaaaccaagagttgagacgaaactaaaaagtgctgtacagttacaagacttgctggatgctacaagacaacttgtaccaccaactaggtctggtcgggagagtgatagtgatgctgatgatattgagcatatcgagaaacttcgtcaagtcaaagcagtcctagaggaggaaagtgcagctaaagccattgaaatggataaaagttccaaagcgtaatggtgatggtgaagaggaacgaccgattgaagccctgatgattctgaaatatggtggtgtgctcacccatgctgggagaaaacaggcagaggagctgggaagatttttcagaaataacatatatccaggtgaaggaactggtttgcttcgtctgcatagcacttatagacatgatttaaaaatatacagctcggacgaaggtcgtgtacagatgtctgcagcagcatttgcaaaaggccttcttgatttggaagggcagttgactccgatactggtatctttagtaagtaaagactcatctatgctagatggactagaagatgcaagcaccgagatggatgaagctaaggctagattgcatgagattattatttcaagtgagaaagcaaagaacacagaagggccagtggaatttccatggatggttgatggtgcaggattgcctgcaaatgcttcccagctcctgcctaagatggccaagttgacgaaagaagtgacttcacaagtaaagctgcttgctgaaggtgaagatgaaagacttgcgttgacgagcacattttcaaaatatgaccaggcaaaagctcttggaaagacaactattgatgtggctcgtattgctgccgggttgccatgtggtagtgaaagcttcctcttgatgtttgccagatggagaaaacttgagagggatttatacaatgaaagaaaggaccgttttgacattacacagatcccagatgtatatgattcctgcaagtatgaccttttgcataatgctcatctcaatcttaagggtttggaagagctattcaaagttgctcaaatactcgctgatggtgttattccaaatgagtatgggatcaacccaaagcaaaaactgaaaatcggctcaaagatagcgcgccgtttattgggaaaaatcctaatcgatctacgcaacactcgtgaagaagctatcagtgttgccgaaccaaaatttattgaagacgaagctctattcctaccaacaaaagaagcagagcaccagcagaaggttcatgttagaaatgaggatggaagaagatctagctctacgagtgagaagtcattggaccaagaagatgaagatgatagagaaactaaataccgattagatcccaagtatgccaatgtaaggacacctgagcgccatgtccgcactaggctttacttcacatcggaatctcatatacactcattgatgaatgtccttcgttactgcaatttggacgaaagtctacaaggagaggaaagccttgtctgccagagtgctttggaccgtctacatagaactagggagcttgattacatgagtaatattgtgcttagaatgtttgaaaacatagaggttcctttggaagatgagaagaggttcaggattgaaatgacgttcagtcgtggcgccgatctcagtcccctagaggacaaaaccagtgaaagttcttccttgctccaggagcacaccttgcccataatggggcccgagagactgcaggaagttgggtcctgcctgaccatggacaagttcgagaaaatggtgcggccattcgccatgccgccggaggacttccctcctgccgctccgccacaagccttgggctacttctccaaaggggcaggggtgcttgaaaggttggctagcctctggcctttccacaagagcgctaacgggaagtagctggaagctaacaaatccctgaaaccagttcatgtggttattcttgttctgtaacactttctgcacgccagcccaattttgacgatctgaatcatagtgaaaattttgctggttctttttcatgagcgcgagacataattgtgctatcatgttgcttgcatggatctgagatttaagggtgcgtttggttgctggatagccaaaacaggaatgtcccctggtatcctctcttgtccctccaattttaaggaacaactggggacaatactagaataattctgtctcaatccttgatcctgaactaaacaaacttatttaagtgatcatcccatcatgtcatgtcct

SEQ ID NO: 200527 - DNA, 3007 bp, Zea Mays
gttttgccgccaaacatgcaaaagcagcgcacacggcgcgcaacaacgcgtcgattcacgctaggaaattttacatgaggtgggtaaccgatctagtgaatttcatcctgatgttaggagagtgagacgtgaaggatcctacatatacgaggaattcatgcctactggtggcactgatgttaaagtttacactgttggcccaggatatgcacatgctgaggcacgtaaatcgcctgttgttgatggtgttgttatgaggaaccctgacggcaaggaagtacgataccctgtacttttgacccctactgagaaacaaatggcaagagatgtctgcaatgcttttagacagatggtttgtggttttgatctcttaagatgtgatgggagatcatatgtctgtgacgttaatggatggagctttgtgaagaactcatataagtattatgatgatgctgcttgcatcttgagaaaaatatttcttgatgcaaaagctcctcatctttcatcaaccatccctccaactcttccttggaagtctgaaccagttcagcccactgaaggtcttacacgacagggaagtggaattattggtacatttgggcagtcagaagaactgcgctgtgtaattgttgtaatacgccatggcgatcggacaccaaagcagaaggtgaaattgaaagtgacagaagaaaagcttctgaatttgatgttgaagtacaatggtggaaaaccaagagttgagacgaaactaaaaagtgctgtacagttacaagacttgctggatgctacaagacaacttgtaccaccaactaggtctggtcgggagagtgatagtgatgctgatgatattgagcatatcgagaaacttcgtcaagtcaaagcagtcctagaggagggtggacatttctctggcatttataggaaagtgcagctaaagccattgaaatggataaaagttccaaagcgtaatggtgatggtgaagaggaacgaccgattgaagccctgatgattctgaaatatggtggtgtgctcacccatgctgggagaaaacaggcagaggagctgggaagatttttcagaaataacatatatccaggtgaaggaactggtttgcttcgtctgcatagcacttatagacatgatttaaaaatatacagctcggacgaaggtcgtgtacagatgtctgcagcagcatttgcaaaaggccttcttgatttggaagggcagttgactccgatactggtatctttagtaagtaaagactcatctatgctagatggactagaagatgcaagcaccgagatggatgaagctaaggctagattgcatgagattattatttcaagtgagaaagcaaagaacacagaagggccagtggaatttccatggatggttgatggtgcaggattgcctgcaaatgcttcccagctcctgcctaagatggccaagttgacgaaagaagtgacttcacaagtaaagctgcttgctgaaggtgaagatgaaagacttgcgttgacgagcacattttcaaaatatgaccaggcaaaagctcttggaaagacaactattgatgtggctcgtattgctgccgggttgccatgtggtagtgaaagcttcctcttgatgtttgccagatggagaaaacttgagagggatttatacaatgaaagaaaggaccgttttgacattacacagatcccagatgtatatgattcctgcaagtatgaccttttgcataatgctcatctcaatcttaagggtttggaagagctattcaaagttgctcaaatactcgctgatggtgttattccaaatgagtatgggatcaacccaaagcaaaaactgaaaatcggctcaaagatagcgcgccgtttattgggaaaaatcctaatcgatctacgcaacactcgtgaagaagctatcagtgttgccgaaccaaaatttattgaagacgaagctctattcctaccaacaaaagaagcagagcaccagcagaaggttcatgttagaaatgaggatggaagaagatctagctctacgagtgagaagtcattggaccaagaagatgaagatgatagagaaactaaataccgattagatcccaagtatgccaatgtaaggacacctgagcgccatgtccgcactaggctttacttcacatcggaatctcatatacactcattgatgaatgtccttcgttactgcaatttggacgaaagtctacaaggagaggaaagccttgtctgccagagtgctttggaccgtctacatagaactagggagcttgattacatgagtaatattgtgcttagaatgtttgaaaacatagaggttcctttggaagatgagaagaggttcaggattgaaatgacgttcagtcgtggcgccgatctcagtcccctagaggacaaaaccagtgaaagttcttccttgctccaggagcacaccttgcccataatggggcccgagagactgcaggaagttgggtcctgcctgaccatggacaagttcgagaaaatggtgcggccattcgccatgccgccggaggacttccctcctgccgctccgccacaagccttgggctacttctccaaaggggcaggggtgcttgaaaggttggctagcctctggcctttccacaagagcgctaacgggaagtagctggaagctaacaaatccctgaaaccagttcatgtggttattcttgttctgtaacactttctgcacgccagcccaattttgacgatctgaatcatagtgaaaattttgctggttctttttcatgagcgcgagacataattgtgctatcatgttgcttgcatggatctgagatttaagggtgcgtttggttgctggatagccaaaacaggaatgtcccctggtatcctctcttgtccctccaattttaaggaacaactggggacaatactagaataattctgtctcaatccttgatcctgaactaaacaaacttatttaagtgatcatcccatcatgtcatgtcct

SEQ ID NO: 200528 - DNA, 2231 bp, Zea Mays
gtcaatctgggttagaaccagaaactgatgggtttgcagctccacttcttagtacacttggtcaagggcttttgacaagcacataccctggagaagtcctgttctctatagcaatatgtgtccttggactaattctttttgctctcctcattggtaacatgcagagctacctacaatctgttgctatacgccttgaagagatgagagttaagaaacgcgatgctgagcagtggatgcatcaccgttcactgccactggacatcagacatagggtgaggaagtatgaacgttatcggtggttggaaaccaggggagtagacgaagaaactttggttcaaactcttccaaaagatcttaggagggatatcaagcggcatctttgtttgggcttagtgaaaagggtgcctttgtttgaaaatatggatgaacgattgttggatgcaatatgtgagcggttaagacctgcactctacacagaaaatgagttcattttgagggaaggtgacccggtggatgagatgcactttattcttcatggttgtttggagagtgtaaccactgatggtggacggagtgggttctttaacaaggttcagctaaaggaagggtcgttctgtggcgatgagttgctcacttgggcattggatcccaagtcagctgctaattttccagtttcgagcaggactgtccaggcactcaccgaggttgaggcgtttgccctatgtgcagaagagctgaaattcgtggccagtcagttcaggaggctgcacagcaggcaagtgcaacacacattccgattctattcccagcagtggaggacttgggcagcctgcttcatccaagcagcatggcgccgctactacaagaggaagatggcagagcagcggcgcaaagaagaagaggcggcaagccggccaagtagtagccaccctagccttggggcgactatctatgcatctcgtttcgctgccaacgccatgcgaggggttcacaggctaagaagcaaggctgtccctaccattgtcaggctaccgaaacccccagaaccagattttggtgtcgatgatgctgactaacgagacaatcacactgtactcgcttgtaattgtactttacctcatctgtagattctgtacaagattcaacgacagctgaagaagatagtgtctgtaaaggtttgtaaccacgcacagacagaccataacggaggtatatcctgcttgacgtctatggaaatgcaaatctacttccttaaaacctgaagtgttttggagccacctccgcgcttccggggtacgggcgtacggcatcagtgtcacctgcggacgagtggcgggatcggatctaaaaaatttatccactggagttgtgggagatgtcgtgtctggtgccctctccctccgtcccgtgctgcactgcgctttcttctttgtgattgcttcgctcgcctcctccaccaccagacaccagcccaaactacctcgccagctccctctgcctccccctccctcctcccgtcgccgcagcacgcagctccgccggttttcacggcttggagcagatctgccacgccaccgccgcgtagaccaacttggtggagggatcccgtccgaatctgattcctattctccagctcgaccgctgtagcgagaggagagagagaaaggagcagtggcgacgaggtctatggcatcgatggcagcgtacctggcctggctcggcgggcggcgcagaagaagtgggtgcacctgctttaccacacggcgctcaacttccaccgccacctcttctaccaggaaatcagttcccccaatcctcccctcttcgcctcccttttgatctcgatctgccttcctgctcgcggacgggactggccttgtgttgtctctcccgcgcaggcgtcagatctcctcgacaagtttgagaccaactgccacgtggtttctttaggggtattcactgaaggcgacagctgatcgtcattcatagattgcaagcaataggggaaagtcacttcatccaaataatggtcattgccttttcttcagaatgctctatttacctatttgtaattactcccctctcatctgacatgtagagtatttgacatattcgttgtattagagagtttgacatgttcgttgtataatatgattttatcgatcttgatatatatttgaatggttgagcgcccgatagggcgctttctattctagtgtattaaatttttg

SEQ ID NO: 200529 - DNA, 3712 bp, Zea Mays
ttctggtacaaccgaacaggcccttagtcgttgaccgtctcgctcgcctccccgtccgctccgctcccgtgctttcccctttgctcgctcgcggacctccgtcccggactccgactcccggcggcgctctcgcgccagcaagctcgaatctgcacgccgccgccgccgccgccgccgccccacgcccacggcgcctaggggtgggcgcttggcttctgagaacatgtaacgggtgttgatacgaaaataggttcctggaatagcgggttcattagcagtttggcacaactttgaagctgcaggggatttcaaatgccctttgtcatcaggtccacggttccactgagccagaggattttttattgtattttcaacttccctgaggatgtttgacagtactcaaaaagctcaatacatggatgggcacagagagaggtttattaggctggatgagtcaagtcctaggtcatctgtaccttctgaagtgggaggcaggagtacattgaggtccagcatgcctgggtttggttatggtccatttaatgcactaaggtctttcttgtctgggggctctggaagactgaagtcacttagacagtcacttacttctggtgctcctaagacagcttttgcggaagatcttaaatcatataagagaactatatttgatccccaggacaaacttcttttccgaatgaactgggttttcttctcgtcttgtctttttgctgttgcagtggacccactattcttcttcctacccatcatcaacgattcaaactgcattggtattgataaaaagttggcagtgacatcaacaataatacgtacggttattgattttgtctaccttatacgcgtgtgtcttcaattccgcactgcttatgttgctccatcttcacgcgtgtttgggactggtgagcttgtgattgatccgatgctaattgcaaagcgatacattaaaagttactttgcaatggactttgttgcattgctaccacttccacagattgttgtatggagatacctccatattccagatggcccagatgtactgactacgaaaactgcactggtttgggttgttttgatccaatacattccaaggttgcttcgaatattccctgtgatcacagatttgaaaaggacagctggtgtttttattgaaactgcttgggctggtgctgcttattatcttctatggtttatgctggctgggcataatgttggtactttatggtactttttaaccatagaacgtgaagatgattgctggcatctatactgtgacgatcccaactttggcttgggatgtaatagcagctacttgtattgcaataatcatcatcatggcagctatgatagttggcttacgaataatagtgcccaagtattcaacatgtgcaatggcggtcaagacaatcctttcaactttggcatttatgagcaagcactggtctctaaaatacttagtccaggaaatttcatctcaaaattatgttattgcttctggtggggattgcaaaatctaagtacacttggtcaagggcttttgacaagcacataccctggagaagtcctgttctctatagcaatatgtgtccttggactaattctttttgctctcctcattggtaacatgcagagctacctacaatctgttgctatacgccttgaagagatgagagttaagaaacgcgatgctgagcagtggatgcatcaccgttcactgccactggacatcagacatagggtgaggaagtatgaacgttatcggtggttggaaaccaggggagtagacgaagaaactttggttcaaactcttccaaaagatcttaggagggatatcaagcggcatctttgtttgggcttagtgaaaagggtgcctttgtttgaaaatatggatgaacgattgttggatgcaatatgtgagcggttaagacctgcactctacacagaaaatgagttcattttgagggaaggtgacccggtggatgagatgcactttattcttcatggttgtttggagagtgtaaccactgatggtggacggagtgggttctttaacaaggttcagctaaaggaagggtcgttctgtggcgatgagttgctcacttgggcattggatcccaagtcagctgctaattttccagtttcgagcaggactgtccaggcactcaccgaggttgaggcgtttgccctatgtgcagaagagctgaaattcgtggccagtcagttcaggaggctgcacagcaggcaagtgcaacacacattccgattctattcccagcagtggaggacttgggcagcctgcttcatccaagcagcatggcgccgctactacaagaggaagatggcagagcagcggcgcaaagaagaagaggcggcaagccggccaagtagtagccaccctagccttggggcgactatctatgcatctcgtttcgctgccaacgccatgcgaggggttcacaggctaagaagcaaggctgtccctaccattgtcaggctaccgaaacccccagaaccagattttggtgtcgatgatgctgactaacgagacaatcacactgtactcgcttgtaattgtactttacctcatctgtagattctgtacaagattcaacgacagctgaagaagatagtgtctgtaaaggtttgtaaccacgcacagacagaccataacggaggtatatcctgcttgacgtctatggaaatgcaaatctacttccttaaaacctgaagtgttttggagccacctccgcgcttccggggtacgggcgtacggcatcagtgtcacctgcggacgagtggcgggatcggatctaaaaaatttatccactggagttgtgggagatgtcgtgtctggtgccctctccctccgtcccgtgctgcactgcgctttcttctttgtgattgcttcgctcgcctcctccaccaccagacaccagcccaaactacctcgccagctccctctgcctccccctccctcctcccgtcgccgcagcacgcagctccgccggttttcacggcttggagcagatctgccacgccaccgccgcgtagaccaacttggtggagggatcccgtccgaatctgattcctattctccagctcgaccgctgtagcgagaggagagagagaaaggagcagtggcgacgaggtctatggcatcgatggcagcgtacctggcctggctcggcgggcggcgcagaagaagtgggtgcacctgctttaccacacggcgctcaacttccaccgccacctcttctaccaggaaatcagttcccccaatcctcccctcttcgcctcccttttgatctcgatctgccttcctgctcgcggacgggactggccttgtgttgtctctcccgcgcaggcgtcagatctcctcgacaagtttgagaccaactgccacgtggtttctttaggggtattcactgaaggcgacagctgatcgtcattcatagattgcaagcaataggggaaagtcacttcatccaaataatggtcattgccttttcttcagaatgctctatttacctatttgtaattactcccctctcatctgacatgtagagtatttgacatattcgttgtattagagagtttgacatgttcgttgtataatatgattttatcgatcttgatatatatttgaatggttgagcgcccgatagggcgctttctattctagtgtattaaatttttg

SEQ ID NO: 200530 - DNA, 3005 bp, Zea Mays
ttctggtacaaccgaacaggcccttagtcgttgaccgtctcgctcgcctccccgtccgctccgctcccgtgctttcccctttgctcgctcgcggacctccgtcccggactccgactcccggcggcgctctcgcgccagcaagctcgaatctgcacgccgccgccgccgccgccgccgccccacgcccacggcgcctagaaccagggtctttctggtgtgcaggggtgggcgcttggcttctgagaacatgtaacgggtgttgatacgaaaataggttcctggaatagcgggttcattagcagtttggcacaactttgaagctgcaggggatttcaaatgccctttgtcatcaggtccacggttccactgagccagaggattttttattgtattttcaacttccctgaggatgtttgacagtactcaaaaagctcaatacatggatgggcacagagagaggtttattaggctggatgagtcaagtcctaggtcatctgtaccttctgaagtgggaggcaggagtacattgaggtccagcatgcctgggtttggttatggtccatttaatgcactaaggtctttcttgtctgggggctctggaagactgaagtcacttagacagtcacttacttctggtgctcctaagacagcttttgcggaagatcttaaatcatataagagaactatatttgatccccaggacaaacttcttttccgaatgaactgggttttcttctcgtcttgtctttttgctgttgcagtggacccactattcttcttcctacccatcatcaacgattcaaactgcattggtattgataaaaagttggcagtgacatcaacaataatacgtacggttattgattttgtctaccttatacgcgtgtgtcttcaattccgcactgcttatgttgctccatcttcacgcgtgtttgggactggtgagcttgtgattgatccgatgctaattgcaaagcgatacattaaaagttactttgcaatggactttgttgcattgctaccacttccacagattgttgtatggagatacctccatattccagatggcccagatgtactgactacgaaaactgcactggtttgggttgttttgatccaatacattccaaggttgcttcgaatattccctgtgatcacagatttgaaaaggacagctggtgtttttattgaaactgcttgggctggtgctgcttattatcttctatggtttatgctggctgggcataatgttggtactttatggtactttttaaccatagaacgtgaagatgattgctggcatctatactgtgacgatcccaactttggcttgggatgtaatagcagctacttgtattgcaataatcatcatcatggcagctatgatagttggcttacgaataatagtgcccaagtattcaacatgtgcaatggcggtcaagacaatcctttcaactttggcatttatgagcaagcactggtctctaaaatacttagtccaggaaatttcatctcaaaattatgttattgcttctggtggggattgcaaaatctaagtacacttggtcaagggcttttgacaagcacataccctggagaagtcctgttctctatagcaatatgtgtccttggactaattctttttgctctcctcattggtaacatgcagagctacctacaatctgttgctatacgccttgaagagatgagagttaagaaacgcgatgctgagcagtggatgcatcaccgttcactgccactggacatcagacatagggtgaggaagtatgaacgttatcggtggttggaaaccaggggagtagacgaagaaactttggttcaaactcttccaaaagatcttaggagggatatcaagcggcatctttgtttgggcttagtgaaaagggtgcctttgtttgaaaatatggatgaacgattgttggatgcaatatgtgagcggttaagacctgcactctacacagaaaatgagttcattttgagggaaggtgacccggtggatgagatgcactttattcttcatggttgtttggagagtgtaaccactgatggtggacggagtgggttctttaacaaggttcagctaaaggaagggtcgttctgtggcgatgagttgctcacttgggcattggatcccaagtcagctgctaattttccagtttcgagcaggactgtccaggcactcaccgaggttgaggcgtttgccctatgtgcagaagagctgaaattcgtggccagtcagttcaggaggctgcacagcaggcaagtgcaacacacattccgattctattcccagcagtggaggacttgggcagcctgcttcatccaagcagcatggcgccgctactacaagaggaagatggcagagcagcggcgcaaagaagaagaggcggcaagccggccaagtagtagccaccctagccttggggcgactatctatgcatctcgtttcgctgccaacgccatgcgaggggttcacaggctaagaagcaaggctgtccctaccattgtcaggctaccgaaacccccagaaccagattttggtgtcgatgatgctgactaacgagacaatcacactgtactcgcttgtaattgtactttacctcatctgtagattctgtacaagattcaacgacagctgaagaagatagtgtctgtaaaggtttgtaaccacgcacagacagaccataacggaggtttctttaggggtattcactgaaggcgacagctgatcgtcattcatagattgcaagcaataggggaaagtcacttcatccaaataatggtcattgccttttcttcagaatgctctatttacctatttgtaattactcccctctcatctgacatgtagagtatttgacatattcgttgtattagagagtttgacatgttcgttgtataatatgattttatcgatcttgatatatatttgaatggttgagcgcccgatagggcgctttctattctagtgtattaaatttttg

SEQ ID NO: 200531 - DNA, 1860 bp, Zea Mays
gttgcctccagcgctgaagctgctaggtggtgcttgactcacttcagagttcagacttcgtacggtcactgtactacgacactgcgcttgcggtgcccctggcgtacccagtacttgagcctgagtcaagatcggctgtatgaatgctcagaagttatggatctgtaagatccaatctgtcgattttctgagtaatacaataagtgtacaatgctcatcgcatcataatattcgaggcatacagacaatgatgccatagttgtgcaagcagctatttgtgagaaaatggaagggtaatttgcagcatgagtacagtggaaatgactgtctccaacttaaaggacatcagacatatactgaagtatcttctctccttgagcacttgaagctttgcatgttcttctcaaagaaatctttttcagcatttctgaagtttggtgggtacaaacaagaagacattcttattcacaaggctagggcgaggctcatgcagccttcttttgcattggtgtgtgacaaaagaaccaagtgcttgctgcttttcattcgaggtgctatcagcactaaagagcgcctgactgcagcaacttctgctgaagttccttttcaccatataattctatctgaaggaaagatcagcaatgtagttttagggtatgcacactgtgggatgcttgctggagctcgttggatcgcaaaacttgttattccccatcttcataacaaaatgcaggaattttctgggtaccacataaaggtcattgggcattcaatgggagctggcattggagcgattctgacttatattctccatgagcattatgagttcttgtcatgcagctgtctggcatttgctcctcctgcatgtatgacatgggagctggcggagtcaggaaaggatttcatcacttctcttgtcaatagaaatgatgtggtaccagcattttcgaaagtttcttcggagagcctgcgatctgaggtgatggtttcatcaaagctggatgatgtgcaggatcactttcaccatggtttattcgccactataagccagcgtgttgccttcatcaggtcccatatgctctccatctctcactcaacagggaagattgcagattacggctctagtatttctgagcctttgcttaaagatacaataccgcccacagcaaatggacacggcgttgactgcagccagcagcaacaggtggttgcctctgaagaaacggtcgttgtactggttaacaataacgaccatttcaccagtttgaaggccgctgattcaggcgtcacatcacaagaaggttcagacagcaacgcggcatcatcggacagtccacaacggccgcccccgccggcagacgaagccccgaaccagaatggcaccggaaaggataagcagaaagaaccggtctcagcgggctgctcgtcgtcgcgccagctcttccctcctgggaggatcatccacatggtcgcgctgccgccgcagcagccggacccaaactccgacgacggcacgagcagcggtgaggtcgttggcatatacgagacgccgaggggtttgtacgggaagatacggctcgcgcccaacatgattaaagaacattacatgcctagctatatacgtacgatggaatcgttgttggaacagctccagaaggacgacgatgatggcagtgtatgtacatgtaccgcaccaagtgacctgtgaattcttgtggagaactcgggcagtgattattccaattctttcttaaccatttcgtattgcattattggaaaggaaaaaaaaagtacaataatgtgggtgtgtgtttggtaaaatatgaacgaaatgaacctcgctcaagtctcgaacgttgg

SEQ ID NO: 200532 - DNA, 736 bp, Zea Mays
acaaaaagatctaaaatacagaaaaaaaaagttgtccggaacctacgaggaaggcttaggcgttttcctcgttcgctcgccgcggcgtcggacgatgcctctggggctgacgctggggtcgctggggcgggctatgcggcagaagcggccgtcctcgctcgacatcctctcctccaagcgggcgccgcgggactactacaagggcaagaactgcaagcccaccgggttccacacgcgcaaaggcggatacgtggttgtcgatgaaaagctgccaaggttcgcagttcctgacaatgactcatttcaaggacgaggttgaggtccagtcctcgccatgaaccggatgccatgtgtgggcgattgcagctgaagccgttcgtgtcgcagtgcaccagggacctcgcagcgtcgacgacatcctcggcctctctaacttcagcacagactactgagagcaggagctgattgtcatcggactgctctagccatttgcaggaagcgagcgaccaagccttgcagtattgcggctacgttttcctggagagtgcccgtgttcagaggattagtcattagtgtcggcgtcttagcagctacaggtggtcatttcagatgtatttttctctctctctctctttatcttgtgtaagggcaaacatgtggcgtaaggccctgtcggccctgtctgttttcttccagaattatataatctaacttatagattacataagcatctaat

SEQ ID NO: 200533 - DNA, 1623 bp, Zea Mays
gtttctaaactagatctaaacatgttttttgggtgctacccattttcttgctacagaagtcgcaacacatcttggaacacaagttggtccggccattgtaattgctacgggcacacagcgaaacgcccggcctttgttactcaaagtcgagaagcgccgtcttccccctttccaacctcaagtctacagtctacaccgaatccatcccccatcgccgccgccgccgccgccgacgacgacgatggcaagcctactccggcgatctgccgtacccgcgcgccagctcctcctcctcccgcgccatttcgccgccgccggctccgcccccgccttgtcccgctcgttctcccgcttcaacccccgagacgacagctctatgttcgatccaccggagccgccggtgaactggggcgtgagcatagttccggagaagaaggcttacgttgtggagagattcgggaagtatctcaagaccctcggctccgggttccacctcctgatccccgccgtcgaccgtattgcctacgtgcactcgctcaaggaagagaccatccctatccctcaccagaacgccatcaccaaggacaacgtcaccatacagattgacagcgtcatctatgtcaagcacatcgagtggcgtgactgcatgtctgtcaatttgaatctaccaagtgccatcaatgaagcagccacagattggggcctgaagtgtatccgctatgagatcagggacataaatcctccagcagggattaggcaggctatggagatgcaggctgaggcagaaaggaaaaaacgcgctcaaatccttgagtcagaagggatgaaacaggcccaaatccttgaatcagaagggaaaaagactgcccagatccttgaatctgaaggagctatgttggatctagcaaaccgtgccaagggtgcggctgaagcaattcttgccaagtcagaagctactgctcgtggaatgagattggtttcagatgcgatgacaactgaaggcagtgccaaggctgctagcctgaaacttgcagagcaatacatcgaagcattctcaaatctggcacaaaaggtgatagtgccagcccagcatctttcgtggcccaggcaatgaagacgtatgagcaaatccattcccacagccaggcattaaagagccacccccagatagaagagctgaaggaatcaggagagaccagtcctgctccatcttctgaggcgagcaagacaccaccactcattgaggaagcagattctaaccagaccttctcactgcaacgccccaagaacaagcagtgagcttcgctcaagtgtttgaagtccttttttctatctgttgttctgaaacatgagtgccactgagaaacaccactagtaggttttagttttctttagtctgagagagctgatatgtggcggagaagggatagacccctaggcatttggtttctgggagctaaatgcgaccggagagacctagagagattttgattctcgtgaaggttatactttggttccttgttggaatgaagtttgtaaaaaggcaaggttgggttaacgttggttagacaaaatgcataaatgcttaagttatttctttcttgctgagcttgactacatata

SEQ ID NO: 200534 - DNA, 446 bp, Zea Mays
atgatatcgtatcgtcgcaatcggcttgctttgaagggaacccattcaagacagttccaggcccatttaagctcttctggcaatgcatgcgctcaaaacctggggaggaaccaaccgagccctatacctacctgcagctagatcctccgagaagggtggaagtgaatctggagcaaacaggaagtgaaccttgaacgagcatgccatctcgtgccgatttgtcttcacctttggagcaaactagctgcatcaactaataaactaggcatagggagatgctcgttcaccatcttgttcaaggtgaatctggaataaactaacagaagcatcaactaattggctgcataagaaaaaaaatataaaccttcagtggctttttcattatcatcttgcatcaactaataaactagctgcatcaactaataaacgagcatgcctagtttacc

SEQ ID NO: 200535 - DNA, 440 bp, Zea Mays
atcatatccacgtttgcttggctgatttattaggcagccctgttgtcagaccagctgacatagagaccacagccctcggagctgcatatgctgctgggttggctgcaggagtttggaccaaggagaaggtttttgcaggtttgcacaaggagaacacgacagtcttccgcccgaaactggatgaggcgcacaggaaaaagagggcggattcatggtacaaggcggtttcaagatcattcgatctggctgatctttctctgtaaatttatcctgccagcgctcctctatctggttttggaagctgcaaatgaataaattggtcttcgctgggactaatcttaactgcttgttatttatatataacatcacgatgtttataaaagtgagtacatgaatatcctcagattttcagcaggaagtgtttttctagaatatttatg

SEQ ID NO: 200536 - DNA, 1769 bp, Zea Mays
atgactcatgagagagggaggcggagttggaggcggagcatttaccggcggcagcctctgcctagtacactggagtcgctgcgaaacggagagacggagactcttggactggaggcatgatggaggcaaagcaggcggcgcccgaccggctctcctccctcccagcggagctgcaggacgagatcctcatccgcctcgacctcagggacgccgtgcgcacctccgcgctctcccgcacctggcgggacctctggaagtcgctctcggtgatctccctctccttccccttcggcacgcacccttccgtcgtcgacagcgtcctcctccgctacatcggcccccgcgtctctctcttccgcatctgtgtcgacgacgcatgtgccgaccgcatcgacgactggctcatcgcgctctcccgctaccgtgtcgagtccatcgacatgtgtggcacactcagatcactcggcaacttcaatctctactcctccatcttctccttaggtgatctcgtgtctctgctgctgaaaaactgccgcatcccacccctccccgtaggattccccggcttccccgcgctccagaagctagtcctcgcctatgttatcttcccatcgaacgggttcaaacaattggaggctatcattcgtcgctcacccttgcttcataccctgcatatgtttgacgtgttcatccctggtgaatacccagactcagtgatcgaggcgcccaatctccgtgtcctgtcaatctattcaccgtatgactatcgatggcgatttggagagctgtcgtgtctcgaatatgccaacattcatgtgttccactgtccgcagcatgaacatgattttggagttttccttgctcggtttgctcacgttcaaaagttcggtctcttctctccggctgtcgatgttaagatgccttatacacttccattcaccttttataacttgaagaaattgcagttatgtgtggatttcaatgaaattcactccattttgtccatgtttaccatgctaaggagctgtcacaaccttcaaaacttaaaaatagagttatgagagttttgaggcagattgggagttcttaaatgctctgtggactgatggcatgtgtgccaatcttcaaattgtgcgcatgattgatatcatttcgcttccgaatgaaacttcatttatgaagcttatactttctaaagcaactcttcttcacacattatatgttggcgcacacccatatgattttgatgatcacataattgacatgctaaaatgcgaaagagcttcagctcaagctcgtgtacagtttgaaggttcggagcaacagtggtagatgtggtggcaacattggttcgcttgaatgagacaagacccgcttttcctgcaccctgctgaagtgtttttttgtttgtctccgtcatcacaatgatacacgaatcatgtagaaaatggcttatccagggaaccggcttgatttgtttgtcttgttgagaagaagctgatgtggtattagttgttcatttgttcattagggatatccgtggcagcaagcgcccagagtcgtttggtttttgcctgagtaggtgaaattcggacctccagaacttgttgcttgctgagctcgccatggagtgtttgtttctagctaacgttcttctctgtttggtgaaagctgctcccctttacttcatactcctgtttgttttgttgtccggttccagttaacgagctgaatctatttccaacattagtttccctgatttctatttg

SEQ ID NO: 200537 - DNA, 2464 bp, Zea Mays
cctctcccctcttctcttctcgtctcccctccgccgcttccgttgctcgcagtgctgcctcccctcctctcttcactcgtcaggcccttccgccgtcccggaggctcgaacccctcggcccgcggacgggaccctaaacccgccccaccactcgcgcggggttcgcccgcgacgcatgcgcggcggcggctggtaccctcggcagccggcgatcgccggaaatctgcggggacagtgcggcggcttgcacgagtgccggacacggcgggagtggggaacgtaggggagatggcggcgggaggaaagggctgggcggagcgggtacgccgcggggcgaggaccgcttggttcatggtggccatggtggcctcgctgctcgtggcgtcgtcgccggcgctggtggcggcgggcgacatggcagtggcgctctggctcgaggcgcggctcggctgcttccgaggcgacggcctgcggggccacctccagcgctaccgttttcggaactcgcttgccgacatacctctcgtctccgtcgttcgatccatcgtcatcacctgtgtgtacctcatgtctgatacttctggcctctctcatgtccggcgcaggacattgggcctgagctctcgccgtcgttaccagatcacaagctcaatctcaagaatctatggggaatgcctgtacttttcctgtcttccttggtgtttgctcttggccatgttattgttgcttacagaacaagcggcagggctcgacggaagcttctcattcaccgcattgaccctgaatcgattttagcatacaagaatgccttttctggatgctacaaggttccacggtctcctacaccatacagcggaaagctttttacaaggagtgaaagtgagactaagagaaaatcacttatccaggacgatcgtgatttgccaatcagttttcttgcagacagtgatagcatgttcattgcttgccaggggatcactatacactacaaagtttccgatccagcagccagcctaccttcatcccctggcttcttttcagagagagatactcatcacgatgtaatttcatcaagcatttctcctagaagacagaggcatgagagtccaccatctgcttcctctaatacccgtcgcgttctgaataggagctttagccatcaataccataatacttcgctatatgcaccactattggtagaaccagtggcatctccaactttgttggatgatattcctctgatgtgtattgatgatggcaatgctgatggatgtctgagtcatgtgggctttgaccttgaggctggagggcagggtaaattcgctgtagttttggtgcatggatttggagggggagtattctcgtggagacatgtttccaatttgttagctcgacaattgggatgcactgtgatggcatttgatcgcccaggatggggattaacatctcgacctcgtaggaaggactgggaagataagaagttaccgaatccatatgagctggagtctcaggttgatcttcttatttcattttgttcagagatgggcttgcactctgtggttttagttggtcatgatgatgggggcttgcttgccttgaaggctgcggagaagctgcgcacttatggaggtgacagagaggttgaagtgaagggagtagttcttattggtgtgagcttatcaagagaagtcattcctgcatttgctcgtatactcctgcatacacctctgaggaaaaagcacatggttcgaccacttctacgtactgaaatcgttcaagttatcaatcggcgggcatggtatgatgccacaaagttgacgacagaaatacttaacctatacaaggctccgctatttgttgagggctgggatgaagcacttcatgaagtaggccggctttcgttttctactgtcctgccatcaaaacgagcagcggatctactaagatcagtggaagaccttccggttctggtggtagcgggctccgaggatgctcttgtttctctgaagtcggcacaagccatggcttcgaaatttgtaaattctaggatagtaattatatcggggtgtggacatctgccgcacgaggagtgccccaaggcgttgctctcggctcttgctcctttcatctctacattggtaccctcagaagatttgttgcaaagactgtagaatatactcgttcctttttcgtttttttaagaacttttttctagctggtgagtttgtatgagcccattgtagcgcgaagtagtagtggagcctgacccaaaatctcaagggttcctagagctcccctgatttttttgtcacatgttaatggttccccctgaacgatttcaattaagcaagttgaatgtgtacagcacatgctttgttctgttccttgcccagcctaggtggggagaacaggcttagtacaatggcgatagctatcttggtttgaagccatctccgtggaagcc

SEQ ID NO: 200538 - DNA, 3159 bp, Zea Mays
ggcggcgcaggatcgtagcaccgagggtttccagtccacgttctagaagattcccgtctacattggccgaccccgcggcccacaccgtatatcaccgcctcctatccggcctctgcccttctcgccgaacggaaaaccctgcccggaccttcgttgcagcgctacgagcttcgacgggccgctcgatctccacctctgaagtggctgcttgtgatctagatctgaaagctgcagtggttgacagctgagtgtgaaactgtgaatcgaagatgagcgtggtgggcttcgacctcggcaatgagagctgcatcgtggcggtcgcgcggcagcgcggcatcgacgtggtcctcaacgaggagtccaagcgcgagacacccgccatcgtctgcttcggggacaagcagcggttcatcggcaccgccggcgccgcgtcctctaccatgaaccccaagaactccatttctcagatcaagcgcttgctaggccgcaagtactccgaccccgaggtacagagagatctcgcctccttcccgttccgtgtcacggagggccccgatggttttcccctggtccatgtacgatacctgggcgaggaacggacgttcacctctacccagctgcttgccatggtgctgtccaatttgaagggcattgctgagggtaacctgaatgctgcagttgttgattgttgcattggtattccagtctactttacggatctgcagcgcagggctgttcttgatgctgctactattgcgggtctccagccattgcgattgttccatgagacaacagccactgcactggcatatggtatttataagactgatctcccggagaatgaccagttgaacgttgcatttgttgatgtcggtcatgcaagcatgcaggtcagtgttgtcggttacaagaagggacagctcaagatgttgtcgcatacgtatgaccagtctcttggcgggagggactttgatgaggccctgtttaagcactttgcagctaaattcaaagaggaatataagattgatgtgtaccagaatgcgcgtgcatgcattaggttgcgtgtggcatgtgagaaacttaagaaggtactgagcgccaacccagaggccccactgaacattgagtgtttgatggatgagaaggatgtgcggggttttattaaaagggaggagttcgaacagatcagtgcctcggtgctggaacgcgtgaaaggaccactggaaaaggccttggctgaagctgggttgactactgaaaatgtgcactttgttgaggttgttggatctggttctcgtgttccggctataatcaagataataactgatttttttgggaaggagccaagacgaaccatgaatgcaagtgagtgtgttgcgcgaggatgtgctcttcagtgtgctattctcagccccactttcaaagtgcgagaattccaggttaatgatgggtttcctttctcaattgcattgtcatggaatggagactcccagaacaccccccaacaaacccttgtattcccaaaggggaatgcaattcctagcactaaagttcttaccttctttaaatccagtacatttgaagttgatgttttgtatgtcgacccaaacggcttacaaattccacaaaaaataagcacatacacaattggccctttccaaacctccaaaggagagaaggccaaactgaaagtgaaagtgcgtctcaacatccatgggaccgttacagttgattcagcaataatgctggaggatgatgtggaagttccagtttcatctgcaaatgaagctccaaatgatactatgaagatggacacagatgatgcaccaagtgatcctgctgttgcatctgatgtgaatatgcaggagcctaaaagcgctgataccgctgaggctgctcatgcagctgaaaatggaccacaagatactgaggaaaaatctgttccgatggaaactgatgcaaaggttgagccgtcaaaaaagaaagttaagaaaattactgttccggtccatgagttggtctatggggccttggctgcggctgacctgcagaaggctgtagagaaagagtatgagatggctcttcaagacagagtaatggaagaaacaaaggagaagaagaatgctgttgaagcttatgtgtatgacatgcgtaacaagctatatgacaagtacagtgattttgtcacgtctgaggacaaggaaggtttgattgctaagcttcaggaggttgaagactggctctatgaagatggcgaggatgaaactaagggggtttatattgctaagctagaagaacttaaaaaagttggtgatcctattgagctgcgcttcaaggaatgggagattagaagttctgctgttagccaactggtatactgcatcaatagcttcagagaagctgcacagtctaccgaccagaagtttgaacacatagacatgtcagaaaagcgaaaggtcattaatgagtgttcggaagcagagacttggctaatagagaaaaagcagcagcaggatgctctgccaaagcatgctaattcggtactccttgctgctgaccttaagaagaaagctgaaacacttgataggttctgcaagccgatcatgacgaaaccgaagccagctcctaagccgcagactccgcctgtggcagaaaaccaagctcctgagcctcagacaccagagcagcagcaatcaggtggcgaaagcacagccagcgagggagccgcagaggagcctcgagccgagcagatggagacagacaaacctgagggagccacagatccctcggcttagctttgccagtgatcaaacatttgtgtgattgaccctgttcacctgctgttatagtcggtaggggggagtgaactaagcgagaggttcgccacatttgatttgaggatgtgtgttgggacattcaaggtattctgtttcttgtccttgacaagggaggtggttgggtgtttgaaggataagagcagtggggtacactttctcacgtttttgtgccccacacgctcgatatctttattgatgatggtccgtaaaaccaaggtggccgggtggagcttaaacactcatacacagagcacgagagaacaacaagacggttggtgggaattgtagctttttgctatgcatgtcctatccctcattacag

SEQ ID NO: 200539 - DNA, 2396 bp, Zea Mays
aaatcaccaaagaaatcactccagaattttgaaaaggtgacggaaatagtgaggagcggagaacaccggaatgatccatcctcttgtgctttccctgcccttccccgctataatatcgcgccctcgtcgccatcgtcaccacaccaccactccctcactgccctctcactcccgatccctgcaccactaccgcctcctccgcttcacccctctcgtcgcctcttgcggcgaccggcggcggatcgtccgcggcgcaagcgcaaccatggggctcttcaccgtgacgaagaaggccaccacccccttcgaaggccagaagcccggtacctccggcctccgcaagaaggttactgtattccagcagcctcattatctgcagaactttgtccagtcaacattcaatgcccttcctgcagaccaagtaaaaggtgcaaccattgttgtctctggtgatggccgctatttctcaaaagatgctgttcagatcataacaaaaatggctgctgccaatggagtaagacgtgtttgggttggacaaaacagtctcatgtctactcctgctgtatctgctgtcatccgtgaaagaattggtgcagatggatcaaaggctactggtgccttcatcttgacagcgagccataacccaggtggtcctacggaggactttggtatcaaatacaatatgggaaatggtggacctgcccctgaatccgttaccgacaagattttctctaatacaacgacaatctctgaatacctcatctctgaagaccttccagatgttgatatttctgttgtcggtgtcaccagcttcagtggacccgaaggcccctttgatgtggatgtctttgactctagtgtaaattacataaagttaatgaagacaatttttgacttcgaagcaataaaaaagctactgacctccccaaagtttacattctgttatgatgcgctccatggtgttgctggagcttatgccaaacacatctttgtggaagagcttggtgctgatgaaagctcactgttgaattgtgtcccaaaagaggactttggaggtggtcatccggatcctaacctcacctatgcaaaagagttggttgaacggatgggtcttggaaagtcatcctcaaatgttgaacctcctgaatttggtgctgcagctgatggagatgctgaccgcaacatgattctgggtaaaagattctttgtgacaccatcggactctgttgccattatagcggccaatgctgttcaatcaattccttactttgcttctggcctgaagggagttgccaggagcatgccaacatcagctgcccttgatgttgttgcaaagaatttgaatctcaagttctttgaggtgcctactgggtggaaattttttgggaatttgatggatgctggaatgtgctcaatctgtggtgaagaaagctttggcactgggtctgaccacattcgtgagaaagatggcatctgggctgtgcttgcatggctttctattattgctttcaagaataaggacaaccttggaggagataagcttgtcactgttgaagatattgtccgtcagcattgggccacatatggtcgccattattacacacgctatgactatgagaatgtcgatgctggggctgctaaggagctgatggcaaacctagtaagcatgcagtcatcactttctgatgttaacaagttgatcaaggagatccggtctgatgtttctgaagtagttgcagctgacgagtttgagtacaaggatccagttgatggctctgtgtccaagcaccagggcatccgatacctcttcggagatggttcacgactggtgttccgtctatccggaaccggttctgttggtgccaccatccgtgtctacatcgagcaatacgagaaggattcctccaagaccggcagggattcacaggaggcccttgctccactggttgatgttgcgctcaagctctccaagatgcaagagtacactggccgctctgcccccaccgttatcacataaatttttgaagagtgatttacaatgagttgaggcgcttacacaaattttcattcaagcctcttgttctatagttctacttcctgttgcatctcaccaatgaataaaatggaacctgggttatgattcgtcgattactgattaaccgttccctgtgtggttacgggctacggcaggggattgtgactgcttgagggttcggttagcttgtgtgctttgtaagggtgagtgtgtgtttgtgtttagagtgtgtgtttgtgttgtgtgtgttctgtttgtcctgggccataggtcctttttctctctactttaatttaatgatatgtagccctcctttgtattcggaaaaaaaaaatccacatggattgagtgagattgtgtg

SEQ ID NO: 200540 - DNA, 306 bp, Zea Mays
gatcgttgtcttagttttcttcatatatgccgcgagaagcagcggaaggaggcctcgcgcctgcagactgtgaaccggaagctgactgcgatgaacaagctgttgatggaggagaatgacaggctgcagaagcaggtctcccgactcgtctacgagaatggatacatgcgacagcagcttcacaatccttctgctgcgactacagacacgagctgtgagtctgtggtcacaagtggtcagcaccaccaacagcaaaacccagcagctccgcgtcctcaacgggatgcaaataacccagctgggtaa

SEQ ID NO: 200541 - DNA, 925 bp, Zea Mays
ccgctgcgtcgcgcctccccctgccgccgcctggctcccgcccgcggggtgggatcccgccggaacgttagggccactgccgccgatcgttttggagaagccgtccatgacgctgagcacggaggtattctagatgggagagatctcgatgggagacggtggcgttcgccggtcgatgcgtgggttaaccgcgctcgggatcgagggtgccgagaaacgaacaaagggagcagcaatggcggcggcctggtgttaagaggtgacctttttctttcttgcaaccgaagccgaagaggagagcgccacctatgggttgagatccaagccggctgggctgggtctcgtgggctagtatatgaaaaccaacggctaggatggattaagaagcgagacaacatcaggtcaaccgtccgatcccctcagagctaggagtggggaccaggggagctgggagtttgcggcttcagctgctgctgcgagcctgcgacctccgaggcggagctcaatggagttatccactcccgtcgggagctcccttgctagaactgcgaccatggccctcgttagccccagcttcaagataaccaatcaaatgtgtgccaggggtatgccacttgaatgccaatttcctcataggctaccatctgtagcttgttcaatgttgttaaacacacaaccttcacaacgaaccaaccataaagattgtggtttgcttcaggtgcaatgtacagaaaaccttatgcagtcgccagtatctttcagtgacttctctgtttcagtgtgtgctcaagaggatggtctgataaagctacaggtaaatgtatctggcacaatgacagattctatctttgagaaagttttcacaaagaatgttgccgccgctcaaccccttcccggctttcgacgaatgaaaggagggaaaact

SEQ ID NO: 200542 - DNA, 814 bp, Zea Mays
ggtggttaagcacgactccttggcgtacgccgatcggtcccacccctgctccggctgcgcagcaagacccaagcaagggagagaatcctcctaccgtggatggtaccgatctgggtgacatcgactcgggctgggttatcctcaagaactcggatgtcgtttccgcggatttggcagccgccgccgtctgtggcggtcagcgtctaggctcttctacgattcctagctgggcacggtgggttctcggaggtgtggtttacacgctcgtgccgttctacaacagagttaggcatctcgaagacgagacggtgggattcgtggagaatgctgtggaggttgtggagcatttagctgaagtaacagagaagctagctgcgaatgtggctaagcaacttcctgaagatgggtctctgcagaaagcagtggaagaggttgaacacattgctgaggtagtggatgatgatgcggagaaggttgaagcagtcactgaaaagatcgacaaggtcagtgatgagattgatgctgctgtggagccggtcatcgcggagcttgaaaaggaactcgatcagagcacaacctcagacgatggagttgacacaaagaattgatcaactgcatgttaggtgtgctcttcattgtacatagcgtgtgtactgttgtttttcttctctctctcctctttggagaaactgcttgtacatatgtatgtatggaccatgaagattattggtactgtatcaagtcactatccataaataaatacacgttggcctgtgaaaaaaaatatactagctcgcagagctgtgaattattg

SEQ ID NO: 200543 - DNA, 622 bp, Zea Mays
ggcgtacggtacggacgaggccccctccccattctatctcattcccaattcctcatctgcttcgcttccccccaaatcgaatcctcatcgctccgtctatggcgactctaaccatgcagccgatcggtcccacccctgctccggctgcgcagcaagacccaagcaagggagagaatcctcctaccgtggatggtaccgatctgggtgacatcgactcgggctgggttatcctcaagaactcggatgtcgtttccgcggatttggcagccgccgccgtctgtggcggtcagcgtctaggctcttctacgattcctagctgggcacggtgggttctcggaggtgtggtttacacgctcgtgccgttctacaacagagttaggcatctcgaagacgagacggtgggattcgtggagaatgctgtggaggttgtggagcatttagctgaagtaacagagaagctagctgcgaatgtggctaagcaacttcctgaagatgggtctctgcagaaagcagtggaagaggttgaacacattgctgaggtagtggatgatgatgcggagaaggttgaagcagtcactgaaaaggtagtgttctgcacagaaatgttgtacaacacttgaaa

SEQ ID NO: 200544 - DNA, 1084 bp, Zea Mays
tatcgcagttctcctgcgtacttgaggaaaaaggaacttgtcaggataaattgtccacaaatggttcctgcttctgcagtttccactaattagcagtaggtagtttattctataattgcattgaagcttgaacattgattttggttgggcatgcagtaagtagcttacaagaacatggcttagttgggatactgaaatgcttcatcaatagctctaaacctgccacaaattacttgacattcttctctacaggcatttccgaagaaagatactgctgtagttccgcttgttatatttgatgatgcaactggtgatcctttatctactcttgatcagttttgataattcgtttttggatctggaacacactagaggcgccggaaggaagttgaacttagactaatagaggaggacacagctaaaagagttgagcaagctattaggaagaaggttgaggagagtctgaattgtgatgaaattaagcgtgaaatacaacgtcggattgaggaaggacgaaaaaggatacatgaggaggtagcaatccagatggaacgagaaaaaaaggagcggaatgagctagagaaaaagcttgaagaagaacgaaagaaggctgaagaggcgttgaggaaagaggcgatggaacagcagcagaaagagctagagcggtatcaggagctggagaggcttcagaaggaaagagaggaggccatgaagcggaaaaaaatggaggaagagcagcagaggcaaaaccagatgaaactgctgggcaagaacaagtcgcggccgaagctgtcatttgcttttgggatgaagtagcgttcgagtcaccgaacgaaattagtgttttagtttcctgtaaccctgtatttcctgaaaccaccattgtctaactttggcagacaaattgggacgtcttaaatcctcctgatctgctttgtaagttgccgtctctcggtgatgtggttttctctgctcctttgctgttcactgttgagttgacgttgcgagaagactgccaaagaagaatccggttggtccatagggatggatagtcgaatgccaacacgtttttactcgatactgg

SEQ ID NO: 200545 - DNA, 1304 bp, Zea Mays
tttgtctatttgtgaaacacctaggcttgcctcgcctaagctttaggctgaaggtcactgcctagcacctaatgtaacattgttatttagttagcgctcttttttgtcggttcacttggtgtttgtggactgtaaggatggtatcatattaactaggcagtagaatgatagatggaggatatctgagttagtttgacctctgcgctgtaatgttatttttagaaggtaaggaaaccaacagggctaatttcaattatataacatggtgtcattgaaattcaatttattgtgctctaaatttgtaataaagtgattttagtttgtttcttatcgcagttctcctgcgtacttgaggaaaaaggaacttgtcaggataaattgtccacaaatggttcctgcttctgcagtttccactaattagcagtaggcatttccgaagaaagatactgctgtagttccgcttgttatatttgatgatgcaactggtgatcctttatctactcttgatcagttttgataattcgtttttggatctggaacacactagaggcgccggaaggaagttgaacttagactaatagaggaggacacagctaaaagagttgagcaagctattaggaagaaggttgaggagagtctgaattgtgatgaaattaagcgtgaaatacaacgtcggattgaggaaggacgaaaaaggatacatgaggaggtagcaatccagatggagaaagaaaaggagtcagccttaaatgaagccaagctgaaagtggaacgagaaaaaaaggagcggaatgagctagagaaaaagcttgaagaagaacgaaagaaggctgaagaggcgttgaggaaagaggcgatggaacagcagcagaaagagctagagcggtatcaggagctggagaggcttcagaaggaaagagaggaggccatgaagcggaaaaaaatggaggaagagcagcagaggcaaaaccagatgaaactgctgggcaagaacaagtcgcggccgaagctgtcatttgcttttgggatgaagtagcgttcgagtcaccgaacgaaattagtgttttagtttcctgtaaccctgtatttcctgaaaccaccattgtctaactttggcagacaaattgggacgtcttaaatcctcctgatctgctttgtaagttgccgtctctcggtgatgtggttttctctgctcctttgctgttcactgttgagttgacgttgcgagaagactgccaaagaagaatccggttggtccatagggatggatagtcgaatgccaacacgtttttactcgatactgg

SEQ ID NO: 200546 - DNA, 1032 bp, Zea Mays
caaagattttactctgtgctgtattgctgtggaatgctctacccctgtaacagtgtctaagaaggaggagccctttcccatccccgagaaggcgtgagagctgttctccatctcctaggaggcgcaatagtccacctccatcacggaagcgttacagaagaaagagcagtccgagtgtcattagctctccagttactgcatctcaaagttcccaccttgggttggaagagaataagaatgctattgatacgcaaaggctacaagaagaaaagaaaaggcgccggaaggaagttgaacttagactaatagaggaggacacagctaaaagagttgagcaagctattaggaagaaggttgaggagagtctgaattgtgatgaaattaagcgtgaaatacaacgtcggattgaggaaggacgaaaaaggatacatgaggaggtagcaatccagatggagaaagaaaaggagtcagccttaaatgaagccaagctgaaagtggaacgagaaaaaaaggagcggaatgagctagagaaaaagcttgaagaagaacgaaagaaggctgaagaggcgttgaggaaagaggcgatggaacagcagcagaaagagctagagcggtatcaggagctggagaggcttcagaaggaaagagaggaggccatgaagcggaaaaaaatggaggaagagcagcagaggcaaaaccagatgaaactgctgggcaagaacaagtcgcggccgaagctgtcatttgcttttgggatgaagtagcgttcgagtcaccgaacgaaattagtgttttagtttcctgtaaccctgtatttcctgaaaccaccattgtctaactttggcagacaaattgggacgtcttaaatcctcctgatctgctttgtaagttgccgtctctcggtgatgtggttttctctgctcctttgctgttcactgttgagttgacgttgcgagaagactgccaaagaagaatccggttggtccatagggatggatagtcgaatgccaacacgtttttactcgatactgg

SEQ ID NO: 200547 - DNA, 3588 bp, Zea Mays
aggtaggcgtcgatgagtagtactcagacgccgccggcctcacgctgctgctccaggtcagcgccgtcccgaggctgcagatcaggaggtgcggtgcgtggatcagcgtcgaccccatccccgcgtgtttcgtaatagcaaaaatctccgtccatcagggaggtcggtcttgcagttggagttgggcacattcgcctctatcgggcgggcacattccctccgtcccgtgacttccaccttccttacccttcgtatggtgggggcccacctcgccgcccccaccccccgctgcccttctctcttccccgtctccgactccacacacctcccctttccactcgccgccggcgatcccgaaccgggagcagcgcacatggcaggccgggacgagaggtggggggcgcggggcggcccgggggacacgcacgcgtcgacgagccgcgcacccgcgggcaccgccggggagtcggagggcgcgtcgccggactcgctgcggaacacgccctccaacatcgcgcggctggaggacgcgatcgggcactgcgcggcgcggcgcaaataccttgcgcacaccaagagcccctccgacggcaaggacgtccgctggtacttctgcaatctccccctcgccgacaaagtgctctcttcgtccgtaccgcggacagagatagtggggaaaggagactatttccggttcagcgagagggactctctggcactggaggcgtctttcttggagagggaggaagtgctgcttgcatactggtggcgtgagtatgctgaatgcagtgcaggaccgagaggatccttggttgaaagtgatgattctgcatatctttataaggtggaggaagaacgggttggggttcctgtgaaaggtggactatatgaggttgatttgatgaggcggcattgcttccctgtgtactggaacggtgaaaacaggcgtgtcttgagaggccactggttcgctcgcaaaggtggtgttgattggattcccttgcgagaggatgtttctgaacaacttgagttagcatataattgtcaggtctggcatcgtcgaaaatttcaaccttcaggcctatttgcagcaagggttgacctccaaggaagtacactggatttgcatgctctttttactggagaggatgatacttgggaagcttggcttgtctttgatacgggtcctaagcttggtagtaacacaatcaaattaaggcgcggattttctccttctgaatctgcaagtacaaagccttcacaggatgagttgcgtcagacaaaagaagaggaaatggatgattactgctctcaggttccagttggtcatctggtattcatggttcatggcattggacagaggctggagaaagctaatcttgttgatgatgttgttgatttccgccgagtaactgctaacctagctgaaagatacttaacttcttatcaaagaagtacccagagggttctatttattccctgtcagtggaggaagggcttgaaactcagtggtgaaagtacggttgagaaactcactttggatggagttaaaggtcttcgagtcgcattaggtgccacagttcatgatgtcctatattatatgagtcctatctactgtcagcatattattgactcggtctctaaccagttgaacaagctgtacatgaaatttctgaagagaaatcctggttacagtggaaaggtttcattgtatggccactcattaggaagtgttctgtcgtatgatatactttgtcatcaagaatcccttttggccccatttccaacagagtatctgaacatggaaacatctgatcgaagtcaaggagcaaagtcagccaatgaagttgctctgcatgattcaggtgcaaaggatcatgatacttatactctagggcattcttgtactggtaatgaaaacagtgccgttgatgaaggtagcaccagaactgacatgtcacatatggacagcattgtcccatcatgtgtgctcgaggattcattaaataacccagaaactggtgtgccacgtggggcagttgttgctgagcaaaatgaaaaagaaaataggattgagaatcatcagacggtgtatactgaggaaggaacaacttcaggtgtaagcacaaaagatgctgaagcatcacacatttcaagatctgctgaggatgtccatgaagaggtccttgacaaagaaaaaatgatcatttcactagaagaagaggtgaaacgtcttaaagctaaactagatcagcttgaacagcataagcatctagtgactgagagcaccagtggtgttgagtatcatggaggcaaaaatggcaatcatgccttgaactttggcgaacttttcactgcacaaggaagtataaaccagccctactcaccacaaatcaaatacacaaaactaaactttaaggttgacacattctttgctgttggatctcccctgggtgtcttcctttccctgcgtaatgtccgtattggtattggcaaagggcgagattattggaaagataagaacataattgaagagatgccatgctgccggcagatgttcaatatttttcatccttttgatcctgtagcatacagagttgaaccacttgtatgtgaagattatcaaaagaagcgtcctgtaattgttccctaccatagaggcggaaagaggatacatgttggagtgcaggagttcacagaagatatttctgcacgttctcaagccattgcctgtcaattgaagtcactgaaggtcaaagcagtagctgctttgctagcattgagcagaaatgacacagaagaggatggtgagagtgctaatgaggaaggaagatcgtatggttccattatgatggaaaggttgaccggctcaccagatggtcgaattgatcatgtgcttcagcattcatacctatctgctctgggagctcataccaactattggcgagatcatgacactgctctcttcattctcaaacatttgtatcgtgatatacctgaggatcctccaagcgatgtcgttgaaaggatgcatattaaactgttttatgagagagatccggttgaggaagaaacgcccgtgacattttcggaccatgcagcaattaaggagttctgcagaaaggtgagagcctactcaacaaaaatggaggatgatgccaactgctaagcctcttgatggtgtcatttcctgatggaaaccatgttacatccccacgttcctcgccaagaaggaagatgcaggcatgggaagggagaacgattccacaaaatcgtgatcccaggataagaatcctaagaaatgtagttccacgcttgacaccagaatcaggacacttgagaaacgttgtacagagtcggttccccatgttgcttcacttgttcccgtcgtcaatgcagtgctgtacagagaacgtcctgctgtacctttctgtatatgtaatcttgcgtgctgtgcatacagaatatgatggatttagtttcaaacgacagcttacagcgacaccaggctgaaacgaagggactcgtgagagaaaatccataataatttagagacattaataacacagaacacctagctttcaaatg

SEQ ID NO: 200548 - DNA, 3448 bp, Zea Mays
aggtaggcgtcgatgagtagtactcagacgccgccggcctcacgctgctgctccaggtcagcgccgtcccgaggctgcagatcaggaggtgcggtgcgtggatcagcgtcgaccccatccccgcgtgtttcgtaatagcaaaaatctccgtccatcagggaggtcggtcttgcagttggagttgggcacattcgcctctatcgggcgggcacattccctccgtcccgtgacttccaccttccttacccttcgtatggtgggggcccacctcgccgcccccaccccccgctgcccttctctcttccccgtctccgactccacacacctcccctttccactcgccgccggcgatcccgaaccgggagcagcgcacatggcaggccgggacgagaggtggggggcgcggggcggcccgggggacacgcacgcgtcgacgagccgcgcacccgcgggcaccgccggggagtcggagggcgcgtcgccggactcgctgcggaacacgccctccaacatcgcgcggctggaggacgcgatcgggcactgcgcggcgcggcgcaaataccttgcgcacaccaagagcccctccgacggcaaggacgtccgctggtacttctgcaatctccccctcgccgacaaagtgctctcttcgtccgtaccgcggacagagatagtggggaaaggagactatttccggttcagcgagagggactctctggcactggaggcgtctttcttggagagggaggaagtgctgcttgcatactggtggcgtgagtatgctgaatgcagtgcaggaccgagaggatccttggttgaaagtgatgattctgcatatctttataaggtggaggaagaacgggttggggttcctgtgaaaggtggactatatgaggttgatttgatgaggcggcattgcttccctgtgtactggaacggtgaaaacaggcgtgtcttgagaggccactggttcgctcgcaaaggtggtgttgattggattcccttgcgagaggatgtttctgaacaacttgagttagcatataattgtcaggtctggcatcgtcgaaaatttcaaccttcaggcctatttgcagcaagggttgacctccaaggaagtacactggatttgcatgctctttttactggagaggatgatacttgggaagcttggcttgtctttgatacgggtcctaagcttggtagtaacacaatcaaattaaggcgcggattttctccttctgaatctgcaagtacaaagccttcacaggatgagttgcgtcagacaaaagaagaggaaatggatgattactgctctcaggttccagttggtcatctggtattcatggttcatggcattggacagaggctggagaaagctaatcttgttgatgatgttgttgatttccgccgagtaactgctaacctagctgaaagatacttaacttcttatcaaagaagtacccagagggttctatttattccctgtcagtggaggaagggcttgaaactcagtggtgaaagtacggttgagaaactcactttggatggagttaaaggtcttcgagtcgcattaggtgccacagttcatgatgtcctatattatatgagtcctatctactgtcagcatattattgactcggtctctaaccagttgaacaagctgtacatgaaatttctgaagagaaatcctggttacagtggaaaggtttcattgtatggccactcattaggaagtgttctgtcgtatgatatactttgtcatcaagaatcccttttggccccatttccaacagagtatctgaacatggaaacatctgatcgaagtcaaggagcaaagtcagccaatgaagttgctctgcatgattcagcattgtcccatcatgtgtgctcgaggattcattaaataacccagaaactggtgtgccacgtggggcagttgttgctgagcaaaatgaaaaagaaaataggattgagaatcatcagacggtgtatactgaggaaggaacaacttcaggtgtaagcacaaaagatgctgaagcatcacacatttcaagatctgctgaggatgtccatgaagaggtccttgacaaagaaaaaatgatcatttcactagaagaagaggtgaaacgtcttaaagctaaactagatcagcttgaacagcataagcatctagtgactgagagcaccagtggtgttgagtatcatggaggcaaaaatggcaatcatgccttgaactttggcgaacttttcactgcacaaggaagtataaaccagccctactcaccacaaatcaaatacacaaaactaaactttaaggttgacacattctttgctgttggatctcccctgggtgtcttcctttccctgcgtaatgtccgtattggtattggcaaagggcgagattattggaaagataagaacataattgaagagatgccatgctgccggcagatgttcaatatttttcatccttttgatcctgtagcatacagagttgaaccacttgtatgtgaagattatcaaaagaagcgtcctgtaattgttccctaccatagaggcggaaagaggatacatgttggagtgcaggagttcacagaagatatttctgcacgttctcaagccattgcctgtcaattgaagtcactgaagaggatggtgagagtgctaatgaggaaggaagatcgtatggttccattatgatggaaaggttgaccggctcaccagatggtcgaattgatcatgtgcttcaggagaaaacatttcagcattcatacctatctgctctgggagctcataccaactattggcgagatcatgacactgctctcttcattctcaaacatttgtatcgtgatatacctgaggatcctccaagcgatgtcgttgaaaggatgcatattaaactgttttatgagagagatccggttgaggaagaaacgcccgtgacattttcggaccatgcagcaattaaggagttctgcagaaaggtgagagcctactcaacaaaaatggaggatgatgccaactgctaagcctcttgatggtgtcatttcctgatggaaaccatgttacatccccacgttcctcgccaagaaggaagatgcaggcatgggaagggagaacgattccacaaaatcgtgatcccaggataagaatcctaagaaatgtagttccacgcttgacaccagaatcaggacacttgagaaacgttgtacagagtcggttccccatgttgcttcacttgttcccgtcgtcaatgcagtgctgtacagagaacgtcctgctgtacctttctgtatatgtaatcttgcgtgctgtgcatacagaatatgatggatttagtttcaaacgacagcttacagcgacaccaggctgaaacgaagggactcgtgagagaaaatccataataatttagagacattaataacacagaacacctagctttcaaatg

SEQ ID NO: 200549 - DNA, 3529 bp, Zea Mays
aggtaggcgtcgatgagtagtactcagacgccgccggcctcacgctgctgctccaggtcagcgccgtcccgaggctgcagatcaggaggtgcggtgcgtggatcagcgtcgaccccatccccgcgtgtttcgtaatagcaaaaatctccgtccatcagggaggtcggtcttgcagttggagttgggcacattcgcctctatcgggcgggcacattccctccgtcccgtgacttccaccttccttacccttcgtatggtgggggcccacctcgccgcccccaccccccgctgcccttctctcttccccgtctccgactccacacacctcccctttccactcgccgccggcgatcccgaaccgggagcagcgcacatggcaggccgggacgagaggtggggggcgcggggcggcccgggggacacgcacgcgtcgacgagccgcgcacccgcgggcaccgccggggagtcggagggcgcgtcgccggactcgctgcggaacacgccctccaacatcgcgcggctggaggacgcgatcgggcactgcgcggcgcggcgcaaataccttgcgcacaccaagagcccctccgacggcaaggacgtccgctggtacttctgcaatctccccctcgccgacaaagtgctctcttcgtccgtaccgcggacagagatagtggggaaaggagactatttccggttcagcgagagggactctctggcactggaggcgtctttcttggagagggaggaagtgctgcttgcatactggtggcgtgagtatgctgaatgcagtgcaggaccgagaggatccttggttgaaagtgatgattctgcatatctttataaggtggaggaagaacgggttggggttcctgtgaaaggtggactatatgaggttgatttgatgaggcggcattgcttccctgtgtactggaacggtgaaaacaggcgtgtcttgagaggccactggttcgctcgcaaaggtggtgttgattggattcccttgcgagaggatgtttctgaacaacttgagttagcatataattgtcaggtctggcatcgtcgaaaatttcaaccttcaggcctatttgcagcaagggttgacctccaaggaagtacactggatttgcatgctctttttactggagaggatgatacttgggaagcttggcttgtctttgatacgggtcctaagcttggtagtaacacaatcaaattaaggcgcggattttctccttctgaatctgcaagtacaaagccttcacaggatgagttgcgtcagacaaaagaagaggaaatggatgattactgctctcaggttccagttggtcatctggtattcatggttcatggcattggacagaggctggagaaagctaatcttgttgatgatgttgttgatttccgccgagtaactgctaacctagctgaaagatacttaacttcttatcaaagaagtacccagagggttctatttattccctgtcagtggaggaagggcttgaaactcagtggtgaaagtacggttgagaaactcactttggatggagttaaaggtcttcgagtcgcattaggtgccacagttcatgatgtcctatattatatgagtcctatctactgtcagcatattattgactcggtctctaaccagttgaacaagctgtacatgaaatttctgaagagaaatcctggttacagtggaaaggtttcattgtatggccactcattaggaagtgttctgtcgtatgatatactttgtcatcaagaatcccttttggccccatttccaacagagtatctgaacatggaaacatctgatcgaagtcaaggagcaaagtcagccaatgaagttgctctgcatgattcaggtagcaccagaactgacatgtcacatatggacagcattgtcccatcatgtgtgctcgaggattcattaaataacccagaaactggtgtgccacgtggggcagttgttgctgagcaaaatgaaaaagaaaataggattgagaatcatcagacggtgtatactgaggaaggaacaacttcaggtgtaagcacaaaagatgctgaagcatcacacatttcaagatctgctgaggatgtccatgaagaggtccttgacaaagaaaaaatgatcatttcactagaagaagaggtgaaacgtcttaaagctaaactagatcagcttgaacagcataagcatctagtgactgagagcaccagtggtgttgagtatcatggaggcaaaaatggcaatcatgccttgaactttggcgaacttttcactgcacaaggaagtataaaccagccctactcaccacaaatcaaatacacaaaactaaactttaaggttgacacattctttgctgttggatctcccctgggtgtcttcctttccctgcgtaatgtccgtattggtattggcaaagggcgagattattggaaagataagaacataattgaagagatgccatgctgccggcagatgttcaatatttttcatccttttgatcctgtagcatacagagttgaaccacttgtatgtgaagattatcaaaagaagcgtcctgtaattgttccctaccatagaggcggaaagaggatacatgttggagtgcaggagttcacagaagatatttctgcacgttctcaagccattgcctgtcaattgaagtcactgaaggtcaaagcagtagctgctttgctagcattgagcagaaatgacacagaaggatggtgagagtgctaatgaggaaggaagatcgtatggttccattatgatggaaaggttgaccggctcaccagatggtcgaattgatcatgtgcttcaggagaaaacatttcagcattcatacctatctgctctgggagctcataccaactattggcgagatcatgacactgctctcttcattctcaaacatttgtatcgtgatatacctgaggatcctccaagcgatgtcgttgaaaggatgcatattaaactgttttatgagagagatccggttgaggaagaaacgcccgtgacattttcggaccatgcagcaattaaggagttctgcagaaaggtgagagcctactcaacaaaaatggaggatgatgccaactgctaagcctcttgatggtgtcatttcctgatggaaaccatgttacatccccacgttcctcgccaagaaggaagatgcaggcatgggaagggagaacgattccacaaaatcgtgatcccaggataagaatcctaagaaatgtagttccacgcttgacaccagaatcaggacacttgagaaacgttgtacagagtcggttccccatgttgcttcacttgttcccgtcgtcaatgcagtgctgtacagagaacgtcctgctgtacctttctgtatatgtaatcttgcgtgctgtgcatacagaatatgatggatttagtttcaaacgacagcttacagcgacaccaggctgaaacgaagggactcgtgagagaaaatccataataatttagagacattaataacacagaacacctagctttcaaatg

SEQ ID NO: 200550 - DNA, 1503 bp, Zea Mays
attttttcttaggtgaaaacgtatttagcgctgcatgtattgagggcaagggctgaaaggctcgcgtatgccttccccctcctccacctttttcccccgttcgagtgctcgagctccgaccaaatctcgcagcggtagcaatccccgagcggccgagcccgaagcgggatcagtggaggacgagtggacgacaccctcgattctgacctgcggtcggcgcgacttacagagaaccggagatgcagcagggcgacagcacggaggcgcaggtgacgtgggaggaccagcagaacatcaaccgcttcggtcgcctcaacaaccgcctccacgagctccaggacgagatcaaactcgcgaagttacaatgggagcactgcaaacgatcagattggagaagagtcgaaggtagaagccgatgagctgaaatcccctcgcagtcgtagcgtcgtgaaggtgcgaatgttgtggctggaatagagacatgtgtgcactccatgtagatgatagcccccggatgccgaggtagccgaagtcgaggtggtcgaagttcgagcatcaacggtcggtggggtgacacaaaaatggacaacaacagactcgtggaccttcttgattctttccgtgtccggtcatcgaggagcctcgccaaggaagccggcgcagcgcatgcgtctgcgctggtcaaggtggctgcgctcgctagaggggccgcgccggcctccggccagtggaggcggcggcggatccggtcgggaaggccacgacagcgacagatctagccataaagactcgcttcgacagcaattcgttagcctaaaacaagggagtggtactgttcaggactacatatgaaacgcgacaacttgatgaggaaacgaacgagaaccttgacgatgctgggaacgaactcatcctgtcggacgaagatgtcgtgcgcttccagatcggggaggtgtttgctcacatgccgagggacgacgtcgagactaggctggagcagatgaaagaggatgcggctaagaagctggagaggctagaggaggagaaggaatccgtcctcgcccagatggccgagctgaagaagatactgtacgggaagttcaaggacgccatcaacctggaggaagattaagagtagtactggagttgtgacgacgtggccctctctttctagttcaggtcctgtttttgttcccctgctccccccacagaagcgcttggcccgctcgtgtaatggaagcttgagtctctcagtctttcagaagctcttttcaccaagaacccagaatagttttcattctgcgggtttatacggattgaagctaatggcgctgggcccatgaatcctttttcagtttgattgtacttggtgtatgtgggtacatcgcttgccctatttcctagtacttactagcaagcctgtgactgtgagtaccggaaaacagtggagataacgggcatgtaggtcttgttttctgcctaatatgttgggaatcatttgca

SEQ ID NO: 200551 - DNA, 1668 bp, Zea Mays
accctcctgctcctcctcccgcggtcccgccatttcgtcccccgctcaccaactcaaaccccctccgctctcaaaccctaaccctagccctagcccgctcccggcggaccgacgatgccgaaggcaggcggcggggcggcggacgaagaggagttccgcgccgaggtggaggagcgcctcatcaacgaggagtacaagatctggaagaagaacacacccttcctctacgacctcgtcatcacccacgcgctcgaatggccctcccttaccgtgcagtggctccccgaccgcaccgagccgccggggaaggaccactccgtccagaagatgatccttggcacgcacacctctgacaacgagcccaactacctcatgctcgcgcaggtccagctgcccctcgacgacgccgaggccgacgcccgccactacgacgatgaccacgccgacatcggtgcaaattgttcagcagataaatcatgatggagaggtcaatcgagctcgctatatgccccaaaattcatttataattgctattaagacagttagcgcagaagtatatgtttttgactatagcaagcacccatctaagcctccactagatggtgcatgcaaccggtggtttacggctgaagggacataattctgaaggatatggcttatcatggagtatttttaaagagggacatttgttaagtgggtctgacgatgctcaaatttgcttgtgggacattaaagcaaatagtagaaacaaaagtcttgacgccttgcagatttttaagcatcatgatggtgtcgttgaagatgttgcttggcacttgaggcatgagtacttatttgggtcagttggtgacgattatcatcttttgatttgggacctgcggtctcccgcccctactaaacctgttcagtcagtggtggcgcaccagggtgaggtgaactgcctggcttttaacccgttcaatgaatgggttgttgcaactggttctactgacaagactgtcaaattatttgatcttaggaagattgatacttctctgcacacctttgactgtcacaaagaggaagtttttcaagttggatggagtccaaagaatgaaactgtacttgcatcctgttgtctgggcagaaggctcatggtctgggatctaagcaggatcgaccaagaacaaacaccagaggatgctgaagatggtcctccagagctcatgttcatccatggaggccataccagcaagatctctgatttctcctggaacccctgcgaggactgggtggttgctagcgtcgctgaggacaacatcctccagatatggcagatggctgagaacatctaccatgacgaagatgatctgccaattagcgatgagccggcaaaaacttcttgaagcaacacatcacaaaaggaatcttaactcctatcgactgttggtgctcctagatcggaaccctgctcgccggagaatcttaaccgagtgagagttggctgtaggttgcttccgtggtcgtaactttatgcttgacgggttggtcgtttcttcgaccgtctgtatgtgtattcgtcgaacctttagcattatacatatgctgattgactagatctgttcgtcgcagttgtgttttgtagtattgctttatatctagcaggatcatgctcgtgatgtgatttgt

SEQ ID NO: 200552 - DNA, 1569 bp, Zea Mays
accctcctgctcctcctcccgcggtcccgccatttcgtcccccgctcaccaactcaaaccccctccgctctcaaaccctaaccctagccctagcccgctcccggcggaccgacgatgccgaaggcaggcggcggggcggcggacgaagaggagttccgcgccgaggtggaggagcgcctcatcaacgaggagtacaagatctggaagaagaacacacccttcctctacgacctcgtcatcacccacgcgctcgaatggccctcccttaccgtgcagtggctccccgaccgcaccgagccgccggggaaggaccactccgtccagaagatgatccttggcacgcacacctctgacaacgagcccaactacctcatgctcgcgcaggtccagctgcccctcgacgacgccgaggccgacgcccgccactacgacgatgaccacgccgacatcggtgggtttggcgccgcctccggcaaggtgcaaattgttcagcagataaatcatgatggagaggtcaatcgagctcgctatatgccccaaaattcatttataattgctattaagacagttagcgcagaagtatatgtttttgactatagcaagcacccatctaagcctccactagatggtgcatgcaaccggtggtttacggctgaagggacataattctgaaggatatggcttatcatggagtatttttaaagagggacatttgttaagtgggtctgacgatgctcaaatttgcttgtgggacattaaagcaaatagtagaaacaaaagtcttgacgccttgcagatttttaagcatcatgatggtgtcgttgaagatgttgcttggcacttgaggcatgagtacttatttgggtcagttggtgacgattatcatcttttgatttgggacctgcggtctcccgcccctactaaacctgttcagtcagtggtggcgcaccagggtgagagaggaagtttttcaagttggatggagtccaaagaatgaaactgtacttgcatcctgttgtctgggcagaaggctcatggtctgggatctaagcaggatcgaccaagaacaaacaccagaggatgctgaagatggtcctccagagctcatgttcatccatggaggccataccagcaagatctctgatttctcctggaacccctgcgaggactgggtggttgctagcgtcgctgaggacaacatcctccagatatggcagatggctgagaacatctaccatgacgaagatgatctgccaattagcgatgagccggcaaaaacttcttgaagcaacacatcacaaaaggaatcttaactcctatcgactgttggtgctcctagatcggaaccctgctcgccggagaatcttaaccgagtgagagttggctgtaggttgcttccgtggtcgtaactttatgcttgacgggttggtcgtttcttcgaccgtctgtatgtgtattcgtcgaacctttagcattatacatatgctgattgactagatctgttcgtcgcagttgtgttttgtagtattgctttatatctagcaggatcatgctcgtgatgtgatttgt

SEQ ID NO: 200553 - DNA, 2745 bp, Zea Mays
agttatttgagtataatgtctctgcaggtagcaaatattaatgccaaagaagagacaccagttggtcatggagaagtaatatgctttagcatctattcagcaaattctgatgtacaggcagctgattttggaaatggcaaaacttgcatttgggttgatgttctagatggtggaaggggtgtcctgatggagtttgctcctttctttgaagattcatcgatcaagaaggtttggcataactatagttttgatagccatgtcattgagaattatggaatcaaaattgctgggtttcatgctgatacaatgcatcttgcacgcctttgggattcatcaaggaaaattgatggtggatattcacttgaaggacttacaaatgaccgtagagtcatggatactgttccagaggatttacctaagcctggaaagacatcaatgaaaaccatctttggcaggaaaaatattagaaaagatggatctgaagggaaagttgtatctgttgagccagtcaagaagttacaaagggaagacagagagttatggatttgttattcttctctagattccatgagcacattgagactttatgacagcttaaaaagcaagcttacaacaaggagatggatcttggatggttgtcctaggggcaccatgtatgatttctatgaacagtactggcgtccttttggtgccctacttgtgaaaatggagacagagggaatgcttgttgaccgtggttacctttcagagatagaaaaggctgctattgctgaacggaaacttgctgcagataagtttcggaaatgggcatctaaatattgtcctgatgccaagtacatgaatgtgaatagcgatattcaaattcgccaacttctctttggtggcattgaaaatagacacaaatctggtgaaacttggccacatagtaaaacttttaaagtgctaaatgaagaaagtgttgctacagagggtaagaagacgtcaaagtatcgtacaatcaaactttgcagtattgttgaagatctgaaaatcgatatgttcaccccgagtggctggccaacagtcagcggggatgcattgagaagtttggctggtaaaatacctacagaatatatttacacaatagatgatattcaagatgatgatgaatataccagtggttcagaaaacccagatgggaattcctcttatggaacagcatatgaagcatttggtggaggaaagaatggaaaagaagcatgccatgcaattgcagctttatgtgaaatatgttctattgattctttgatatccaatttcattcttccgttgcagggagatcacatatcatgtgcagaggggcgcattcactgttcattgaatatcaatactgagacagggcgcttgtcagcaagaacaccaaatctacagaaccaacctgcccttgagaaggataggtataggattcgccaagcttttgttgcagccccgggaaattctcttatcgttgcagattatggtcaggcgggtggtgatttccattctaggacagccatgaatatgtatcagcatatccgtgatgctgtccaagaaaagaaagttcttcttgagtggcaccctcaacctggtcaagagaaacctccagtgccgctattgaaggatgcttttggcgctgagaggaggaaagctaaaatgcttaatttttccattgcttatggaaagacagctgttgggctatcccgggactggaaggtttctgttaaagaggcaagagatacactgaagctctggtacagggatagaaaagaagtgttagcttggcaaaaaagtcagaagaagcttgcaagcgagaagggtgaagtctacactttgcttgggcggtcgcgccattttccttacctgactcagtatggtcctggccaacgaggtcatattgagcgtgctgctataaatgcaccagtgcagggaagtgcagcagatgttgctatgtgtgccatgcttgagatcgaaaggaatgtccgccttaaggagcttggttggaggctcttattgcaggtgcatgatgaagtgatactggaagggccttcagagtctgctgaggtggccaaggctatagtggtggagtgtatgtccaaacctttctacggaaccaacatcttgaacgtcgacctggctgtcgacgccaagtgtgcaaagagctggtatgctgccaaatagactgaggagacgctgtcacctgccacaaggttgatgacaccagtgcaatcgagaccccactgttcggataaaaaatggtggacccgtcgtcatgcagactgcggttccaggaccttgagtttgttgtggtggtaacccaggccctgacaagacaacacgcccatttcttggctgcagcagaacagcggaagacacggaggactctgctgccagcacctggagttgcgcggtgccaaagcataccagacagaattcgagatggcttggatctcgagtgaactagcgcggtgccaaagcatgctgttttgttcataatctcacttgttcagcgtgctggtgcgttaggttagtttacagatttgttctggtgcagtgaggccaattatggtccctgcggttggtatcgatcttggattgtgcattgcatgtagtaccatactgcatctacactgggaccatttttcagataacagaaacattcagcttcatcctcgaaagagaatcagaccaacttgttacaaaaaacagtttcaaacgactggatcaagt

SEQ ID NO: 200554 - DNA, 1600 bp, Zea Mays
ctccccgctataaataggcgccggcgcaacggtccgctccttcccctcctcctcttgtgcgcccccccatccctcaactcgcgcgcgcacggccgcatccgcggcacgccgcgccgcatcccgtgcccgcgcaaaaccggatccgccgccgccatggcggtggaccgcgtggacggcgaggaggcgttcgaggaggtggacccgacggggcggttcgggcggtacgcggacgtgctggggctcgggtccgtcaagaaggtgtaccgcgggttcgaccaggaggaggggatcgaggtggcgtggaaccgcgtccggctgcggtcgctggccgaccgcgaccccggcatggtggagcgcctccacgccgaggtgcgcctcctccgctcgctcagccacgaccacatcatcggcttccacaaggtgtggctggaccgcgacgccggcgtcctcaacttcatcaccgaggtctgcacctccgggagcctccgcgagtaccgccaccgacaccgccacgtctccgtcaaggcgctcaagaagtgggcgcgccagatcctcgaggggctcaaccacctccacacccacgacccctgcatcatccaccgcgacctcaactgcagcaacgtcttcatcaatggcaacaacggccaggtcaagatcggcgacctcgggctggcggcgatcgtggacaagacgcacgtggcgcacaccatcctgggcacgccggagttcatggcgccggagctgtacacggagacgtacacggagtcggtggacatctactcgtacggcatgtgcgtgctggagatggtcacgcgggaggtgccctacgccgagtgcggcagcgtcgtgcagatcttccacaacgtcacccggggcgtcccgcccgcggcgctcaagcggctcaaggacgccgagctgcggggcttcatcgagcgctgcatcggccagccccggaaccggccctcggccgctgacctcctgcaggaccccttcttcaacggcgtccgtggcggggacgacgacgacgacgccgcggcgctcgccgacgcctccagcgtcgtcgccgccgcgcccgtgccgcgccccaggagctacgtcgacgacctcgccgggctccggctggactgacctgaccgtccctcccagcgttctgcctttcatcagtaccgggattccggcgcgtgttagacgtgttttattagaagtggattcctggccggcgagcgactgcctgcaaaggttggttggcaaacttataatatttccctgcgctgagctggataccgccatggatgcagtagacgcgagagatgagggcagcgttctggcctgtctctgccgggggccctggggacatggacggcggcaagccgagcgtcgcctacctgtcacctgagcttctcgtcccttgacgcatcaggaacatcatgggcagcccgcagctgtgactgcaagctgcagacaaactgtcaagcaatcttgcacaggcacaggcagaggctggatgtgcaatccagtttatgaagccttgtcggccattgtccttactgttgtcctttgttatgttcattcatgtgacatctgtcacctgtgaaagctg

SEQ ID NO: 200555 - DNA, 679 bp, Zea Mays
ctccccgctataaataggcgccggcgcaacggtccgctccttcccctcctcctcttgtgcgcccccccatccctcaactcgcgcgcgcacggccgcatccgcggcacgccgcgccgcatcccgtgcccgcgcaaaaccggatccgccgccgccatggcggtggaccgcgtggacggcgaggaggcgttcgaggaggtggacccgacggggcggttcgggcggtacgcggacgtgctggggctcgggtccgtcaagaaggtgtaccgcgggttcgaccaggaggaggggatcgaggtggcgtggaaccgcgtccggctgcggtcgctggccgaccgcgaccccggcatggtggagcgcctccacgccgaggtgcgcctcctccgctcgctcagccacgaccacatcatcggcttccacaaggtgtggctggaccgcgacgccggcgtcctcaacttcatcaccgaggtctgcacctccgggagcctccgcgagtaccgccaccgacaccgccacgtctccgtcaaggcgctcaagaagtgggcgcgccagatcctcgaggggctcaaccacctccacacccacgacccctgcatcatccaccgcgacctcaactgcagcaacgtcttcatcaatggcaacaacggccaggtcaactgagaagcttaaagcatcgttaact

SEQ ID NO: 200556 - DNA, 957 bp, Zea Mays
catcgccgtctgctggatcctggcaccatctcccctgagctgcgccagatcgacaggagcataatgttccctgcacttcgagagttcgtcggaggtggaaagcctgtctggggaacctgtgctgggctcatctttcttgcaaacaaagcagtagggcaaaaaacaggggggcaggaacttgttggaggattagattgtacagtccaccgaaacttttttgggagtcagcttcaaagctttgagacagagctttccgtgccaaagctttcggagaaggaaggagggaatgatacatgccgcggtgtatttatacgggcacctgctatattggaagtaggtccagatgttgaaatattggcggattgccctgttcctgttgacagacccagcattacaatatcatttggggagggtactgaggaagaagagtattcaaaagatcgggtaattgttgcagtgcggcaagggaacatcctcgcaactgctttccacccagaattgacatcagactccagatggcatcgtttcttcttggacatggataaagaatccccagcaaaggcgttttctgcgctctccctgtcgtcatcgtcaagagacactgaaggcctgccaaagaataagccgtttgatctgcccatttttgagtaacgctaaagacaagacaaaccaaaagattgaaggaacgaagaaactgaccgtatttattatcgatcatcatttagccggttacaaaaacagccagctgagaatctgtcatactcagccgaaaaaagtgttgtctggtagctaacttgtacggataaaaaataatcacgctgtgtgctgtacgcaattctcatcagataaagcgaaacattgttttcctgggaattatagttttgctgaaggtgaccagttgaacacttgaacatggtaatactttccccctctatgtgcaacttcgttcaagaccaa

SEQ ID NO: 200557 - DNA, 876 bp, Zea Mays
ggacaacatcgccgtctgctggatcctggcaccatctcccctgagctgcgccagatcgacaggagcataatgttccctgcacttcgagagttcgtcggaggtggaaagcctgtctggggaacctgtgctgggctcatctttcttgcaaacaaagcagtagggcaaaaaacaggggggcaggaacttgttggaggattagattgtacagtccaccgaaacttttttgggagtcagcttcaaagctttgagacagagctttccgtgccaaagctttcggagaaggaaggagggaatgatacatgccgcggtgtatttatacgggcacctgctatattggaagaagaagagtattcaaaagatcgggtaattgttgcagtgcggcaagggaacatcctcgcaactgctttccacccagaattgacatcagactccagatggcatcgtttcttcttggacatggataaagaatccccagcaaaggcgttttctgcgctctccctgtcgtcatcgtcaagagacactgaaggcctgccaaagaataagccgtttgatctgcccatttttgagtaacgctaaagacaagacaaaccaaaagattgaaggaacgaagaaactgaccgtatttattatcgatcatcatttagccggttacaaaaacagccagctgagaatctgtcatactcagccgaaaaaagtgttgtctggtagctaacttgtacggataaaaaataatcacgctgtgtgctgtacgcaattctcatcagataaagcgaaacattgttttcctgggaattatagttttgctgaaggtgaccagttgaacacttgaacatggtaatactttccccctctatgtgcaacttcgttcaagaccaa

SEQ ID NO: 200558 - DNA, 1072 bp, Zea Mays
gctaacctccacctttaggagggtactaggatcagatggacaacatcgccgtctgctggatcctggcaccatctcccctgagctgcgccagatcgacaggagcataatgttccctgcacttcgagagttcgtcggaggtggaaagcctgtctggggaacctgtgctgggctcatctttcttgcaaacaaagcagtagtgttgctttcagggcaaaaaacaggggggcaggaacttgttggaggattagattgtacagtccaccgaaacttttttgggagtcagcttcaaagctttgagacagagctttccgtgccaaagctttcggagaaggaaggagggaatgatacatgccgcggtgtatttatacgggcacctgctatattggaagtaggtccagatgttgaaatattggcggattgccctgttcctgttgacagacccagcattacaatatcatttggggagggtactgagttccttttagttctttaatgagcagtgagccagtgaatatggccatttcttggaaagcaggaagaagagtattcaaaagatcgggtaattgttgcagtgcggcaagggaacatcctcgcaactgctttccacccagaattgacatcagactccagatggcatcgtttcttcttggacatggataaagaatccccagcaaaggcgttttctgcgctctccctgtcgtcatcgtcaagagacactgaaggcctgccaaagaataagccgtttgatctgcccatttttgagtaacgctaaagacaagacaaaccaaaagattgaaggaacgaagaaactgaccgtatttattatcgatcatcatttagccggttacaaaaacagccagctgagaatctgtcatactcagccgaaaaaagtgttgtctggtagctaacttgtacggataaaaaataatcacgctgtgtgctgtacgcaattctcatcagataaagcgaaacattgttttcctgggaattatagttttgctgaaggtgaccagttgaacacttgaacatggtaatactttccccctctatgtgcaacttcgttcaagaccaa

SEQ ID NO: 200559 - DNA, 1008 bp, Zea Mays
ttcgtctcactcactctactcaccaccatggccaagctcgccaactaccacaatctgttccctgcacttcgagagttcgtcggaggtggaaagcctgtctggggaacctgtgctgggctcatctttcttgcaaacaaagcagtagggcaaaaaacaggggggcaggaacttgttggaggattagattgtacagtccaccgaaacttttttgggagtcagcttcaaagctttgagacagagctttccgtgccaaagctttcggagaaggaaggagggaatgatacatgccgcggtgtatttatacgggcacctgctatattggaagtaggtccagatgttgaaatattggcggattgccctgttcctgttgacagacccagcattacaatatcatttggggagggtactgagttccttttagttctttaatgagcagtgagccagtgaatatggccatttcttggaaagcaggaagaagagtattcaaaagatcgggtaattgttgcagtgcggcaagggaacatcctcgcaactgctttccacccagaattgacatcagactccagatggcatcgtttcttcttggacatggataaagaatccccagcaaaggcgttttctgcgctctccctgtcgtcatcgtcaagagacactgaaggcctgccaaagaataagccgtttgatctgcccatttttgagtaacgctaaagacaagacaaaccaaaagattgaaggaacgaagaaactgaccgtatttattatcgatcatcatttagccggttacaaaaacagccagctgagaatctgtcatactcagccgaaaaaagtgttgtctggtagctaacttgtacggataaaaaataatcacgctgtgtgctgtacgcaattctcatcagataaagcgaaacattgttttcctgggaattatagttttgctgaaggtgaccagttgaacacttgaacatggtaatactttccccctctatgtgcaacttcgttcaagaccaa

SEQ ID NO: 200560 - DNA, 1926 bp, Zea Mays
cggcgatctccccgccgacgtgggcgaacggctccacggcgatcggatggccacgagcggccgtcgcctaccctcccacagtcccactcccacactagtccttttcccctgacgtggcagcggcaagtgcacccaaacgtttcgatatcccagagtggtgtggccgccgccggcggcttctttctccccttccattccgctccccgtgacgtcaccgaccaggcaagcactccgctccaccagagccgcctcgcctgtctgtccgacccacacacctaccggagcgcgcgtcccgaggtcggcggagcagggtcgggaggagggtatggcggtggtgggcgtcctcgcgctgcagggatcctacaacgagcacatggccgcgctgaggaggatcggggtgaagggggtggaggtgcgcaagccagagcagctcctcggcatcgactcgctcatcatccccggtggcgagagcaccaccatggccaagctcgccaactaccacaatctgttccctgcacttcgagagttcgtcggaggtggaaagcctgtctggggaacctgtgctgggctcatctttcttgcaaacaaagcagtagggcaaaaaacaggggggcaggaacttgttggaggattagattgtacagtccaccgaaacttttttgggagtcagcttcaaagctttgagacagagctttccgtgccaaagctttcggagaaggaaggagggaatgatacatgccgcggtgtatttatacgggcacctgctatattggaagtaggtccagatgttgaaatattggcggattgccctgttcctgttgacagacccagcattacaatatcatttggggagggtactgagttccttttagttctttaatgagcagtgagccagtgaatatggccatttcttggaaagcaggtacaagatactatggtcagatctgggcatacttgcatataacatgctgattctacatgtggtctctgccttcttgtgtagtcctgattattcaaactggctttgagatctgaaatgatatatagttttaacccgttggccattgcaactcaaatattcagacaaatggactaatgggttcttcgatgattcgatcaaatttgtctcctttggggtattactggtttgctaaagcatctgaatgggctgccctgtcacggcagcatgacatgtgtttttgttcattggcttgtttttctgcatgaaatgtgttcatgtaaccgtgccttttgggaattggccaagtttttccttatattaggaaaaaaacagcgaaagtgctagttggcaatcttgtaacgcttaattccgtattctgaatggggcctgcttatcctctgttgactgacgagaatatatactttcaggaagaagagtattcaaaagatcgggtaattgttgcagtgcggcaagggaacatcctcgcaactgctttccacccagaattgacatcagactccagatggcatcgtttcttcttggacatggataaagaatccccagcaaaggcgttttctgcgctctccctgtcgtcatcgtcaagagacactgaaggcctgccaaagaataagccgtttgatctgcccatttttgagtaacgctaaagacaagacaaaccaaaagattgaaggaacgaagaaactgaccgtatttattatcgatcatcatttagccggttacaaaaacagccagctgagaatctgtcatactcagccgaaaaaagtgttgtctggtagctaacttgtacggataaaaaataatcacgctgtgtgctgtacgcaattctcatcagataaagcgaaacattgttttcctgggaattatagttttgctgaaggtgaccagttgaacacttgaacatggtaatactttccccctctatgtgcaacttcgttcaagaccaa

SEQ ID NO: 200561 - DNA, 1411 bp, Zea Mays
cggcgatctccccgccgacgtgggcgaacggctccacggcgatcggatggccacgagcggccgtcgcctaccctcccacagtcccactcccacactagtccttttcccctgacgtggcagcggcaagtgcacccaaacgtttcgatatcccagagtggtgtggccgccgccggcggcttctttctccccttccattccgctccccgtgacgtcaccgaccaggcaagcactccgctccaccagagccgcctcgcctgtctgtccgacccacacacctaccggagcgcgcgtcccgaggtcggcggagcagggtcgggaggagggtatggcggtggtgggcgtcctcgcgctgcagggatcctacaacgagcacatggccgcgctgaggaggatcggggtgaagggggtggaggtgcgcaagccagagcagctcctcggcatcgactcgctcatcatccccggtggcgagagcaccaccatggccaagctcgccaactaccacaatctgttccctgcacttcgagagttcgtcggaggtggaaagcctgtctggggaacctgtgctgggctcatctttcttgcaaacaaagcagtagtgttgctttcagggcaaaaaacaggggggcaggaacttgttggaggattagattgtacagtccaccgaaacttttttgggagtcagcttcaaagctttgagacagagctttccgtgccaaagctttcggagaaggaaggagggaatgatacatgccgcggtgtatttatacgggcacctgctatattggaagtaggtccagatgttgaaatattggcggattgccctgttcctgttgacagacccagcattacaatatcatttggggagggtactgaggaagaagagtattcaaaagatcgggtaattgttgcagtgcggcaagggaacatcctcgcaactgctttccacccagaattgacatcagactccagatggcatcgtttcttcttggacatggataaagaatccccagcaaaggcgttttctgcgctctccctgtcgtcatcgtcaagagacactgaaggcctgccaaagaataagccgtttgatctgcccatttttgagtaacgctaaagacaagacaaaccaaaagattgaaggaacgaagaaactgaccgtatttattatcgatcatcatttagccggttacaaaaacagccagctgagaatctgtcatactcagccgaaaaaagtgttgtctggtagctaacttgtacggataaaaaataatcacgctgtgtgctgtacgcaattctcatcagataaagcgaaacattgttttcctgggaattatagttttgctgaaggtgaccagttgaacacttgaacatggtaatactttccccctctatgtgcaacttcgttcaagaccaa

SEQ ID NO: 200562 - DNA, 1954 bp, Zea Mays
cggcgatctccccgccgacgtgggcgaacggctccacggcgatcggatggccacgagcggccgtcgcctaccctcccacagtcccactcccacactagtccttttcccctgacgtggcagcggcaagtgcacccaaacgtttcgatatcccagagtggtgtggccgccgccggcggcttctttctccccttccattccgctccccgtgacgtcaccgaccaggcaagcactccgctccaccagagccgcctcgcctgtctgtccgacccacacacctaccggagcgcgcgtcccgaggtcggcggagcagggtcgggaggagggtatggcggtggtgggcgtcctcgcgctgcagggatcctacaacgagcacatggccgttccctgcacttcgagagttcgtcggaggtggaaagcctgtctggggaacctgtgctgggctcatctttcttgcaaacaaagcagtagtgttgctttcagggcaaaaaacaggggggcaggaacttgttggaggattagattgtacagtccaccgaaacttttttgggagtcagactgtttctcttgcagcttcaaagctttgagacagagctttccgtgccaaagctttcggagaaggaaggagggaatgatacatgccgcggtgtatttatacgggcacctgctatattggaagtaggtccagatgttgaaatattggcggattgccctgttcctgttgacagacccagcattacaatatcatttggggagggtactgaggtttgtatgttgctttttttttactagaatactgcaattgtcttcaaatggccaaactgagttctgatatatttctagtaaactagatttttagcatgagcgctcattatttcttctcgttttaacagttccttttagttctttaatgagcagtgagccagtgaatatggccatttcttggaaagcaggtacaagatactatggtcagatctgggcatacttgcatataacatgctgattctacatgtggtctctgccttcttgtgtagtcctgattattcaaactggctttgagatctgaaatgatatatagttttaacccgttggccattgcaactcaaatattcagacaaatggactaatgggttcttcgatgattcgatcaaatttgtctcctttggggtattactggtttgctaaagcatctgaatgggctgccctgtcacggcagcatgacatgtgtttttgttcattggcttgtttttctgcatgaaatgtgttcatgtaaccgtgccttttgggaattggccaagtttttccttatattaggaaaaaaacagcgaaagtgctagttggcaatcttgtaacgcttaattccgtattctgaatggggcctgcttatcctctgttgactgacgagaatatatactttcaggaagaagagtattcaaaagatcgggtaattgttgcagtgcggcaagggaacatcctcgcaactgctttccacccagaattgacatcagactccagatggcatcgtttcttcttggacatggataaagaatccccagcaaaggcgttttctgcgctctccctgtcgtcatcgtcaagagacactgaaggcctgccaaagaataagccgtttgatctgcccatttttgagtaacgctaaagacaagacaaaccaaaagattgaaggaacgaagaaactgaccgtatttattatcgatcatcatttagccggttacaaaaacagccagctgagaatctgtcatactcagccgaaaaaagtgttgtctggtagctaacttgtacggataaaaaataatcacgctgtgtgctgtacgcaattctcatcagataaagcgaaacattgttttcctgggaattatagttttgctgaaggtgaccagttgaacacttgaacatggtaatactttccccctctatgtgcaacttcgttcaagaccaa

SEQ ID NO: 200563 - DNA, 1459 bp, Zea Mays
cggcgatctccccgccgacgtgggcgaacggctccacggcgatcggatggccacgagcggccgtcgcctaccctcccacagtcccactcccacactagtccttttcccctgacgtggcagcggcaagtgcacccaaacgtttcgatatcccagagtggtgtggccgccgccggcggcttctttctccccttccattccgctccccgtgacgtcaccgaccaggcaagcactccgctccaccagagccgcctcgcctgtctgtccgacccacacacctaccggagcgcgcgtcccgaggtcggcggagcagggtcgggaggagggtatggcggtggtgggcgtcctcgcgctgcagggatcctacaacgagcacatggccgttccctgcacttcgagagttcgtcggaggtggaaagcctgtctggggaacctgtgctgggctcatctttcttgcaaacaaagcagtagggcaaaaaacaggggggcaggaacttgttggaggattagattgtacagtccaccgaaacttttttgggagtcagcttcaaagctttgagacagagctttccgtgccaaagctttcggagaaggaaggagggaatgatacatgccgcggtgtatttatacgggcacctgctatattggaagtaggtccagatgttgaaatattggcggattgccctgttcctgttgacagacccagcattacaatatcatttggggagggtactgaggtttgtatgttgctttttttttactagaatactgcaattgtcttcaaatggccaaactgagttctgatatatttctagtaaactagatttttagcatgagcgctcattatttcttctcgttttaacagttccttttagttctttaatgagcagtgagccagtgaatatggccatttcttggaaagcaggaagaagagtattcaaaagatcgggtaattgttgcagtgcggcaagggaacatcctcgcaactgctttccacccagaattgacatcagactccagatggcatcgtttcttcttggacatggataaagaatccccagcaaaggcgttttctgcgctctccctgtcgtcatcgtcaagagacactgaaggcctgccaaagaataagccgtttgatctgcccatttttgagtaacgctaaagacaagacaaaccaaaagattgaaggaacgaagaaactgaccgtatttattatcgatcatcatttagccggttacaaaaacagccagctgagaatctgtcatactcagccgaaaaaagtgttgtctggtagctaacttgtacggataaaaaataatcacgctgtgtgctgtacgcaattctcatcagataaagcgaaacattgttttcctgggaattatagttttgctgaaggtgaccagttgaacacttgaacatggtaatactttccccctctatgtgcaacttcgttcaagaccaa

SEQ ID NO: 200564 - DNA, 1036 bp, Zea Mays
cgaggaatgggaatcaaaatttacttgatttctctataagatgagctggagatttcctctcttcggctctcagcagcagcaagcagatccaagtttccaggacatccctacgcagtcttggtaccctccctcggtggtaggttcctcttcacgtccatccacccctacctcttctagtgctagtctacaccaaagagcttcagatagtccgcagtcttcatcccgtgggcaaccatctcctgctgaggctgcagggataattgcccgtttgaaggataagagtattgaggagttacaaaggctattgaaagacagagaggcatataatgcattctttaactcacttgatcaagtgaaaacccagaacaatgtgcgtgatgagcttaaaaaagagacattgcaacttgcaagggaaaatttagaaaaggagcagcggattttggaacttaggaatcagtgcacaataattagaaccacggaactggctgctgctcaagaccgcctaactgatttggagaggcaaaaggatgatattatgaggtcctattcccctgccgcactgctcaacaagctccaaacatcaatggcaaagttggatgaggagtccgaggagctgcaccagaagttcctggagaaggacatcgaccttccaacctttgtgcagaagtacaagaagctccgcacggcttaccacaagcaggcgttgctccatctcgccggccagacatcactccgctgacatccggccaggcgtcatggcaactttgttgtatttctgctcgcctgttcttgttctacactatgcttggccctgttttacgagtgcagcctcttgtagggatttgccgaacatcagcggatattgcatgtatagttttatgtcttgcaaaaacgtcttatgtactctgtcctggtgtagtggtgtttacgtatctagtgtccaagttgggattcatttgtggtaactaaacactttgcctattttgttcaattcgatgataataaagcttttgtacgtttgtgtacacatccgttc

SEQ ID NO: 200565 - DNA, 3206 bp, Zea Mays
tctcacgccttctcggggatgggaaagggctcctccttctgcaagacaaagatgagcactgtaaggataaaattaggatcatcacaacaatagacaaggaattaccattatctcttgaagccctaaaacatgggcaaaagcagttaccttagacactgttacaggggtagagcattccacagcaatacagcacagagtaaaatctttgtagattccatgcgttttacgaaaacaactcttgttagtctgtataggcaggtaatgcaaaacatggcataactatatctaagcttcatctgctgatatattccatgctgcatcgaagcatttttattttaattctgtaatgcaaaagcatccaaatcattttccccttggaaatcagaaatcatggtgttatgaaatttgacgttcataatcatatttaattcaagtatgatatggcacaatatactaccacactatccacctctaacagtcacaaaccaagctatagtacaaaattcgaatgaaggcgatcagcatcgcctcaaattttttacagtacaaaccccaaaaaaataaaacgaagactcgccagatttctgtggcgtgtgtcgggagatgtggtcacctatacgaggggcgatagggggacctgctacggctagggcttcggtccctacggcccctccggccgcggtaccgctcgggtgatggcgaccgccgacgccggcgcggcggagacagcgaccgcgacaggtcgcgttgcatcgtgcgcgacgcgatctagagcctcagcggagccggatctggacgaaaccagacgatcggagccttcggagaggggcggagtctggcttgctggctggaaagcgggaggacgcaggccaggtcaggtagagtcgcccgccgccgcacgcgggggccgatgaggtgggggatgctcgcagcccgcggaatctatctgtgggaagttgtaattaacctccaaggctacgcccaggtatacaaggtgggcgctggggagaagcaaaagcaatcgggccaccaatcccacagcgtgatatgaccgcccggtccagctcagcccaggcccatgtgagtcgtccgacccggatgagtccagatccagacccaacgtgaccgcgagtccctcaagatcacacagtaccggcaggcggcagcaattggagtgtttacgccgagacttgaaaacggcatcagtagcaaacggaggcgaccacgagcgacggggccagccgcggtccccaacgtcagaggatctcgttccagctgcggcagggcggccaacaccggcacctcatgggcgccgacgacgaagccgccgccgccatggaggcgcaagagagggaggcggagatcgagaaggccatgcgcgcccgcgtcgcagacttcaagaagcaggccgactccttgactcttgaaggcgttaggagagcactggaaaaggacctggatttgaagatatattcacttgatgcacataaaaagtttataaagcaatgtgtagacaaagtttttgctgaatctgctgatgaaaatgcaaatgatgatgcattagaggattctgatgctaaagatgatcatttatcaaaagaagggacagatgttgctaaaccaatgcctgtttcaaataaaatgtcctccaatgctgatgtcgtaacatccagcaagacaggaaaggatcctgaagaagaaaagaatcaaacttccagcagtgatattagtgaagacatgataaaagaagccattgaaaaaagggcatcttattttagaaagaactctgatactcttactttacaaggagttcggcgtactttggaagaagatctcaagcttcagaagaaagctttagatgcctataagaattttattactacaggattagacaagattttgcaagaacctgcaaatgggacaaagaaaaaaagtaaaaatggatcttccaaggatactgacaaaacaagtaaaggctctaaaagagtccatgaagaatcagatagctctgaattaaatgatagaaagagtgatatggataatagcgacgtggattcaaggccaagaaagaaaagggcagaaaaggctaaagtcaccaaaaaacagaaaatagttacaaatgagaggaaactgtcaactccaaaggctaaaaaggttgcaaaacaagatttgggtagcagtactgaagaacagggtggcaattcagcagaagaggataattctcattcatccgctgaggaagataataagagaaaacggcaacagactccagcttatgggaaacaagcagagcatctgaaatcgataatcaagtcttgtggaatgactattccacctactgtgtatcggagagtcaagcaagctgctgagaacaagcgtgaggcctgtttgataaaggagttacaggatatacttgaaaaggaaggattgtcaaaaaatccttctgaaaaagaaattaaagcagtgaagaagagaaaagaaagagcaaaggaacttgagggcatagacatgagtaatattattactagttcgcgtcggagaagtacatcaagtttcatacccctgccaccaccgccgcaaatagaagtggatagtgatgatgatgaagacgatgacgatgatgcagaaggcaatgatgcagaaggcgatgatgcagaagacgatgatgaagttgatgaggagaatgtcaaaggtcgagatgaaggtgataatgatactgccgaagctgccaacggttctgctgatgatgctgaaaaggagaacaattgattccggccccagaataggttcagcttcatgttggcttcggcaagttggcctcgttcgtggatgtctggatgtagccagttgctcaggagttctcttctgacgtttatttatgtgtgcgtgatgggaacatttgttggcttcagctttgggtgaaacatgaggaacatattgtccttgtagtgatgtgcaatgtcacattcgtcctcttagcatcttgttcgcgattgtgtagattacaacaacagtcgcaaaacatataagttagcagtaatcaagtactgattggtttattagtttctgatatagtataaacctcgtaggtgaaagattggaattactatgcgcttcatgcttttgccttgttttttcttaggtagtgtttattttccgtggcatggtggcatctggggttttttgcagttctgattggcgttgtg

SEQ ID NO: 200566 - DNA, 3219 bp, Zea Mays
cttctcggggatgggaaagggctcctccttctgcaagacaaagatgagcactgtaaggataaaattaggatcatcacaacaatagacaaggaattaccattatctcttgaagccctaaaacatgggcaaaagcagttaccttagacactgttacaggggtagagcattccacagcaatacagcacagagtaaaatctttgtagattccatgcgttttacgaaaacaactcttgttagtctgtataggcaggtaatgcaaaacatggcataactatatctaagcttcatctgctgatatattccatgctgcatcgaagcatttttattttaattctgtaatgcaaaagcatccaaatcattttccccttggaaatcagaaatcatggtgttatgaaatttgacgttcataatcatatttaattcaagtatgatatggcacaatatactaccacactatccacctctaacagtcacaaaccaagctatagtacaaaattcgaatgaaggcgatcagcatcgcctcaaattttttacagtacaaaccccaaaaaaataaaacgaagactcgccagatttctgtggcgtgtgtcgggagatgtggtcacctatacgaggggcgatagggggacctgctacggctagggcttcggtccctacggcccctccggccgcggtaccgctcgggtgatggcgaccgccgacgccggcgcggcggagacagcgaccgcgacaggtcgcgttgcatcgtgcgcgacgcgatctagagcctcagcggagccggatctggacgaaaccagacgatcggagccttcggagaggggcggagtctggcttgctggctggaaagcgggaggacgcaggccaggtcaggtagagtcgcccgccgccgcacgcgggggccgatgaggtgggggatgctcgcagcccgcggaatctatctgtgggaagttgtaattaacctccaaggctacgcccaggtatacaaggtgggcgctggggagaagcaaaagcaatcgggccaccaatcccacagcgtgatatgaccgcccggtccagctcagcccaggcccatgtgagtcgtccgacccggatgagtccagatccagacccaacgtgaccgcgagtccctcaagatcacacagtaccggcaggcggcagcaattggagtgtttacgccgagacttgaaaacggcatcagtagcaaacggaggcgaccacgagcgacggggccagccgcggtccccaacgtcagaggatctcgttccagctgcggcagggcggccaacaccggcacctcatgggcgccgacgacgaagccgccgccgccatggaggcgcaagagagggaggcggagatcgagaaggccatgcgcgcccgcgtcgcagacttcaagaagcaggccgactccttgactcttgaaggcgttaggagagcactggaaaaggacctggatttgaagatatattcacttgatgcacataaaaagtttataaagcaatgtgtagacaaagtttttgctgaatctgctgatgaaaatgcaaatgatgatgcattagaggattctgatgctaaagatgatcatttatcaaaagaagggacagatgttgctaaaccaatgcctgtttcaaataaaatgtcctccaatgctgatgtcgtaacatccagcaagacaggaaaggatcctgaagaagaaaagaatcaaacttccagcagtgatattagtgaagacatgataaaagaagccattgaaaaaagggcatcttattttagaaagaactctgatactcttactttacaaggagttcggcgtactttggaagaagatctcaagcttcagaagaaagctttagatgcctataagaattttattactacaggattagacaagattttgcaagaacctgcaaatgggacaaagaaaaaaagtaaaaatggatcttccaaggatactgacaaaacaagtaaaggctctaaaagagtccatgaagaatcagatagctctgaattaaatgatagaaagagtgatatggataatagcgacgtggattcaaggccaagaaagaaaagggcagaaaaggctaaagtcaccaaaaaacagaaaatagttacaaatgagaggaaactgtcaactccaaaggctaaaaaggttgcaaaacaagatttgggtagcagtactgaagaacagggtggcaattcagcagaagaggataattctcattcatccgctgaggaagataataagagaaaacggcaacagactccagcttatgggaaacaagcagagcatctgaaatcgataatcaagtcttgtggaatgactattccacctactgtgtatcggagagtcaagcaagctgctgagaacaagcgtgaggcctgtttgataaaggagttacaggatatacttgaaaaggaaggattgtcaaaaaatccttctgaaaaagaaattaaagcagtgaagaagagaaaagaaagagcaaaggaacttgagggcatagacatgagtaatattattactagttcgcgtcggagaagtacatcaagtttcatacccctgccaccaccgccgcaaatagaagtggatagtgatgatgatgaagacgatgacgatgatgcagaaggcaatgatgcagaaggcgatgatgatgatgcagaaggcgatgatgcagaagacgatgatgaagttgatgaggagaatgtcaaaggtcgagatgaaggtgataatgatactgccgaagctgccaacggttctgctgatgatgctgaaaaggagaacaattgattccggccccagaataggttcagcttcatgttggcttcggcaagttggcctcgttcgtggatgtctggatgtagccagttgctcaggagttctcttctgacgtttatttatgtgtgcgtgatgggaacatttgttggcttcagctttgggtgaaacatgaggaacatattgtccttgtagtgatgtgcaatgtcacattcgtcctcttagcatcttgttcgcgattgtgtagattacaacaacagtcgcaaaacatataagttagcagtaatcaagtactgattggtttattagtttctgatatagtataaacctcgtaggtgaaagattggaattactatgcgcttcatgcttttgccttgttttttcttaggtagtgtttattttccgtggcatggtggcatctggggttttttgcagttctgattggcgttgtg

SEQ ID NO: 200567 - DNA, 2315 bp, Zea Mays
cgatggccgtggagctagctgcctgggaatgggataggatattttcccgtggcgggataaagcccaacgagcccgcgttacggatatcttcgccatccgttgcctcgcgagctcgccgccatggcattggctctccccctcgcccgcctcgtccccgcctgccagtgccagccttggccccacctgcgctttcggaagcgccacgtctccttcgccgctcacgccagttctcgcgccgccttcgctgcctgcgcggcggcccctgccctccaggtccaggcgccggaggcggaggcggaggcggagacggtcgagcaagtgggcccgaagacacgcctcgtcgcgcagaacatcccgtgggactgcacggccgacgaaatgcgcgcgctcttcgagagccacggctccgtcgtcggcgtcgagctttcaatgtacagcgccaataaaaacagagggttggcgtttgtaaccatgggttcagaagaggaggctcttgcagctctcacccatctcaattcaactattttaaatgataggaaaattaaggtggacttcgcaaggcctagaaagaagcaacctaagcaacctgctgtggtatcggatgacacggaaaagtatgttgtgtttgtcgggaatttgacatggagggtaagaaatcgtcaccttcgggaattatttgcctctgccccaggtgtggtatcagctgaagttatcttccataccaccactccgagacgatctgctggctacgcgtttgtttctttttcttcgaaagagagcgcaggggccgccatatctgctttcaacggaaagatattgatgggacggcccattaacgtgatgttcaaagatgaaaatggtgaaaagaatgaaccttcttctgtcccaaagaaggccgaggagcatagcagttggactggacatgccgtgtaatgcaccacgacgcggttaactcgggacggaagcaacgcaactcggcacgaagaaggaaaagccaccaccggttcctccgccgtccccgcggtttcagttccttgcttgcttgcttgctcttgctctccctctctcgtggaagccagccacacaaggcagaaagagagagtgacgttgtgttccatcccgttccgctgaagcaaccgctctcctacaccaaaccacccacaccactctaggtctctagccgatgcgatggatgtggatccagcagcggaccagcggaggaagaacaagggcgggctggagtcggagctggagcgccactacgacgacctgcagcgggagatgatgctgatggccgccgatcggccgcacaagcaactgcaacagcatcgacgtcacgggcaccgccccgatctgctccagaactgcgacctgcccccaccggccaagctcttcggccccgtacccaccctgcagaggtccttctcaatccccgatctcatctcatctcggtttcggtgtttgattcattccttgaattgagctggattcctccaatcaattgggaaggctggagaccgctgctgccaaggaccacaaggccgacgacggcctgctgcgggcgctgcgcctgtcgcagtcgcgcgcgcgggaggcggaggacaagctggcggccgcgggcgccaccaacgtcgacctcgcggcgctgctcgtgcgggactccgtcgcgctctccgcccaccgccgctgggtcatgatgctggaggccgagaattccctgctccgaggaccacgacgagatgcggatggtccggaaccggaccacggagccggcggggtggccgcgtggtgggtcgcgctcgccgtctgcgtcggcgtcgccggcgtcggcctcgcgctcggcaggttcctctgctgaacaactgtgatggatcattctccttccttcctgctgctgtagaaagtgtaaatctacttcgagacgacgatcgatcgatcaatcaatcagtcaaaaaaaaaactgtaaatactgctacagtagtacggagtaggattggtctccaagttaaagtacccattcctgcacgctttctgctttagcttgtggaaacaatctgttgagaatttgatgcctgccgtgaggttccgtgtcactttccattgctcacagtcacagcacagaaattgtcgcgcattcatgtacgacgacaaggacttttccctgtagttgtaatccattttttttgaaaaaaacaattaattgattttacctgtaaattctccagttcttttacgggtaaattctaaaatgcgcaagcaattcttcaccaaatggaagcaggtcgagtcagtcctagatggggtcggtggcacct

SEQ ID NO: 200568 - DNA, 2694 bp, Zea Mays
gcagacacttggcgaggtcgatggccgtggagctagctgcctgggaatgggataggatattttcccgtggcgggataaagcccaacgagcccgcgttacggatatcttcgccatccgttgcctcgcgagctcgccgccatggcattggctctccccctcgcccgcctcgtccccgcctgccagtgccagccttggccccacctgcgctttcggaagcgccacgtctccttcgccgctcacgccagttctcgcgccgccttcgctgcctgcgcggcggcccctgccctccaggtccaggcgccggaggcggaggcggaggcggagacggtcgagcaagtgggcccgaagacacgcctcgtcgcgcagaacatcccgtgggactgcacggccgacgaaatgcgcgcgctcttcgagagccacggctccgtcgtcggcgtcgagctttcaatgtacagcgccaataaaaacagagggttggcgtttgtaaccatgggttcagaagaggaggctcttgcagctctcacccatctcaattcaactattttaaatgataggaaaattaaggtggacttcgcaaggcctagaaagaagcaacctaagcaacctgctgtggtatcggatgacacggaaaagtgtggtatcagctgaagttatcttccataccaccactccgagacgatctgctggctacgcgtttgtttctttttcttcgaaagagagcgcaggggccgccatatctgctttcaacggaaagatattgatgggacggcccattaacgtgatgttcaaagatgaaaatggtgaaaagaatgaaccttcttctgtcccaaagaaggccgaggtggaaccatctgatgaccagagtgataagctaagcatgaactgttaacgaaacaaataggtcatatctgtcattacacacacatatatattctgacccatggtatttccttttcagaaatagttatgtcccttgttttattgatttgccaatctggtgtatgttcgtcgtgaggcaaacgtgagcgctgtgagggcgtcaaatcctcccgcgcgcgttgcaagggtcctaaatataaacttaattaggtttaataaatttgtctcgtctttttaattttatagtttctatatttaatactcgtaattactatttaaacattcggtgtgacataaattaaattttagttaggtggaaccaaacagagaattgaggggggttgcagtgaattaggagaggattttgacatatagggcatttgtagatttaagacaaacgaacatgagtcatgggcagccaatgaacatgattccatacgtattgttggccgacgaaaggaaaataagtatactcggacgtatttgcgtaggagcatagcagttggactggacatgccgtgtaatgcaccacgacgcggttaactcgggacggaagcaacgcaactcggcacgaagaaggaaaagccaccaccggttcctccgccgtccccgcggtttcagttccttgcttgcttgcttgctcttgctctccctctctcgtggaagccagccacacaaggcagaaagagagagtgacgttgtgttccatcccgttccgctgaagcaaccgctctcctacaccaaaccacccacaccactctaggtctctagccgatgcgatggatgtggatccagcagcggaccagcggaggaagaacaagggcgggctggagtcggagctggagcgccactacgacgacctgcagcgggagatgatgctgatggccgccgatcggccgcacaagcaactgcaacagcatcgacgtcacgggcaccgccccgatctgctccagaactgcgacctgcccccaccggccaagctcttcggccccgtacccaccctgcagaggctggagaccgctgctgccaaggaccacaaggccgacgacggcctgctgcgggcgctgcgcctgtcgcagtcgcgcgcgcgggaggcggaggacaagctggcggccgcgggcgccaccaacgtcgacctcgcggcgctgctcgtgcgggactccgtcgcgctctccgcccaccgccgctgggtcatgatgctggaggccgagaattccctgctccgaggaccacgacgagatgcggatggtccggaaccggaccacggagccggcggggtggccgcgtggtgggtcgcgctcgccgtctgcgtcggcgtcgccggcgtcggcctcgcgctcggcaggttcctctgctgaacaactgtgatggatcattctccttccttcctgctgctgtagaaagtgtaaatctacttcgagacgacgatcgatcgatcaatcaatcagtcaaaaaaaaaactgtaaatactgctacagtagtacggagtaggattggtctccaagttaaagtacccattcctgcacgctttctgctttagcttgtggaaacaatctgttgagaatttgatgcctgccgtgaggttccgtgtcactttccattgctcacagtcacagcacagaaattgtcgcgcattcatgtacgacgacaaggacttttccctgtagttgtaatccattttttttgaaaaaaacaattaattgattttacctgtaaattctccagttcttttacgggtaaattctaaaatgcgcaagcaattcttcaccaaatggaagcaggtcgagtcagtcctagatggggtcggtggcacct

SEQ ID NO: 200569 - DNA, 3789 bp, Zea Mays
caaaagtactaatcgtaaagcatgcagcttcattgtaaaggtatacgatttataagagagaaaaaaggacaaaaaagtaaattaaattgtcgacacatctctgcctttccttcacaagtgcacactttccaattcagttcaattttcattcgaattcgttttcgtttttcgttcttttttgtttttccccattctcacacgaacaagacgaacacgttcgtccccatcgccgtgttcttcgcgccgccgctgcccaccgatcgaatccgcccgccgcctcccagtaacctccggatccctactcctccaagcttctgtacatctcatcctattcgatttgtctctcgattgccatcatcagtcgcaacccagatatgagtttcactaccaaattctagggtttggggcatatggcctcgtgggtttgggagtgtgatcgacgggcagtgtaatttaataattagctaggatgtcaagagatgatcacgttgaaatctaagtcttgaagagatgattgcggagaagccaaactggattcgtcacgagggcctacagatcttctccatcgacatccagcccggcggcctccgcttcgccactggcggcggcgaccagaaggttcgaatatggagcatgaaatctgtggacaagaataataatcacaatgattccagccaagggttgctagctacaatgcgtgaccattttggatcggtaaactgtgtgagatgggcaaggcatggccgctatctggcttctggatcagatgatcaggttatcctaattcatgagagaaaagctggttctggaacatctgagtttggtagtggggaacctccagatgtggaaaattggaaggttattatgaccttaagagggcatactgcggacgtggtagatcttaactggtcccctgatgattcaacattggctagtggtagcttggataatactgttcacatatggaacataaccaatggtatgtgcactgccgtcttgagagggcattccagcttggtcaagggtgttacctgggatcctattggctctttcatcgcaagccaatcagatgataagaccgttataatatggcgtacaagtgactggagtcttgctcacaagacagaaggccattgggaaaaatctcttggttcaacattttttaggcgacttgcgtggtcaccttgtggccacttcattactacgactcatggcttccagaaacctaggcattcagcccctgtgcttgaaagaggcgagtggtctgctacatttgactttctaggacataacgcacctatcgtggtggttaagtttaataactcaatgttccgtaagagtttctccaatggtcaagacacaaaagctgcaccagctggatgggccaatgggacatcaaagatatcatcaaaagaacagcaaccatataatgttattgctattggaagtcaggacagaacaattactgtttggacaacagcgagtgcacggccattgttcgttgctaagcattttttctctcaaagcgtggttgatttatcttggagccctgatggttattcactttttgcatgctccttggatggatctgttgccaacttccactttgaagcaaaggagcttggatacaagttaagtgattctgatctggatgaattgaagaggagcagatatggtgatgttagaggacggcaatcaaatctggctgaaagccctgcacagttactgctagaagaagcatcagcaaagcaatcggctagcaaaaaagggactccgattgtccagcaatttcaagcaccccaaaaactttctgcagatgtgcttaacccagctcctgttgtgcaaaatcagaaagctcctgaagctttacctgaagatgagaagaaatcatcagatcctgctgctgatggtatgaataaagttactcggttatctagtccagtgaagcagagagaataccggcgtcctgatggcaggaaaagaataatcccagaggctgttggatttccatccaaccaggataacatacccagccgttctcagaaccacgttatagatttttcatccttagatcagcgaatgaatgggataagaccatcttattgtagtagcagtaactgtaacaactctggagttaaggactgctctggtgtcacagcaagggctaacattacagaaagtcttgttattcaaaaagcttcaaccaatgctagcagtgatggaaggctgactgtagaacgcactggatctgttgttccaggctctttgaactgccctgcactttctatacatgtattagataagaaagacaatgaggattccttgccagtctgccttgaggcaaatcctgtagaacacgctgcaggtgatatgaatggtgtcggtggtgccttttcaacaaaaggaacagaaataaggtgtacaagaggaacagaaactctttggttggatcgtatatctgcaaaggttactgccttggcaggcaatacaaatttctgggctgttggctgtgaagatggttacctgcaggtttacacaaaatgtggaagacgagccatgccggcaatgatgatgggatctgcagctgtttttatagactgtgatgactgctggaaattgcttcttgtcacaagaagaggtttaatgtatatatgggacctccataacaggacctgcattttgcaggactcattggctgctttggttgcatctccagatgagtcatcagcaaatcatgcagctcatttatttttccccaagctggagagctaggcaagttgcagattgatgtaggcaagtttatggctagaaagcctatatggagcagggttacagatgatggtttgcagacacgtgcccatttagagacccagttggcagcttctttggctttgaagtcaccacaggagtaccgccaatgcctcctatcctacatacggtttctggcaagagaagcagatgaatcccgtctacgtgaggtttgtgagagcttcctaggtcctcccatgggcatgcttggatctgagtcatctacggatcccaaaagtccagcgtgggattctgatgttctcgggatgaagaagcaccaactcctcagggaagacatacttccatcgatggcatctaaccggaaagtccagcgtctgctcaacgagtttatggatctcctatcagagtatgaagctgctaagagcaaagttgacccaatggatatcacaccggcgctaccacaacaagcaccagaagccaatgccaacgtggtcacctcgtagctgcaccagttccgttgatagttccgttgctggcgacttactgacctctcggtaagtatgataggatagcaatcttggtaagtccttatatgaatcaatcaattagttgtgcttgtaactggtagattgtttagcgagggaggcgacctcaggcaaacattgatattgaacccgttagctgtaacgctgtgtaacagtagaagaaagaagctgaggtcgccaggtaatttattgttaaactgtaggaggccgggtaaactcatgcccttcttgttccaagctaccgtatgcagtggtggcccactggccgtgtgtattttggcgaaaacctgcgtcgtcaaaactggcattgacatcttttagaggaacaggaacaatgagcatttcggcggtgatgattgagcgggcacgccataaacatgtgatttggataattctttatgtagagcggcttttatatgtgtaaacagaaacagaaaatggtggcttaatccaatcgtcagttggagaggaaccg

SEQ ID NO: 200570 - DNA, 3212 bp, Zea Mays
tatttggaggttaaggattgcaagtaggcaggggtggacttggtgccaggttcgaatatggagcatgaaatctgtggacaagaataataatcacaatgattccagccaagggttgctagctacaatgcgtgaccattttggatcggtaaactgtgtgagatgggcaaggcatggccgctatctggcttctggatcagatgatcaggttatcctaattcatgagagaaaagctggttctggaacatctgagtttggtagtggggaacctccagatgtggaaaattggaaggttattatgaccttaagagggcatactgcggacgtggtagatcttaactggtcccctgatgattcaacattggctagtggtagcttggataatactgttcacatatggaacataaccaatggtatgtgcactgccgtcttgagagggcattccagcttggtcaagggtgttacctgggatcctattggctctttcatcgcaagccaatcagatgataagaccgttataatatggcgtacaagtgactggagtcttgctcacaagacagaaggccattgggaaaaatctcttggttcaacattttttaggcgacttgcgtggtcaccttgtggccacttcattactacgactcatggcttccagaaacctaggcattcagcccctgtgcttgaaagaggcgagtggtctgctacatttgactttctaggacataacgcacctatcgtggtggttaagtttaataactcaatgttccgtaagagtttctccaatggtcaagacacaaaagctgcaccagctggatgggccaatgggacatcaaagatatcatcaaaagaacagcaaccatataatgttattgctattggaagtcaggacagaacaattactgtttggacaacagcgagtgcacggccattgttcgttgctaagcattttttctctcaaagcgtggttgatttatcttggagccctgatggttattcactttttgcatgctccttggatggatctgttgccaacttccactttgaagcaaaggagcttggatacaagttaagtgattctgatctggatgaattgaagaggagcagatatggtgatgttagaggacggcaatcaaatctggctgaaagccctgcacagttactgctagaagaagcatcagcaaagcaatcggctagcaaaaaagggactccgattgtccagcaatttcaagcaccccaaaaactttctgcagatgtgcttaacccagctcctgttgtgcaaaatcagaaagctcctgaagctttacctgaagatgagaagaaatcatcagatcctgctgctgatggtatgaataaagttactcggttatctagtccagtgaagcagagagaataccggcgtcctgatggcaggaaaagaataatcccagaggctgttggatttccatccaaccaggataacatacccagccgttctcagaaccacgttatagatttttcatccttagatcagcgaatgaatgggataagaccatcttattgtagtagcagtaactgtaacaactctggagttaaggactgctctggtgtcacagcaagggctaacattacagaaagtcttgttattcaaaaagcttcaaccaatgctagcagtgatggaaggctgactgtagaacgcactggatctgttgttccaggctctttgaactgccctgcactttctatacatgtattagataagaaagacaatgaggattccttgccagtctgccttgaggcaaatcctgtagaacacgctgcaggtgatatgaatggtgtcggtggtgccttttcaacaaaaggaacagaaataaggtgtacaagaggaacagaaactctttggttggatcgtatatctgcaaaggttactgccttggcaggcaatacaaatttctgggctgttggctgtgaagatggttacctgcaggactcattggctgctttggttgcatctccagatgagtcatcagcaaatcatgcaggtgcagtaaaggttatatctgctaaattctcaagatgtggttttcccttagttgtccttgccagccgtcatgcttttctttttgacatgagcatgaagtgctggttaaggattgctgatgattgttttccggcatcaaattttgccagctcatttatttttccccaagctggagagctaggcaagttgcagattgatgtaggcaagtttatggctagaaagcctatatggagcagggttacagatgatggtttgcagacacgtgcccatttagagacccagttggcagcttctttggctttgaagtcaccacaggagtaccgccaatgcctcctatcctacatacggtttctggcaagagaagcagatgaatcccgtctacgtgaggtttgtgagagcttcctaggtcctcccatgggcatgcttggatctgagtcatctacggatcccaaaagtccagcgtgggattctgatgttctcgggatgaagaagcaccaactcctcagggaagacatacttccatcgatggcatctaaccggaaagtccagcgtctgctcaacgagtttatggatctcctatcagagtatgaagctgctaagagcaaagttgacccaatggatatcacaccggcgctaccacaacaagcaccagaagccaatgccaacgtggtcacctcgtagctgcaccagttccgttgatagttccgttgctggcgacttactgacctctcggtaagtatgataggatagcaatcttggtaagtccttatatgaatcaatcaattagttgtgcttgtaactggtagattgtttagcgagggaggcgacctcaggcaaacattgatattgaacccgttagctgtaacgctgtgtaacagtagaagaaagaagctgaggtcgccaggtaatttattgttaaactgtaggaggccgggtaaactcatgcccttcttgttccaagctaccgtatgcagtggtggcccactggccgtgtgtattttggcgaaaacctgcgtcgtcaaaactggcattgacatcttttagaggaacaggaacaatgagcatttcggcggtgatgattgagcgggcacgccataaacatgtgatttggataattctttatgtagagcggcttttatatgtgtaaacagaaacagaaaatggtggcttaatccaatcgtcagttggagaggaaccg

SEQ ID NO: 200571 - DNA, 3418 bp, Zea Mays
gagagccgtctcactaagtcaggccgtggcttcgaagcagcttctccgcatgtgtgggggagacttgcctcgggttattccttcccaaaccccactcatgttcgaatatggagcatgaaatctgtggacaagaataataatcacaatgattccagccaagggttgctagctacaatgcgtgaccattttggatcggtaaactgtgtgagatgggcaaggcatggccgctatctggcttctggatcagatgatcaggttatcctaattcatgagagaaaagctggttctggaacatctgagtttggtagtggggaacctccagatgtggaaaattggaaggttattatgaccttaagagggcatactgcggacgtggtagatcttaactggtcccctgatgattcaacattggctagtggtagcttggataatactgttcacatatggaacataaccaatggtatgtgcactgccgtcttgagagggcattccagcttggtcaagggtgttacctgggatcctattggctctttcatcgcaagccaatcagatgataagaccgttataatatggcgtacaagtgactggagtcttgctcacaagacagaaggccattgggaaaaatctcttggttcaacattttttaggcgacttgcgtggtcaccttgtggccacttcattactacgactcatggcttccagaaacctaggcattcagcccctgtgcttgaaagaggcgagtggtctgctacatttgactttctaggacataacgcacctatcgtggtggttaagtttaataactcaatgttccgtaagagtttctccaatggtcaagacacaaaagctgcaccagctggatgggccaatgggacatcaaagatatcatcaaaagaacagcaaccatataatgttattgctattggaagtcaggacagaacaattactgtttggacaacagcgagtgcacggccattgttcgttgctaagcattttttctctcaaagcgtggttgatttatcttggagccctgatggttattcactttttgcatgctccttggatggatctgttgccaacttccactttgaagcaaaggagcttggatacaagttaagtgattctgatctggatgaattgaagaggagcagatatggtgatgttagaggacggcaatcaaatctggctgaaagccctgcacagttactgctagaagaagcatcagcaaagcaatcggctagcaaaaaagggactccgattgtccagcaatttcaagcaccccaaaaactttctgcagatgtgcttaacccagctcctgttgtgcaaaatcagaaagctcctgaagctttacctgaagatgagaagaaatcatcagatcctgctgctgatggtatgaataaagttactcggttatctagtccagtgaagcagagagaataccggcgtcctgatggcaggaaaagaataatcccagaggctgttggatttccatccaaccaggataacatacccagccgttctcagaaccacgttatagatttttcatccttagatcagcgaatgaatgggataagaccatcttattgtagtagcagtaactgtaacaactctggagttaaggactgctctggtgtcacagcaagggctaacattacagaaagtcttgttattcaaaaagcttcaaccaatgctagcagtgatggaaggctgactgtagaacgcactggatctgttgttccaggctctttgaactgccctgcactttctatacatgtattagataagaaagacaatgaggattccttgccagtctgccttgaggcaaatcctgtagaacacgctgcaggtgatatgaatggtgtcggtggtgccttttcaacaaaaggaacagaaataaggtgtacaagaggaacagaaactctttggttggatcgtatatctgcaaaggttactgccttggcaggcaatacaaatttctgggctgttggctgtgaagatggttacctgcaggtttacacaaaatgtggaagacgagccatgccggcaatgatgatgggatctgcagctgtttttatagactgtgatgactgctggaaattgcttcttgtcacaagaagaggtttaatgtatatatgggacctccataacaggacctgcattttgcaggactcattggctgctttggttgcatctccagatgagtcatcagcaaatcatgcaggtgcagtaaaggttatatctgctaaattctcaagatgtggttttcccttagttgtccttgccagccgtcatgcttttctttttgacatgagcatgaagtgctggttaaggattgctgatgattgttttccggcatcaaattttgccagctcatttatttttccccaagctggagagctaggcaagttgcagattgatgtaggcaagtttatggctagaaagcctatatggagcagggttacagatgatggtttgcagacacgtgcccatttagagacccagttggcagcttctttggctttgaagtcaccacaggagtaccgccaatgcctcctatcctacatacggtttctggcaagagaagcagatgaatcccgtctacgtgaggtttgtgagagcttcctaggtcctcccatgggcatgcttggatctgagtcatctacggatcccaaaagtccagcgtgggattctgatgttctcgggatgaagaagcaccaactcctcagggaagacatacttccatcgatggcatctaaccggaaagtccagcgtctgctcaacgagtttatggatctcctatcagagtatgaagctgctaagagcaaagttgacccaatggatatcacaccggcgctaccacaacaagcaccagaagccaatgccaacgtggtcacctcgtagctgcaccagttccgttgatagttccgttgctggcgacttactgacctctcggtaagtatgataggatagcaatcttggtaagtccttatatgaatcaatcaattagttgtgcttgtaactggtagattgtttagcgagggaggcgacctcaggcaaacattgatattgaacccgttagctgtaacgctgtgtaacagtagaagaaagaagctgaggtcgccaggtaatttattgttaaactgtaggaggccgggtaaactcatgcccttcttgttccaagctaccgtatgcagtggtggcccactggccgtgtgtattttggcgaaaacctgcgtcgtcaaaactggcattgacatcttttagaggaacaggaacaatgagcatttcggcggtgatgattgagcgggcacgccataaacatgtgatttggataattctttatgtagagcggcttttatatgtgtaaacagaaacagaaaatggtggcttaatccaatcgtcagttggagaggaaccg

SEQ ID NO: 200572 - DNA, 1090 bp, Zea Mays
atgtctattgtgccttgtgatgtgtgtgtctgtgaattctcaatggatcgtgacccatgggcaaaattccgacgcccaaacagtgagcacccagcccaatcagaggagacacgcacgcaccagcaccctggtgtggccggtgcccggcggccaaacgcgatgccatctccgtctccagccccgccgccagtgctgccgatctcggagcacgaggacgagatagtcgccgcggtggacgcgaacccagtggtggtggtcatcggcgagactggctccggcaagagcactcagctctcccagatcctccaccgccgcggatacacccgtcggggtgccatcgctgtcacccagccccgccgcgttgctgcggtttccgtttccagaagagtagctcaagagcttggtgttccacttggggatgaagttggttatgcaattcgatttgaggacagaacttcagaaagaacatgcataaaatacctcacagacggcattcttctccgtgaaagcctttcaaatcctgagttgaagcagtactcagtaatcatactggatgaagctcacgagcgtagcttaaacactgatatccttttaggtttgatgaaaagattgatcaaggaccgagcttcagatttaaaagttttaatcacctctgcgactcttgacggtttaaaagtttcaaagttcttctcaggatgccctgtgttaaacattcctggaactttattccctgtggagaaattttacagcactgatcgcccaacaaattatatagaatcttcactcagaacagctatagatatccatgccaaggaacctcctggagatgtcttaatatttatgacaggaaaggatgatattgacaagatggtatcaaaattggaggaaagaattcgaaatcttgaggagggctcctgcatcgatgctcttgtccttcctcttcatggttctttgccacctgagctgcaggttagagtatttgctccagcacctccaaactgccgacgcttcattgttgcaacaaatgttgctgaaacttcgctgactgtagatggtgtcgtgtaagaagcaaacacaatcagagaagagt

SEQ ID NO: 200573 - DNA, 1521 bp, Zea Mays
gccgcggcagaggcgacgcgggagctgcaggaggcggccgcggccctcgtcgcaacccgcgccgccgaggaggacgcgctgcgccgcagcgtcgtggcgctggacaccgacgtccgccgcctccagggctcgctccacctcgacccctccacgctcgacaaggaaaatcagatgccaatgaaattacaacagcaagaatcagcagtggaacaacagcaagggggagaggaaaagctccccgaaaatctcctcctctactttgagcaaatcctccacgatgacccactcatcgatgaggtggggttcttgcacccaacacaattctgctcactagattgcgcccgagatggtgactccgcttcacaatctacagagttccattgcgcaagatacttctggtgcagagaccacaagcttgccatctccgccgagatcctccccgagctttaccatgctgctcgggatgcctactacaacgcaagggatgccccactatcgcgcactaatctcatgaggcacaccaaggcactgctcatactttgtcctgacctactcactgcatggaactccaggaaaatggtgctatcagcgttgtatgatttcacaaagctcaaggatgaactgcaattgtgtgccttgatcctttcctactctccaaagaacgagagcacatggagccataggagatgggtgataaaacaagttgctgagcaacatcaagatatgttggagcttatagggaatgaatccatactggtcaaagagatagcagagaaatcgaaaatgaactatcgtgcatggaggcatcgatgttggcttattccttacatgacaaggaaacaagtgctggatgaactgaatgagtcaacaagatggagtgagctacatgttgctgacaactgctgcttccactatcgaagatctttgctgcttgcgctactagacaacttctttgggaatgaagaggattcccttagttgggagtcagatatttgcttgctatggaaggaggagcttaggtgggatgagatgctgatcaaacgctaccaggggagagagtcgttatggaaccaccgtcggttcctttcacacttgtggatacaacacttgctcactgttgaaggaaactggcccgcaacgacatcccagatggatatgtttgtcatccaggagatacaactgctgtcagagtgcctgcatgatcctgtggatgagtttgaggagtcgcgtgtccaagcagagctttcagcgctctacattatgtggataacaaagcaagtcccggatgtgaaggggaagctggaagagaggttgcattttgcctccatggggaggctgaaggacgtgctggcaggagcctgcaggccagagaagaggttttggatgaatttgctcaacctggctgatcaatccagtgacgtacaataatacatgacctttcttgttgagtttgagccgtcaacatacatgacatggacgccaagctcttgcttcaggtcctgtctcccggatttctgccaa

SEQ ID NO: 200574 - DNA, 1312 bp, Zea Mays
cgcctccagggctcgctccacctcgacccctccacgctcgacaagatgccaatgaaattacaacagcaagaatcagcagtggaacaacagcaagggggagaggaaaagctccccgaaaatctcctcctctactttgagcaaatcctccacgatgacccactcatagttccattgcgcaagatacttctggtgcagagaccacaagcttgccatctccgccgagatcctccccgagctttaccatgctgctcgggatgcctactacaacgcaagggatgccccactatcgcgcactaatctcatgaggcacaccaaggcactgctcatactttgtcctgacctactcactgcatggaactccaggaaaatggtgctatcagcgttgtatgatttcacaaagctcaaggatgaactgcaattgtgtgccttgatcctttcctactctccaaagaacgagagcacatggagccataggagatgggtgataaaacaagttgctgagcaacatcaagatatgttggagcttatagggaatgaatccatactggtcaaagagatagcagagaaatcgaaaatgaactatcgtgcatggaggcatcgatgttggcttattccttacatgacaaggaaacaagtgctggatgaactgaatgagtcaacaagatggagtgagctacatgttgctgacaactgctgcttccactatcgaagatctttgctgcttgcgctactagacaacttctttgggaatgaagaggattcccttagttgggagtcagatatttgcttgctatggaaggaggagcttaggtgggatgagatgctgatcaaacgctaccaggggagagagtcgttatggaaccaccgtcggttcctttcacacttgtggatacaacacttgctcactgttgaaggaaactggcccgcaacgacatcccagatggatatgtttgtcatccaggagatacaactgctgtcagagtgcctgcatgatcctgtggatgagtttgaggagtcgcgtgtccaagcagagctttcagcgctctacattatgtggataacaaagcaagtcccggatgtgaaggggaagctggaagagaggttgcattttgcctccatggggaggctgaaggacgtgctggcaggagcctgcaggccagagaagaggttttggatgaatttgctcaacctggctgatcaatccagtgacgtacaataatacatgacctttcttgttgagtttgagccgtcaacatacatgacatggacgccaagctcttgcttcaggtcctgtctcccggatttctgccaa

SEQ ID NO: 200575 - DNA, 2030 bp, Zea Mays
ctactagcgaggggcataaccgtctcacgcgtggaacgggccgttgccggccgcgccgtctcacgcgcccgcccctttctgcagctcggcccggacggcggagcacggcacggcacgagaggcccccacgacgagaccccccgtcccgtctggccgtttccccctctccgcaccgcactcggcactccactctcctccccctgaccccgagttgagtccactctgctgtccgctcacaccaactcctccatccaactcggcaactccacgcagccagcccggcgcctcccatcagtgggtgggtggggcggaggttggtaggccgggacgtgccggcaggcggttacgggaggcgcggccgcgatcccgggccggatctggacgccgcgatggaggacgccgttgccgctgagaatgggatcgagggggagggctacgtcgtcgtcaaggcggcggcggccgcggaggcggagggggactccggcgccagcgatcgtggggatctcgccgcccccgctgaggacgcggcgccggccggatctgaggacgccccggccccggcggtgacgccggacgagaccgcggcacctgccaaggcgccggccaagaagggtggatccggggacgccgccggggtccggaaggcgaggccgcagaacggcagggtgcccgccgccgccgccgccgcgccgagggtgaagaagcccggggtcctctcgcagagcgcctccttcccggcgcggggtgccgccgccaagaaggcctcggcggttgctactcccaagcaggccaagggcgtcgtgaccaatggatcagaggcggcagcaggccgggcagccgagaagaaggcgaattcagcgcggacacctgtcgctcgccggtcgatgcctgtcaagtctggatcagcggatgcggccgccccaaatgacgcaattcccgctgtccaagagccacatgaaaacaccgacaagccattgaaacaaatgcagccagggaaaacagaggatgatgtgcgctctaccacatcaagtaccaatactccgcgtgcagcagctcgcaagagtgctgctgttgctgctggttttagtttcagattggaggagcgtgctgagaagagaaaggagtttttccaaaagcttgaagagaaaatccacgcaaaggagctggaaaaaacaaatctgcaggagaaatctaaggagagccaagaggctgagatcaaactgctgaggaagagcctaacatttaaagccacacctatgccaagcttttacaaggagcagccacccaaagttgagttgaaaaagattcccccaacacgcgctaggtcgccaaagctcggccggcacaagccagccaattctgccactgctgcttctgcggatggttctgtatcatgtgagagcccacggagcactgcaaattcgagcaaggcgtctgcgaccacaaaggctgaagcaagacccgtggtcacaaggccaaagatctcaaactcgaaacctaaggcttcaagggcaaaggttgcgcgagcgcaagaaaccccagctgaagcccctccttcagaacctgctgctccagaagatttcacggttgaacatggcgttggagacgccacaggtcctgatctgaccgcgcaattggttgcttcgaacgaagtcccagtccatggttgatcagctgagcattttgcatatttattcccttcttgcagttctgtgaatagcgagggtgtgtgcttcattggaagttgaatcgctcgaagtgtcatggtttatcgtttccggagtagacatccattttgtttttcagcttgtcatcgggcatgccatgtatattgcttggtattgtgttcttgtttaaaatttccagtcttgtgtatattggatttgtttgtcgctggagatcctaggattgttgcaatacgctgaggcaaattgtggattgttttgtggctgttttacttttagccccgccgccattcttgttggttgtacatacttaggggctgtttcgttgtatacttgaggtgccag

SEQ ID NO: 200576 - DNA, 1933 bp, Zea Mays
ccgagttgagtccactctgctgtccgctcacaccaactcctccatccaactcggcaactccacgcagccagcccggcgcctcccatcagtgggtgggtgggtggttcgcctcctcatcctctcctccccgcacgtccacggcgatggcgcccgcgcccccgcactgctgacccacccccgccgcgcactctcatgaccgtggtttggtaggtggggcggaggttggtaggccgggacgtgccggcaggcggttacgggaggcgcggccgcgatcccgggccggatctggacgccgcgatggaggacgccgttgccgctgagaatgggatcgagggggagggctacgtcgtcgtcaaggcggcggcggccgcggaggcggagggggactccggcgccagcgatcgtggggatctcgccgcccccgctgaggacgcggcgccggccggatctgaggacgccccggccccggcggtgacgccggacgagaccgcggcacctgccaaggcgccggccaagaagggtggatccggggacgccgccggggtccggaaggcgaggccgcagaacggcagggtgcccgccgccgccgccgccgcgccgagggtgaagaagcccggggtcctctcgcagagcgcctccttcccggcgcggggtgccgccgccaagaaggcctcggcggttgctactcccaagcaggccaagggcgtcgtgaccaatggatcagaggcggcagcaggcagccgagaagaaggcgaattcagcgcggacacctgtcgctcgccggtcgatgcctgtcaagtctggatcagcggatgcggccgccccaaatgacgcaattcccgctgtccaagagccacatgaaaacaccgacaagccattgaaacaaatgcagccagggaaaacagaggatgatgtgcgctctaccacatcaagtaccaatactccgcgtgcagcagctcgcaagagtgctgctgttgctgctggttttagtttcagattggaggagcgtgctgagaagagaaaggagtttttccaaaagcttgaagagaaaatccacgcaaaggagctggaaaaaacaaatctgcaggagaaatctaaggagagccaagaggctgagatcaaactgctgaggaagagcctaacatttaaagccacacctatgccaagcttttacaaggagcagccacccaaagttgagttgaaaaagattcccccaacacgcgctaggtcgccaaagctcggccggcacaagccagccaattctgccactgctgcttctgcggatggttctgtatcatgtgagagcccacggagcactgcaaattcgagcaaggcgtctgcgaccacaaaggctgaagcaagacccgtggtcacaaggccaaagatctcaaactcgaaacctaaggcttcaagggcaaaggttgcgcgagcgcaagaaaccccagctgaagcccctccttcagaacctgctgctccagaagatttcacggttgaacatggcgttggagacgccacaggtcctgatctgaccgcgcaattggttgcttcgaacgaagtcccagtccatggttgatcagctgagcattttgcatatttattcccttcttgcagttctgtgaatagcgagggtgtgtgcttcattggaagttgaatcgctcgaagtgtcatggtttatcgtttccggagtagacatccattttgtttttcagcttgtcatcgggcatgccatgtatattgcttggtattgtgttcttgtttaaaatttccagtcttgtgtatattggatttgtttgtcgctggagatcctaggattgttgcaatacgctgaggcaaattgtggattgttttgtggctgttttacttttagccccgccgccattcttgttggttgtacatacttaggggctgtttcgttgtatacttgaggtgccag

SEQ ID NO: 200577 - DNA, 3536 bp, Zea Mays
caaccttcaccccaccccgcccaacaaaaaagcatatacgttaaataaaataaattagaaagctatctatccaggtggattagggtttttgcctcggctagcagtagtagctaatttggacgcaggagatacggagtagggcgaaccgcgaggagagcaagctatgggcgcgccgaagcagaagtggacgtcggaagaggaggatgcgctccgccgtggcgttcgcaagcacggcgccggcaaatggcggaccatccagaaggacccccagttcagcccgatcctctcctcccgctccaatatcgacctcaaggacaaatggaggaatttaagtttcagtgcaagtggactgggatcgagtaaagtacgggttccaaagataactggatcctcatcttcaccatcatctagctcacaggctctgcttctcccagcggcaaataatgttacagaagctatgctgcctgcagatgctgacaaaaagccacgggatgggaaaactccgccaaagtatggtgccatgattatggaagctctttcggaattgaatcagccgaatggttcagatattgatgcaatcttcgacttcataaagcaaaggcatgtggtgcaatcgacctttagaagatttctaccctcaaagttacggcgacttgcagactcaaacaaaattgaaaaggtcgataacttctataggctcccagattcatttgcaacaaggactccagctcaaataaaagtttcagatccaaaacagaaggatccatctaaggcgtcaaagaccataggcttgtttgctgcctccagccctgcactagaggcagcgatggcagctgctgtcaaggtgactgacgccgaggcaaaagcacatgatgcacatgatcagatgatggaggcagaaaggatgctgaagatggctgaggataccgagtctatcctcacaattgcagcagagatctatgatcgatgttcaaggggggagataaccacattagttccagtggcgcaaagggagttttgaaatctattggagactcttgtcttgtacatgggataggttttggaatccggaggcccttacttgggatatgccctagggttaataacaacagcgcaccgcctgtcttcagactttgtaatgatatgtaatcccatctttcccattcccagcctgtcactgcaagctgcggtcgtgaatcctgatggcagtaaagttttttttttgttgacatgacgaaagaatagagcaggaaaaagtggtttaaacagatgaggtagggtagtaggatggtaaagtgttactggtataagataatataatgtgccgcagttattttccaaatcgagaatgttgtgttctgtgagaactgttcctttgagagcactttcttgttactagtgcgacattgccgatagcctttccaacgacagagattcgaccataacagtcttctctgcatttctgttttagtaggatgatgtcaactttctagttacatagtgtttgactggtgcattgccatattataagtgtatctgaatcaagtatcgaaagtactatgttggccctgcttaaaatgttacttatgtttttatcgatcgatcgatcaccaccatggttacgagtaaacatcttatgcttacgattttataatcttggtgaaaaagaacttacagcagtaacgcatttgttttttctgctggagtgctgatgagggcgcttcgctaattgctacgcttacgaggagaggagcccacaagacgagatctacccgctgccccctcgcaacgcattcccctcccccgcgtcgtcatctccccaaatccccccaaaccctaccgccgatccgggcccagatcgccatggccgcgcccaacagcaatgacgccgccagcgccagcggcaccggcccggctggcgaggaggacatctccatcgaggcgttggcgcggcgcgtgcaagagcacatgaccctcaactcgaaccccgccgctcgccgccacaagttctgggagacacagcccgtcggccagttccgtgacgccgccgacgcatcgctaccgaacggccccatcgagccgcccacgccactctccgaggtgcgcgccgacccctacccgctgcccgccgccttcgagtggctcacctgcgacctcgatgacgacgcgctcctcgccgacctctactcgttgctcgcccacaactacgtcgaggatgacgagaacatgttccgcttcaactactccccggccttcctccgctgggcgctcaagccgccgtccttcttccgggcctggcacatcggcgttcgcgccaaggagtccaagaagctcgtcgccttcatctcgggcgtccccgcccgcatccgcgcccgcgacgacgtcgtccgcatggccgagatcaactttctctgcgtccacaagaagctccgatccaagcgcctggcacccgtgctcatccgggaggtcacccgccgcgtccaccaggagaacatctggcaggctgcatacaccgcggggatcgtcctcccaacccccatcaccacctgccgctactggcaccgatccctcaaccccaagaagcttatcgatgttggattctctcgccttggtccgcgcatgactatgagccgcacggtccggctatacaagctgcctgatgcgccgctcacccctgggtttcgcaggatggagctgcgggatgtcgctgcggtcacacggctgctgagggcataccttgcgaggtttgtggtagcaccggattttgatgaggtagatgtggagcactggttgctgccccaagaggatgtggtggacagctaccttgtggagagccctgagacgcatgagctgatgaatgatgctcttattgttgccaaacggaacaattatgatgtgttcaatgctctcgatgtcatggagaatgagtcattcctcaaggagctcaagtttggtcctggagatgggcagctccactattacctctacaattaccgtattcgcaatggcatcaagccctctgagcttggtcttgtgctgttatagggcagtctaatcaggacagtcctgagtttacaccttccagttccaagctgtgctgatggtctgttgaatataaatgtgaatcgatatctgcacatgtaaggaatctaaaagcaggcgtgcagtgcagcaaaccctgatgttcatccattcattatccaatttgtatgccggcatgttcaagagatagcttaagttattgcatccccagctgagcagagggcaagtcagttgttattgtgtgctcgctcagtcgctccgttccaaataaaatttgttttagttaattaataggttcatataatttttgatgtatatgttttatatatgtctagattcatcatcatctatttgaatatatacataaaaataagagctaaacgaggaagaaagtattattttgaggttgccaatttgggcttatattcttggaacaacgatgccatgcacttgactatctaaccacgtaaatggaccatatatgtggtagggct

SEQ ID NO: 200578 - DNA, 4259 bp, Zea Mays
cttcaccccaccccgcccaacaaaaaagcatatacgttaaataaaataaattagaaagctatctatccaggtggattagggtttttgcctcggctagcagtagtagctaatttggacgcaggagatacggagtagggcgaaccgcgaggagagcaagctatgggcgcgccgaagcagaagtggacgtcggaagaggaggatgcgctccgccgtggcgttcgcaagcacggcgccggcaaatggcggaccatccagaaggacccccagttcagcccgatcctctcctcccgctccaatatcgacctcaaggacaaatggaggaatttaagtttcagtgcaagtggactgggatcgagtaaagtacgggttccaaagataactggatcctcatcttcaccatcatctagctcacaggctctgcttctcccagcggcaaataatgttacagaagctatgctgcctgcagatgctgacaaaaagccacgggatgggaaaactccgccaaagtatggtgccatgattatggaagctctttcggaattgaatcagccgaatggttcagatattgatgcaatcttcgacttcataaagcaaaggcatgtggtgcaatcgacctttagaagatttctaccctcaaagttacggcgacttgcagactcaaacaaaattgaaaaggtcgataacttctataggctcccagattcatttgcaacaaggactccagctcaaataaaagtttcagatccaaaacagaaggatccatctaaggcgtcaaagaccataggcttgtttgctgcctccagccctgcactagaggcagcgatggcagctgctgtcaaggtgactgacgccgaggcaaaagcacatgatgcacatgatcagatgatggaggcagaaaggatgctgaagatggctgaggataccgagtctatcctcacaattgcagcagagatctatgatcgatgttcaaggggggagataaccacattagttccagtggcgcaaagggagttttgaaatctattggagactcttgtcttgtacatgggataggttttggaatccggaggcccttacttgggatatgccctagggttaataacaacagcgcaccgcctgtcttcagactttgtaatgatatgtaatcccatctttcccattcccagcctgtcactgcaagctgcggtcgtgaatcctgatggcagtaaagttttttttttgttgacatgacgaaagaatagagcaggaaaaagtggtttaaacagatgaggtagggtagtaggatggtaaagtgttactggtataagataatataatgtgccgcagttattttccaaatcgagaatgttgtgttctgtgagaactgttcctttgagagcactttcttgttactagtgcgacattgccgatagcctttccaacgacagagattcgaccataacagtcttctctgcatttctgttttagtaggatgatgtcaactttctagttacatagtgtttgactggtgcattgccatattataagtgtatctgaatcaagtatcgaaagtactatgttggccctgcttaaaatgttacttatgtttttatcgatcgatcgatcaccaccatggttacgagtaaacatcttatgcttacgattttataatcttggtgaaaaagaacttacagcagtaacgcatttgttttttctgctggagtgctgatgagggcgcttcgctaattgctacgcttacgaggagaggagcccacaagacgagatctacccgctgccccctcgcaacgcattcccctcccccgcgtcgtcatctccccaaatccccccaaaccctaccgccgatccgggcccagatcgccatggccgcgcccaacagcaatgacgccgccagcgccagcggcaccggcccggctggcgaggaggacatctccatcgaggcgttggcgcggcgcgtgcaagagcacatgaccctcaactcgaaccccgccgctcgccgccacaagttctgggagacacagcccgtcggccagttccgtgacgccgccgacgcatcgctaccgaacggccccatcgagccgcccacgccactctccgaggtgcgcgccgacccctacccgctgcccgccgccttcgagtggctcacctgcgacctcgatgacgacgcgctcctcgccgacctctactcgttgctcgcccacaactacgtcgaggatgacgagaacatgttccgcttcaactactccccggccttcctccgctgggcgctcaagccgccgtccttcttccgggcctggcacatcggcgttcgcgccaaggagtccaagaagctcgtcgccttcatctcgggcgtccccgcccgcatccgcgcccgcgacgacgtcgtccgcatggccgagatcaactttctctgcgtccacaagaagctccgatccaagcgcctggcacccgtgctcatccgggaggtcacccgccgcgtccaccaggagaacatctggcaggctgcatacaccgcggggatcgtcctcccaacccccatcaccacctgccgctactggcaccgatccctcaaccccaagaagcttatcgatgttggattctctcgccttggtccgcgcatgactatgagccgcacggtccggctatacaagctgcctgatgcgccgctcacccctgggtttcgcaggatggagctgcgggatgtcgctgcggtcacacggctgctgagggcataccttgcgaggtttgtggtagcaccggattttgatgaggtagatgtggagcactggttgctgccccaagaggatgtggtggacagctaccttgtggagagccctgagacgcatgaggtcacagatttctgcagcttttacacactgccctcatcagtgttgaacaatgctaactatgcgacgctcaaagcggcgtactcatattacaacgtttcaaccaaaactccattgcagcagctgatgaatgatgctcttattgttgccaaacggaacaattatgatgtgttcaatgctctcgatgtcatggagaatgagtcattcctcaaggagctcaagtttggtcctggagatgggcagctccactattacctctacaattaccgtattcgcaatggcatcaagccctctgagcttggtcttgtgctgttatagggcagtctaatcaggacagtcctgagtttacaccttccaggtctcactgtgcaatcccagtggtttcctcattttgtctattgtggtagtggtttctttgatatgattgccatgcccattgatgggagtccaagatgatttgcaaacaaggagactggaattagaaatcctttccttaatttaaggttattattcccattagtgacattttgtgtgcgtggtccacaacttgtatgctggcattgattttactgagaaattttgatacaacttgtgttatcgaagttgtttgtgtgctgttgtgttatgtttgcccatgtatggctgtatggatgtcttgatgctaggacatttgccatagctctttctgccctacccaaatggtttcttttttattatgattatgagcaggttctattattagttttagtttttgtcattctttgtccacattccaaaataaccagaaatgtactgattgtggccttctgggatgtctcaactcatttgtccttttctaggttataacatcttctaaaaagtaataacccctgcttgatgtcttattgcttgcgcattactggaaatagattgattatcatgggctcatggctgtgtgggtgtcacaatcgttcgtccttttccagttccaagctgtgctgatggtctgttgaatataaatgtgaatcgatatctgcacatgtaaggaatctaaaagcaggcgtgcagtgcagcaaaccctgatgttcatccattcattatccaatttgtatgccggcatgttcaagagatagcttaagttattgcatccccagctgagcagagggcaagtcagttgttattgtgtgctcgctcagtcgctccgttccaaataaaatttgttttagttaattaataggttcatataatttttgatgtatatgttttatatatgtctagattcatcatcatctatttgaatatatacataaaaataagagctaaacgaggaagaaagtattattttgaggttgccaatttgggcttatattcttggaacaacgatgccatgcacttgactatctaaccacgtaaatggaccatatatgtggtagggct

SEQ ID NO: 200579 - DNA, 3797 bp, Zea Mays
cttcaccccaccccgcccaacaaaaaagcatatacgttaaataaaataaattagaaagctatctatccaggtggattagggtttttgcctcggctagcagtagtagctaatttggacgcaggagatacggagtagggcgaaccgcgaggagagcaagctatgggcgcgccgaagcagaagtggacgtcggaagaggaggatgcgctccgccgtggcgttcgcaagcacggcgccggcaaatggcggaccatccagaaggacccccagttcagcccgatcctctcctcccgctccaatatcgacctcaaggacaaatggaggaatttaagtttcagtgcaagtggactgggatcgagtaaagtacgggttccaaagataactggatcctcatcttcaccatcatctagctcacaggctctgcttctcccagcggcaaataatgttacagaagctatgctgcctgcagatgctgacaaaaagccacgggatgggaaaactccgccaaagtatggtgccatgattatggaagctctttcggaattgaatcagccgaatggttcagatattgatgcaatcttcgacttcataaagcaaaggcatgtggtgcaatcgacctttagaagatttctaccctcaaagttacggcgacttgcagactcaaacaaaattgaaaaggtcgataacttctataggctcccagattcatttgcaacaaggactccagctcaaataaaagtttcagatccaaaacagaaggatccatctaaggcgtcaaagaccataggcttgtttgctgcctccagccctgcactagaggcagcgatggcagctgctgtcaaggtgactgacgccgaggcaaaagcacatgatgcacatgatcagatgatggaggcagaaaggatgctgaagatggctgaggataccgagtctatcctcacaattgcagcagagatctatgatcgatgttcaaggggggagataaccacattagttccagtggcgcaaagggagttttgaaatctattggagactcttgtcttgtacatgggataggttttggaatccggaggcccttacttgggatatgccctagggttaataacaacagcgcaccgcctgtcttcagactttgtaatgatatgtaatcccatctttcccattcccagcctgtcactgcaagctgcggtcgtgaatcctgatggcagtaaagttttttttttgttgacatgacgaaagaatagagcaggaaaaagtggtttaaacagatgaggtagggtagtaggatggtaaagtgttactggtataagataatataatgtgccgcagttattttccaaatcgagaatgttgtgttctgtgagaactgttcctttgagagcactttcttgttactagtgcgacattgccgatagcctttccaacgacagagattcgaccataacagtcttctctgcatttctgttttagtaggatgatgtcaactttctagttacatagtgtttgactggtgcattgccatattataagtgtatctgaatcaagtatcgaaagtactatgttggccctgcttaaaatgttacttatgtttttatcgatcgatcgatcaccaccatggttacgagtaaacatcttatgcttacgattttataatcttggtgaaaaagaacttacagcagtaacgcatttgttttttctgctggagtgctgatgagggcgcttcgctaattgctacgcttacgaggagaggagcccacaagacgagatctacccgctgccccctcgcaacgcattcccctcccccgcgtcgtcatctccccaaatccccccaaaccctaccgccgatccgggcccagatcgccatggccgcgcccaacagcaatgacgccgccagcgccagcggcaccggcccggctggcgaggaggacatctccatcgaggcgttggcgcggcgcgtgcaagagcacatgaccctcaactcgaaccccgccgctcgccgccacaagttctgggagacacagcccgtcggccagttccgtgacgccgccgacgcatcgctaccgaacggccccatcgagccgcccacgccactctccgaggtgcgcgccgacccctacccgctgcccgccgccttcgagtggctcacctgcgacctcgatgacgacgcgctcctcgccgacctctactcgttgctcgcccacaactacgtcgaggatgacgagaacatgttccgcttcaactactccccggccttcctccgctgggcgctcaagccgccgtccttcttccgggcctggcacatcggcgttcgcgccaaggagtccaagaagctcgtcgccttcatctcgggcgtccccgcccgcatccgcgcccgcgacgacgtcgtccgcatggccgagatcaactttctctgcgtccacaagaagctccgatccaagcgcctggcacccgtgctcatccgggaggtcacccgccgcgtccaccaggagaacatctggcaggctgcatacaccgcggggatcgtcctcccaacccccatcaccacctgccgctactggcaccgatccctcaaccccaagaagcttatcgatgttggattctctcgccttggtccgcgcatgactatgagccgcacggtccggctatacaagctgcctgatgcgccgctcacccctgggtttcgcaggatggagctgcgggatgtcgctgcggtcacacggctgctgagggcataccttgcgaggtttgtggtagcaccggattttgatgaggtagatgtggagcactggttgctgccccaagaggatgtggtggacagctaccttgtggagagccctgagacgcatgaggtcacagatttctgcagcttttacacactgccctcatcagtgttgaacaatgctaactatgcgacgctcaaagcggcgtactcatattacaacgtttcaaccaaaactccattgcagcagctgatgaatgatgctcttattgttgccaaacggaacaattatgatgtgttcaatgctctcgatgtcatggagaatgagtcattcctcaaggagctcaagtttggtcctggagatgggcagctccactattacctctacaattaccgtattcgcaatggcatcaagccctctgagcttggtcttgtgctgttatagggcagtctaatcaggacagtcctgagtttacaccttccaggtctcactgtgcaatcccagtggtttcctcattttgtctattgtggtagtggtttctttgatatgattgccatgcccattgatgggagtccaagatgatttgcaaacaaggagactggaattagaaatcctttccttaatttaagttccaagctgtgctgatggtctgttgaatataaatgtgaatcgatatctgcacatgtaaggaatctaaaagcaggcgtgcagtgcagcaaaccctgatgttcatccattcattatccaatttgtatgccggcatgttcaagagatagcttaagttattgcatccccagctgagcagagggcaagtcagttgttattgtgtgctcgctcagtcgctccgttccaaataaaatttgttttagttaattaataggttcatataatttttgatgtatatgttttatatatgtctagattcatcatcatctatttgaatatatacataaaaataagagctaaacgaggaagaaagtattattttgaggttgccaatttgggcttatattcttggaacaacgatgccatgcacttgactatctaaccacgtaaatggaccatatatgtggtagggct

SEQ ID NO: 200580 - DNA, 980 bp, Zea Mays
atgttcttttgaactggtgacaaggaacgctgttcgcaattccggcgccggcaccatgagtaagctgcagagtgattctctgagggacgcgattgcctcaattaccaatgattcccgtgagaagcagcgcaaatttgttgaaaccattgagctacaaattggactgaagaactatgaccctcaaaaggacaagcgcttcagcggttctgttaagctgcctcacatccctcgccctaagatgaaggtttgcatgcttggtgatgctcagcatgttgaggagagagaataggtatagacaatatggatgtggaagccctcaagaagatgaacaaaaacaagaagctagtgaagaagctggcaaagaagtaccatgctttccttgcatctgaggctatcattaagcaaattcctcgtcttcttggtcctggtcttaacaaggcaggaaaattccctaccttggtgacacaccaggaatcccttgagtccaaggttaatgagacaaaggctacagttaagttccagctgaagaaggtgctttgcatgggtgttgctgttggcaactgcggcatggatgagaagcagatcttccagaatgtgcaaatgagtgtcaacttcctcgtgtcgctcttgaaaaagaattggcagaatgtgagatgcttgtacctgaagagcactatgggaaaggtgtaccggctgttctaaattttccaattaggcttagaatttccaggagactcgagtgcttggacacttgccattttccctaccatccatttttttgagcaactatggattatctagttacaaacttggtcttgtacttgatgttttgttcttgataccgaacctatgacattgttaccttatttcaatgtttctctcgtcacccacaggccgggggctacgatgtccttgagtcctatccgtacggtagcctagttttttgccctgcttgcttaacagcatccattggaattgga

SEQ ID NO: 200581 - DNA, 1305 bp, Zea Mays
gcttcgagctctggcagtctggcacaccgcactctgccacaggtccacgcttccaccagcccactccccgtcgccgacctcacccccctcatggacggtggccgagccgcagccgtcggcggcgacccctctcccatcgctgctccttccaatcccccggcgctgagcagccggcccgtcgatgtctcctcgttcacccataccccgtgctactgcgaagaaaatgtttacatgttatgtaacgagcttattagaaccggagtggctgatcctgcgggcactgatctttatgttgttttcatatccaacgaggaaaaaaaggttcctctctggcatcagaaagcaggccattctgatgatggatttatttgctgggattatcacgtgatatgcatccagtgtttcatggtacttcttgatgtgcatatggaagtctaggcgaagcaaagaagttcttgattttgtttgggatctggactccgatcttcctttcccttccccattgatccaatatgtttctgaggcgattcaaccactatcattcggcaattccagatatgcaagactcttccgtgtggttcatgctcctgtgtttcttcaatcgtttgcctcagacagaagccatatgaaggatcctgaggggaactggattcagttacccccaaaatatgaaccgatcgtggctgaagatggaaccaccaataacctcaatgagtacatcatgatgtctgtgggggacgtggcagacagagaaaggatggctaatgatgtttactgcaacaagcatggtgtggtgctaaatgaaacgatcttccctgaattcttcgcccagctgcctgctccacatacttagcaagcgatctttctgttgtgatgggttactctgtacacttcaatagtgcactcacaagattatgaattaaaatatatgggcactattggacacatggtgcctctaagtagcgtttcagatagatcctggcctgttttggaaagcaaaatgtggggatctcatagttctgttagcctagacatctgaaagcttcatcttgtcccaaataatgatgactaggtcatgtttaacggctttagctttctttggtcattgttcgtcgaaacttatatgaacataacacttctatgtgctcgttgttaccttacaagtaaatatgcaacccataaactttaaacttgcaggctgtcgcacctttttgctcttgctcttacgctcattctggatccttagaattaaaaactattctaataatcataatttagatgtaaatcaattgttgtattgagaat

SEQ ID NO: 200582 - DNA, 1104 bp, Zea Mays
gcaaaatgcaggggcgaagaaaatgtttacatgttatgtaacgagcttattagaaccggagtggctgatcctgcgggcactgatctttatgttgttttcatatccaacgaggaaaaaaaggttcctctctggcatcagaaagcaggccattctgatgatggatttatttgctgggattatcacgtgatatgcatccagtgtttcatggtacttcttgatgtgcatatggaagtctaggcgaagcaaagaagttcttgattttgtttgggatctggactccgatcttcctttcccttccccattgatccaatatgtttctgaggcgattcaaccactatcattcggcaattccagatatgcaagactcttccgtgtggttcatgctcctgtgtttcttcaatcgtttgcctcagacagaagccatatgaaggatcctgaggggaactggattcagttacccccaaaatatgaaccgatcgtggctgaagatggaaccaccaataacctcaatgagtacatcatgatgtctgtgggggacgtggcagacagagaaaggatggctaatgatgtttactgcaacaagcatggtgtggtgctaaatgaaacgatcttccctgaattcttcgcccagctgcctgctccacatacttagcaagcgatctttctgttgtgatgggttactctgtacacttcaatagtgcactcacaagattatgaattaaaatatatgggcactattggacacatggtgcctctaagtagcgtttcagatagatcctggcctgttttggaaagcaaaatgtggggatctcatagttctgttagcctagacatctgaaagcttcatcttgtcccaaataatgatgactaggtcatgtttaacggctttagctttctttggtcattgttcgtcgaaacttatatgaacataacacttctatgtgctcgttgttaccttacaagtaaatatgcaacccataaactttaaacttgcaggctgtcgcacctttttgctcttgctcttacgctcattctggatccttagaattaaaaactattctaataatcataatttagatgtaaatcaattgttgtattgagaat

SEQ ID NO: 200583 - DNA, 1076 bp, Zea Mays
ctcatgtgggctccaccagcactgccgaagaaaatgtttacatgttatgtaacgagcttattagaaccggagtggctgatcctgcgggcactgatctttatgttgttttcatatccaacgaggaaaaaaaggttcctctctggcatcagaaagcaggccattctgatgatggatttatttgctgggattatcacgtgatatgcatccaggcgaagcaaagaagttcttgattttgtttgggatctggactccgatcttcctttcccttccccattgatccaatatgtttctgaggcgattcaaccactatcattcggcaattccagatatgcaagactcttccgtgtggttcatgctcctgtgtttcttcaatcgtttgcctcagacagaagccatatgaaggatcctgaggggaactggattcagttacccccaaaatatgaaccgatcgtggctgaagatggaaccaccaataacctcaatgagtacatcatgatgtctgtgggggacgtggcagacagagaaaggatggctaatgatgtttactgcaacaagcatggtgtggtgctaaatgaaacgatcttccctgaattcttcgcccagctgcctgctccacatacttagcaagcgatctttctgttgtgatgggttactctgtacacttcaatagtgcactcacaagattatgaattaaaatatatgggcactattggacacatggtgcctctaagtagcgtttcagatagatcctggcctgttttggaaagcaaaatgtggggatctcatagttctgttagcctagacatctgaaagcttcatcttgtcccaaataatgatgactaggtcatgtttaacggctttagctttctttggtcattgttcgtcgaaacttatatgaacataacacttctatgtgctcgttgttaccttacaagtaaatatgcaacccataaactttaaacttgcaggctgtcgcacctttttgctcttgctcttacgctcattctggatccttagaattaaaaactattctaataatcataatttagatgtaaatcaattgttgtattgagaat

SEQ ID NO: 200584 - DNA, 1207 bp, Zea Mays
cccgtctctgtccgccgagatattttctctcctgtgcggccactgccacccgccccgttcgttattatatatacaacaacaggctgccagtctccctcgttgacatcggttcaccgtccgcccgggtacattccgtacgtacaagaggcggtcgcgacgctctagcttgcattgcaccagcgcgcagagcggaaggaggtggaaagcgcccagagagatctcgagagagagagagaggctggtcggcacatactagttcattccgtttggatagagacgcacgcaacgcaggccaccacaacgtgaggagcgggaggaggagggagagggaggatgcaggcgcatcaccgtcagtcgtactacgcggtgctcggcgtgcagccgggcgccaccgccgccgagatccgcgccgcctaccaccgcctcgccatgaggtggcacccggacaagatcgccagcggcggcggcggcgccgatccggcgcgcgcggaggaggccaagagcaggttccagcagatacacgaggcgtaccaagtgctgtcggatgacaagaggagggcgctgtacgacgccggcatgtacgacccgctggacgacgacgacgaccaggaggacgtcgagggattccacgacttcgtgcaggagatggtctcgctcatggccagagaggagcccgtgtacagcttggccgagctgcaatccatgctggacgggatgatcaaggatttcaccgcgccacagccttggcctagcggcttctacactggtggcggtggcggtggggcgtcgtcgccgtcgccgctcggcaaaccaagcagccaagagcagagtacggcttcgtcacgcttgcatccctacgggttcggggacgcgccgtgcttcagccgcacggcgttctcacaatgatggcgatgatgaataaataaatttatacatggatcgagcttttatccttctggcagcaatgggggttttctcgctcgtggaggtggagggagagtaagaacccgtgaaagccatcgtccgccagggtcagactctgattggcagttgcaattgctttggactgcggctgcagggatgaaagaaggctcaagcaaataagggaagggcgctgacaagatttctaacaaggctgattagcccatccatcagtcattgcctactgcagatggattcagcaagcaaggaagggaatgactctgag

SEQ ID NO: 200585 - DNA, 1256 bp, Zea Mays
gtcatcagcattaccaataaggaaatttactttagaaggcttcattattgttatcaaggatctctcccaaaattgttggtgaaccgatggaagctaatagattttatgatgctgtcagttgtctgatgtcttatatgaatgataatggcggtttcgcgacatatgaactcacaagatcttatccctggttggagctgatcaatcccgctgagacctttggggatattgtgattgattacccgtatgttgaatgtacatcagcagcaattcaggccctgacatcattcaaaaaactataccctgggcaccgcaggaaagaggtggataactgtatcagcaaagcttccaatttcatcgagagtattcagaaaagcgatggttcatggtatggctcttgggccgtctgtttcacatacggcacttggtttggtgtgaagggactaattgctgctggtagaacatttgagaacagtcctgcaattagaaaggcatgcgactttctgttgtcaaaagaacttccttccggtggttggggagaaagctatttgtcatctcaagaccaggtttacaccaatctcaaaggcaaccggcctcatgcggtgaacactagttgggccatgctggcgctgattgatgcgggccaggccgagagagatccaacgcctctacaccgagcagcaaaggttttgatcaacttacaatcagaggacggagaatttcctcagcaagagatcataggagtgttcaacaagaactgcatgataagctactcccagtacaggaacatcttcccgatttgggctctgggtgagtaccggtgtcgagtcttgggggctggcaagccttggcggtgaacgggaggtgtgtgtgtgtgtgtgtcatggatcagcttttgtgagtagccatgtggaagttggaataatgtagctacgttacgttcagggggttgcgttactagtggtcctagtaataatagtgatggtgatagtaatgtactcctcattattacaatctcaaagcggttcatgccattgccatgcacatctcagatccgagtcacgcacttgagagagttcaaggattgcaagtatagttgggagaatcaaatccaatcggcttattgtctgctcatctcaggtgtcaggtcttttcagccacacacacatacacataccctgacctagagatttttgccattatgaaacattacatgttcggcttcgttgaaatgaagatgagaagggattcgacgattt

SEQ ID NO: 200586 - DNA, 2026 bp, Zea Mays
gctgcgaactccactcaaatcccaaatcaaatcaactccccagcctgaactgtcctccctggactcccctcgccattcatcaacgcccgccacagagggggatcccggcctcccggtgccgggagccaagccaagccacgcaccggccggccgcggcggatcggaaccttccccaccgctcgcccgccgcatttgaggagggcgatgtggcgcctgcggatcgcggaggggggcggggacccctggctacgcacgaagaacgcccacgtcggccgccaggtgtgggagttcgacgccgccgccgaccccgaccccgccgtcgacgccgcgcgccgcgccttcgtcgccaccaggggccacctcaagcacagcgccgacctcctcatgcgcatccagttcgccaaagaaaactcgattgagcttcaccttccaggcatcaagctcggtgagcatgaagatgtgaccgaggaagctgtgttgactacattgaaaagggcaatcagccgtttctctactctccaggcacatgatggacactggcctggggattatggtggtcctatgttccttatgccaggcttggtgcctctttcaactcttcttctatagtgatatgtttaacttgcttacttcacttggatatgcattcctacgactaaatctgtgctctgtgattaatcttgtgatatgtttaagacaaaattgtgctatcttgctttcttacatcttatgcctcatattctatatgagcacaatgttttttttttcttgcattcactgtgagtaccaatttagatgcctcatgaaataggaactagcaaattgtagcaggaatctgatttttagattacatggaagacttatgtttcatgtttcctggtttacaaaacagctactaattgtgtgtaccctttgtccagatcataacattgtatgtgactggagcactaaacactgtcttgtcattggaacaccagaaggagatccgccggtatctttataatcaccagaatgaagatggcggctggggcttgcacattgagggtccaagcaccatgttcggctcagcactgacctatgttattttgagattgcttggagagggaccagatagtggagatggagccatggagaaaggtcgaaactggatattagaccatggtggagcaacatatataacatcgtgggggaagttttggctttcggtactaggtgtatttgaatggtctggtaacaacccggtgccaccagaagtatggctactgccatatctcctcccatttcacccagggaggatgtggtgtcattgtcgaatggtgtatttgccaatgtgctacatttatgggaagaggtttgttggccgaatcacaccacttctgttggaattaaggaaggaacttttcaaagacccttacagcaagattgattgggacaaggcccgcaacctatgtgccaaggaagatctgtactacccacacccattcgttcaagatgtgttgtgggccactctccataaattcgttgaaccagttatgatgcattggcctggcagcaaattgagggagaaagctctggaaacagtcatgcaacatgttcattatgaagatgagaacactcgttatatttgcattggtcctgtaaacaaggtattgaatatgcttgcttgctggattgaagatccaaactcggaggccttcaaacttcatatcccacgagtctatgattacttgtggcttgctgaagatggcatgaagatgcagggttataatggcagccaactttgggatacagctttcacagttcaagccattgtggctaccaaccttattgaagagtttggtcctacccttaaactagcacacaactatatcaagaattcacaggttcttgatgactgccctggtgatctgaatgactggtaccgccacacatctaaaggtgcatggccattctcaactgctgatcatggttggcctatatctgattgcactgctgaaggactaaagcattctgaggaggagaggga

SEQ ID NO: 200587 - DNA, 748 bp, Zea Mays
cgggataaaagatctcacccctccagagtcccgggataattcgcttcgatccccagaggcacagacgagacgacagagatgaaggacggaacgtcgtcggggggaggggcgttcgctgcgggcagcgatccaaggcagccgtcgacggcgaagccatacgcgccgccgaagctgtcgccccaggacctacccatcgactatgcaggcttcctcgccgtcgccttcggcgtcctcggcgtcatgctccgctacaaggtgtgctcgtggatcgcaatcatcttctgcgctcagtcgttggcaaacatgaagaactttgagaacgatctgaagcagctttctatggccttcatgtttgctgttatgggtctggtgacgaactattttggccccgctcgtccaggcagtacaaagcgctaaactgcggaagaacatgtgctacattcttcataggactttttggtgcttccgatagctttgccatcggtgctgacattatgtatgtccaatttgagcaaacgtcataggggctctggttttgattcatctggttaataggagctaatagtcagctgctaaacattagctagctgataggcgaggtaaattttagctacacaaaggaagtaactgtctcagtgtcccactagccatctcatcctttctgatggctctgctcagctatgcttttgaagcagctagaacggctatttgcttattccaaattaccaaatcaaatatctgtcgaaat

SEQ ID NO: 200588 - DNA, 360 bp, Zea Mays
aaagatctcacccctccagagtcccgggataattcgcttcgatccccagaggcacagacgagacgacagagatgaaggacggaacgtcgtcggggggaggggcgttcgctgcgggcagcgatccaaggcagccgtcgacggcgaagccatacgcgccgccgaagctgtcgccccaggacctacccatcgactatgcaggcttcctcgccgtcgccttcggcgtcctcggcgtcatgctccgctacaaggtgtgctcgtggatcgcaatcatcttctgcgctcagtcgttggcaaacatgaagaactttgagaacgatctgaagcagctttctatggccttcatttcgagtaaaccctggc

SEQ ID NO: 200589 - DNA, 2734 bp, Zea Mays
gcaggatcgtttcaattcaactgagatggcaaaacttctgctcggggaaaaacagctaagaacagtcgggcggtcgggccaggcggcgtgtgagcgtgtccgagatccacaggacgcaggacgctgccgatggcgaagccgaggaaaacccgcacctcggctccagatccgcccgtagccgccgttcggcttccgtggcacacaccggcgccggcggtccccacggccgttctgatctcgctcgctgccctcctcatccgcgtgctggtttccgtgggcccctactccggtcagggtgcggcgcctaagttcggcgactatgaggcgcagcggcactggatggagctcacactccatctcacgcccgccgactggtaccgcaacacctccgacaatgaccttgcctactggggcctggactacccgcccctctccgcctaccagagcctcctccacggccgcatcatcaacacctcactccccgaggccgtcgctctccgctcctcccgtggctacgaatctatggaatcgaagttgctgatgcggtggacggtgctgtcatcggatctgttggtgttcttcccatctgctttgtggtttgtgtgggcgtacatgaaacttggagtcggtattagtggagaggagagacgggaggggtggatgtggctgctagccttggtcctgatcagtccttgcttggtattgatcgatcatggccattttcagtataattgcattagccttggacttacgctcggagcaattgctggtgttttgtcgaagaatgagcttgttggtgcatctctcttcactctcgcaatcaatcacaaacaggtttgcctcatgtctagaaaattgtgttcattcggtcattcataaactttgttaccatacatgcacaatcaatcatcctggagaattctatgtttttataaggccacgtgtttccaattacacaatgttgtgaaatagtagttcctatggtggatacttccttacttagatcaggaggttgtcactgttaatacaaagcagaccatatgatccaactgaaaaccgtgtcaacaaccagccaaattgttaattttattctttaccttttatgtttgagtcctagtaaacagtgattgacaatagactgttaagatgtgatgctggcctgtggactacctagtacctactatttttttatacattttatcctgaaataatagttaatacaatatgctatcgtaaggcatgcatatgtattggtgcagtattagttctcaaatgttgattcatacatcgtacttactggattttcagctcactcaaattggcaatagcaattgagttgggaagtgggcatcattacatcctgccaattgttttgatgaaatcatgggaaagctacaatgagacacacgcacagttgcacacatacccaatctatacatgaactttagtttattataatgtttacgacccttccaagtgactaatctaggacactttatgcccattaatacaaagagtttgttggatatggtttcgagttctaatatccaatgaccacagtcagtcagtcacaaagtttatgggaagacatggttgagatacgtggtcgccgaacatggcaggctacttgtgagagatttttacacttcaagttcaaaatgaacccgcgaacctgatgagcctgtactttgcaccagctttttttagccatcttctggggaagtgcctcaaacagaaatatcctattgtcgaagtaacaaaacttgctttcgtggtcttgggaacttttgctcttgtctggtggccatttttgcattcttatgaggctgtccaacaggttctctctcgattagctccatttgagagaggcatatatgaggattatgttgcaaacttctggtgtagtacttcagttattatcaagtggaagaaattgttcgcgataaagccattgaaacttatgagtctatctgctaccatactggctttcttgccttcattcgttcagcaagtcaagtctccaagtaatcttggcttcctttattctctgatgaacaactctttctctttctacctattctcataccaagttcatgagaaatcaattttgcttcctcttttacctgcaagtcttttagcactggaagaacctcggatgtacggatggttcgtgtactttgcccttttctcaatgtacccacttatctgccgtgatcagcttcttctacaatacatagctgttcttagcctattctttctgatatactactcacctggcggaagctacggaaagagatcaaacatttcatgcaaggcaaagttagttcttagcttgccatttttatgctcacttctacttcacattacctacctgcaaatagagcctcccaagaggtatcccttcctctttgatgcactgataatgttcgtctgtttttcacaatttgtcatcttagctgtgtacaccaactataagcaatggatgttggactcaaattctagatccataggtgtgaagaaggatctgtgattgaaaattttgactgctaattttacagagaaatccactgtccctttgtaaccttgtgtgtattcccttttaacattatttattgaatgaaatgcggtgcaaattcagacatttgtatacattcagaactggaaactactagaatttaggtgatgtagactcaacactgcttttgtggcacatgttaggatttgtgacttactg

SEQ ID NO: 200590 - DNA, 2789 bp, Zea Mays
gcaggatcgtttcaattcaactgagatggcaaaacttctgctcggggaaaaacagctaagaacagtcgggcggtcgggccaggcggcgtgtgagcgtgtccgagatccacaggacgcaggacgctgccgatggcgaagccgaggaaaacccgcacctcggctccagatccgcccgtagccgccgttcggcttccgtggcacacaccggcgccggcggtccccacggccgttctgatctcgctcgctgccctcctcatccgcgtgctggtttccgtgggcccctactccggtcagggtgcggcgcctaagttcggcgactatgaggcgcagcggcactggatggagctcacactccatctcacgcccgccgactggtaccgcaacacctccgacaatgaccttgcctactggggcctggactacccgcccctctccgcctaccagagcctcctccacggccgcatcatcaacacctcactccccgaggccgtcgctctccgctcctcccgtggctacgaatctatggaatcgaagttgctgatgcggtggacggtgctgtcatcggatctgttggtgttcttcccatctgctttgtggtttgtgtgggcgtacatgaaacttggagtcggtattagtggagaggagagacgggaggggtggatgtggctgctagccttggtcctgatcagtccttgcttggtattgatcgatcatggccattttcagtataattgcattagccttggacttacgctcggagcaattgctggtgttttgtcgaagaatgagcttgttggtgcatctctcttcactctcgcaatcaatcacaaacaggtttgcctcatgtctagaaaattgtgttcattcggtcattcataaactttgttaccatacatgcacaatcaatcatcctggagaattctatgtttttataaggccacgtgtttccaattacacaatgttgtgaaatagtagttcctatggtggatacttccttacttagatcaggaggttgtcactgttaatacaaagcagaccatatgatccaactgaaaaccgtgtcaacaaccagccaaattgttaattttattctttaccttttatgtttgagtcctagtaaacagtgattgacaatagactgttaagatgtgatgctggcctgtggactacctagtacctactatttttttatacattttatcctgaaataatagttaatacaatatgctatcgtaaggcatgcatatgtattggtgcagtattagttctcaaatgttgattcatacatcgtacttactggattttcagctcactcaaattggcaatagcaattgagttgggaagtgggcatcattacatcctgccaattgttttgatgaaatcatgggaaagctacaatgagacacacgcacagttgcacacatacccaatctatacatgaactttagtttattataatgtttacgacccttccaagtgactaatctaggacactttatgcccattaatacaaagagtttgttggatatggtttcgagttctaatatccaatgaccacagtcagtcagtcacaaagtttatgggaagacatggttgagatacgtggtcgccgaacatggcaggctacttgtgagagatttttacacttcaagttcaaaatgaacccgcgaacctgatgagcctgtactttgcaccagctttttttagccatcttctggggaagtgcctcaaacagaaatatcctattgtcgaagtaacaaaacttgctttcgtggtcttgggaacttttgctcttgtctggtggccatttttgcattcttatgaggctgtccaacagacttgtgaaacctgcttctcagttggtactgaacttatgaagtctgtaatatcaggttctctctcgattagctccatttgagagaggcatatatgaggattatgttgcaaacttctggtgtagtacttcagttattatcaagtggaagaaattgttcgcgataaagccattgaaacttatgagtctatctgctaccatactggctttcttgccttcattcgttcagcaagtcaagtctccaagtaatcttggcttcctttattctctgatgaacaactctttctctttctacctattctcataccaagttcatgagaaatcaattttgcttcctcttttacctgcaagtcttttagcactggaagaacctcggatgtacggatggttcgtgtactttgcccttttctcaatgtacccacttatctgccgtgatcagcttcttctacaatacatagctgttcttagcctattctttctgatatactactcacctggcggaagctacggaaagagatcaaacatttcatgcaaggcaaagttagttcttagcttgccatttttatgctcacttctacttcacattacctacctgcaaatagagcctcccaagaggtatcccttcctctttgatgcactgataatgttcgtctgtttttcacaatttgtcatcttagctgtgtacaccaactataagcaatggatgttggactcaaattctagatccataggtgtgaagaaggatctgtgattgaaaattttgactgctaattttacagagaaatccactgtccctttgtaaccttgtgtgtattcccttttaacattatttattgaatgaaatgcggtgcaaattcagacatttgtatacattcagaactggaaactactagaatttaggtgatgtagactcaacactgcttttgtggcacatgttaggatttgtgacttactg

SEQ ID NO: 200591 - DNA, 1200 bp, Zea Mays
cttccatcttctccaaccaagaaggaataggaggccaagagaatttctacaaccacaatgaagacgacaccaggacgatgaagtccggtcgaccggattttgtagttcctcgattgttgcttccttaggcaagttcaagaggcggggggacgcaaattcgtaagtggtggattcctctcggggcaccgcgggcgggcagccgcctgtggaacctgctaagatgaagggccttctcaagggcctccgatacatctcgcaaatttttgatgcgaaggagccggagatgcagatcgggaagccgaccgacgtgaagcacgtggcgcacatcggctgggacaacgcctccgtcaccgcgcccagctgggtagccgcttccgttccagttccacccccgaccacgccgttcccgtgctccgcgccgcgtccgaatgtccgaactccaactaacagctgcggttgggcgtgtcatgtgctgcagatggacgaattcaaggcttcgccggggacggcgagaggcagcgatcctgagccctcgcagcccggtggatcggaaggatgcggagaggagcaggccggaggaggagaagacggcggcggcaaggcggagcggccgcggagggcgagggggaacaaggggtcgggcggcaacgagccggcgaagcggcgggactgcgcggccgaggggttgcggcgcgaccggcgggtcgcgaaggcggcggacgcggcagagggcgccgagggccagggggacgccgcggcggcggcgccgaagcagcggcggaggaagccccgggcggcgtccgggggcaggtccaagtcatcgtcgggaggcgccgccgcctcggactcggcgggggcgccgccggacgaggacgatcgctgcggctgttgaaggcctgaggcgaaggaaacggtgttcgctgggaacgtacgtgtggcgtggcgcggcggcattgctagcggggccgcgcgccgatgcctgttggggttcgagtcgactggtagtggtacacacacacactgacacacggagggagtagggagggaggcatcttcaaatttgaactaggtgagtgtccgtgcgttgcaacggaaacatataatactatgatattttatgtacaaatgtccactacattgcaaccatcagtatcatacagacttctatatataactaatacaatattcgtgtgttgcgac

SEQ ID NO: 200592 - DNA, 1069 bp, Zea Mays
ttccatcttctccaaccaagaaggaataggaggccaagagaatttctacaaccacaatgaagacgacaccaggacgatgaagtccggtcgaccggattttgtagttcctaggcaagttcaagaggcggggggacgcaaattcgtaagtggtggattcctctcggggcaccgcgggcgggcagccgcctgtggaacctgctaagatgaagggccttctcaagggcctccgatacatctcgcaaatttttgatgcgaaggagccggagatgcagatcgggaagccgaccgacgtgaagcacgtggcgcacatcggctgggacaacgcctccgtcaccgcgcccagctggatggacgaattcaaggcttcgccggggacggcgagaggcagcgatcctgagccctcgcagcccggtggatcggaaggatgcggagaggagcaggccggaggaggagaagacggcggcggcaaggcggagcggccgcggagggcgagggggaacaaggggtcgggcggcaacgagccggcgaagcggcgggactgcgcggccgaggggttgcggcgcgaccggcgggtcgcgaaggcggcggacgcggcagagggcgccgagggccagggggacgccgcggcggcggcgccgaagcagcggcggaggaagccccgggcggcgtccgggggcaggtccaagtcatcgtcgggaggcgccgccgcctcggactcggcgggggcgccgccggacgaggacgatcgctgcggctgttgaaggcctgaggcgaaggaaacggtgttcgctgggaacgtacgtgtggcgtggcgcggcggcattgctagcggggccgcgcgccgatgcctgttggggttcgagtcgactggtagtggtacacacacacactgacacacggagggagtagggagggaggcatcttcaaatttgaactaggtgagtgtccgtgcgttgcaacggaaacatataatactatgatattttatgtacaaatgtccactacattgcaaccatcagtatcatacagacttctatatataactaatacaatattcgtgtgttgcgac

SEQ ID NO: 200593 - DNA, 4268 bp, Zea Mays
gtgaacgtgaagcagcgaagcgtcccggcaaaggcacccggtggccgcgtccagcgcctaccgtttccgggggggctcctcgcctcctcttcccccgtccacccattctcctggccgctcttccccttcgtcgtcgcactccgctagctcacctcctcgtccccatataaaccatatccctctccgggccccgcgcagccgccggcgacaagcgcgcaggagcagcagttgtcgcgcctcactgatggcgaccgccgtggcgtcgcagccgtgccaccttcccctcagcgccggcggagatcccagcacttcgaatgttcatactctggagaaagtatatggtttcagattcatatgcagaagcattgttgatgtaaagactcacaaattccactcccgcatttcaaagaggaagtgctacttgaggaactcactgtcggagtgtgacaggaccatccacagtggtagatggttggagtttcggagacacaagggagtcttccagagaactagaaggatggttcacattattccattggcttctgatggtgatggcaaccatatatctgttaatggagctctgcaagttggttctacaagcaacattgatgaaataaagttgaaattgaataaagcattgcagagtgaagatatcagcaatggactcgtccagtcgatacatgatgctgcaagatctattgagttggctctcatagagcacagcaaattgccaaagagctcttggtttccaaagacatggctaggcgttgagaacaatgcttggataaaatcactgtcttaccaggctgctgtagactcattgttgaaagcagttatcgatgtttcatctcgtgggaatgacagagatagagatattaatgtgtttgttcaaaggagtttgtcccgcctgctcaccccccttgagagtgttatcaagaatgaattatctaagagggaacctgcattgtatgaatggtattcatccgatcaaaatcctttggtggtgagacaatttgtaaacatttttgaaaatgatccaatgttttactctgctacagcaatatgccttgaaggcgagccgatgaatactagtgaaagtgatctttctctgcttatgctaggtttgatctgtcttgctgcaatcacaaagtttggatcagcaaaagtttcttgtcagcaattctcttcaatggtgcctgatattattggtcgattcatggatatgcttcttgagtttgcccctctaagtaaagcatataacttggcgaaagatattggtcttcggagagaatttttgtataattttggtcctcgtgctgctgttcctaaacttggcaatgaccatggacttgaaatatcattttggattgaactggtgcagaagcaattactctgggctcttgatcgtgaaaagatatggtcaagactgacaacaagtgaaagcattgaggttctggaaaaggatcttgcaatatttggtttttttgttgctttgggtagaagcacacaaggatatttgtctttcaagggtttgactgatttggatgattcactgaatggtattgtaaggtatcttatcggtgggagtgtactatattatccacagctgtcctcgattagttcatatcaactgtatgtggaggtagtctgtgaagagctcgagtggcttcctttttacaatgatgatgttttaagtgcaaaaactgatactgaaggtagagaagaagtgcctaaaggagaagtcatatcaagagtcctaaatgtgtgctcttactggatgactagttttacaaagtacagctcatggcttgagaacccttcaaatgtgaaggctgcaaagttcctttctaagggacatgtcatgttgagtgactgcatgaaggagcttgacatatcaagaaatatgtcaaacgacagtggcttcctagaacctgaagaagaattggatactggaacagaattagcttcctttgacaagtcgcttgaaaatgttgaagaagctctggttaagttagaaaatttgcttcaagaattacatgtttccagttcgcactctggtaaggaggatctgaaggctgcatgctctgatcttgaaatgataagaagactgaagaaagaagctgagcttcttgaggcatcctttctagcaaaagcagaatatctggaggccgatgcaagtagcggatcactatctcctgcagaggaaggacctgtaaagacaagtagcaggacgaacgatacatcagcaccacaaaaaacaggaagcagggtggataataaacgtcgcccattttgggacttctttggtcggtctttgaaagttgatccagctcttgcagatcaggatctgatcactgtcgccaatgtggagaaggaaggcatggagtcaaatgacatcctccgcttcgaacagttaagacgtgagctgattgagttagaaaagagagtgcagaagagtgcggatgaagctcaaaaggaggaggagatggttgtcgcagaaaaaacaactgcaccatcgcctggatcatcagtttcttctcgtcagactaccaagaaagaaaatgtcataactaaatcagtggagaaggtcaaagagactacaacgactgtgttgcaggggacacaactattagcaattgatacaggagctgctatgggtttgctaaaaagagctcttattggggatgaactaactcagaaggaaaagcaggctcttcaaagaacattgacagatttggcgtctgtcgttcctataggaatactcatgcttttgccacttaccgccgttggtcatgctgctattttggctttcatccagagatatgtgccatcgatgatcccgtccacatatgcccccggtaggttggatctccttaggcagattgagaaggttaaggaaatggaagttgctgaaggcagcagtgaagatatattggaggaactgaacaaatgaaataagctgggcatgtacagatggacatgattatactgcttagcttacggtctttcctgtaaagttgttttggaacaagacatttgagggggtttgttttatctaaagattctttgaatggcatacccgctggaaacagaagtgcaaggccctaggaataagtaaccaatcattgtgtcgacaaatgttccacgtctgcaggctggtgtatacataaaacatactccacattatacattacatgggcggctcacggtgcccttcaacatagtagaggatgaatgtccaagttcctcctggacagtgttctgtgtagggtagtggttttgatagaggattgtatatctagttggtatgttggtgatcacctttgttttgttttttaggaaccaagcctactacatgcattattgtctgtacccaaatgccaagttcagtgatctcctacgggattgagtggtgcgggcattttctaataataagccaagcccgtgagcaagatgtaggcgtgaacagtgttcgtcagtcgccgccaccgtctcccctcctgatccaatccaatggcgcgcctccacctcgtagccgtggcaatgggcttgctcttggccttgacgacggcgcaggcaccgggcgcgtccacgatgcccgcgcccatggcgcagcctccggcgacctcggcgcctcctcgtcccgcgccatccccgacccagaagaccgctccagctccggcgcccaatgccacggtacccgcccccgcctcgccgccggcgccgagctctatcgggcagacgccgaccgaggcgccgtcctcccctccgccgcccagcgccgcgtccagcgttgcctccgccttgtacgtggccgccgctatggcggctgtcgtgtttttcttctgaggtcggtactcggcgccgatggatccgccgcctatggtatggtacggtgcggtgtggatttgacacgatggctcccgctaccgctggtcgagtttgcttattaggatactagtagttaattaatagttgggttgatcagatcagatctagcgtttttgttgagtggggatattatttcttctacggatctgcacactagggttatgtcactatggttgccattgttattagggaaggtgcaaacttctaatttgaatcacatgatgttgatccaagggacgcataagggacgccaagcttattaaaacgataaaacgatggaacgctcatgggtgaaattttgacttttaaacgtttaaactttgtttaaacatagttttaaacaacataggaaaaataccaatatatcataatttcag

SEQ ID NO: 200594 - DNA, 4143 bp, Zea Mays
gcgaagcgtcccggcaaaggcacccggtggccgcgtccagcgcctaccgtttccgggggggctcctcgcctcctcttcccccgtccacccattctcctggccgctcttccccttcgtcgtcgcactccgctagctcacctcctcgtccccatataaaccatatccctctccgggccccgcgcagccgccggcgacaagcgcgcaggagcagcagttgtcgcgcctcactgatggcgaccgccgtggcgtcgcagccgtgccaccttcccctcagcgccggcggagatcccaggtgcgcggccagcacttcgaatgttcatactctggagaaagtatatggtttcagattcatatgcagaagcattgttgatgtaaagactcacaaattccactcccgcatttcaaagaggaagtgctacttgaggaactcactgtcggagtgtgacaggaccatccacagtggtagatggttggagtttcggagacacaagggagtcttccagagaactagaaggatggttcacattattccattggcttctgatggtgatggcaaccatatatctgttaatggagctctgcaagttggttctacaagcaacattgatgaaataaagttgaaattgaataaagcattgcagagtgaagatatcagcaatggactcgtccagtcgatacatgatgctgcaagatctattgagttggctctcatagagcacagcaaattgccaaagagctcttggtttccaaagacatggctaggcgttgagaacaatgcttggataaaatcactgtcttaccaggctgctgtagactcattgttgaaagcagttatcgatgtttcatctcgtgggaatgacagagatagagatattaatgtgtttgttcaaaggagtttgtcccgcctgctcaccccccttgagagtgttatcaagaatgaattatctaagagggaacctgcattgtatgaatggtattcatccgatcaaaatcctttggtggtgagacaatttgtaaacatttttgaaaatgatccaatgttttactctgctacagcaatatgccttgaaggcgagccgatgaatactagtgaaagtgatctttctctgcttatgctaggtttgatctgtcttgctgcaatcacaaagtttggatcagcaaaagtttcttgtcagcaattctcttcaatggtgcctgatattattggtcgattcatggatatgcttcttgagtttgcccctctaagtaaagcatataacttggcgaaagatattggtcttcggagagaatttttgtataattttggtcctcgtgctgctgttcctaaacttggcaatgaccatggacttgaaatatcattttggattgaactggtgcagaagcaattactctgggctcttgatcgtgaaaagatatggtcaagactgacaacaagtgaaagcattgaggttctggaaaaggatcttgcaatatttggtttttttgttgctttgggtagaagcacacaaggatatttgtctttcaagggtttgactgatttggatgattcactgaatggtattgtaaggtatcttatcggtgggagtgtactatattatccacagctgtcctcgattagttcatatcaactgtatgtggaggtagtctgtgaagagctcgagtggcttcctttttacaatgatgatgttttaagtgcaaaaactgatactgaaggtagagaagaagtgcctaaaggagaagtcatatcaagagtcctaaatgtgtgctcttactggatgactagttttacaaagtacagctcatggcttgagaacccttcaaatgtgaaggctgcaaagttcctttctaagggacatgtcatgttgagtgactgcatgaaggagcttgacatatcaagaaatatgtcaaacgacagtggcttcctagaacctgaagaagaattggatactggaacagaattagcttcctttgacaagtcgcttgaaaatgttgaagaagctctggttaagttagaaaatttgcttcaagaattacatgtttccagttcgcactctggtaaggaggatctgaaggctgcatgctctgatcttgaaatgataagaagactgaagaaagaagctgagcttcttgaggcatcctttctagcaaaagcagaatatctggaggccgatgcaagtagcggatcactatctcctgcagaggaaggacctgtaaagacaagtagcaggacgaacgatacatcagcaccacaaaaaacaggaagcagggtggataataaacgtcgcccattttgggacttctttggtcggtctttgaaagttgatccagctcttgcagatcaggatctgatcactgtcgccaatgtggagaaggaaggcatggagtcaaatgacatcctccgcttcgaacagttaagacgtgagctgattgagttagaaaagagagtgcagaagagtgcggatgaagctcaaaaggaggagactgtgttgcaggggacacaactattagcaattgatacaggagctgctatgggtttgctaaaaagagctcttattggggatgaactaactcagaaggaaaagcaggctcttcaaagaacattgacagatttggcgtctgtcgttcctataggaatactcatgcttttgccacttaccgccgttggtcatgctgctattttggctttcatccagagatatgtgccatcgatgatcccgtccacatatgcccccggtaggttggatctccttaggcagattgagaaggttaaggaaatggaagttgctgaaggcagcagtgaagatatattggaggaactgaacaaatgaaataagctgggcatgtacagatggacatgattatactgcttagcttacggtctttcctgtaaagttgttttggaacaagacatttgagggggtttgttttatctaaagattctttgaatggcatacccgctggaaacagaagtgcaaggccctaggaataagtaaccaatcattgtgtcgacaaatgttccacgtctgcaggctggtgtatacataaaacatactccacattatacattacatgggcggctcacggtgcccttcaacatagtagaggatgaatgtccaagttcctcctggacagtgttctgtgtagggtagtggttttgatagaggattgtatatctagttggtatgttggtgatcacctttgttttgttttttaggaaccaagcctactacatgcattattgtctgtacccaaatgccaagttcagtgatctcctacgggattgagtggtgcgggcattttctaataataagccaagcccgtgagcaagatgtaggcgtgaacagtgttcgtcagtcgccgccaccgtctcccctcctgatccaatccaatggcgcgcctccacctcgtagccgtggcaatgggcttgctcttggccttgacgacggcgcaggcaccgggcgcgtccacgatgcccgcgcccatggcgcagcctccggcgacctcggcgcctcctcgtcccgcgccatccccgacccagaagaccgctccagctccggcgcccaatgccacggtacccgcccccgcctcgccgccggcgccgagctctatcgggcagacgccgaccgaggcgccgtcctcccctccgccgcccagcgccgcgtccagcgttgcctccgccttgtacgtggccgccgctatggcggctgtcgtgtttttcttctgaggtcggtactcggcgccgatggatccgccgcctatggtatggtacggtgcggtgtggatttgacacgatggctcccgctaccgctggtcgagtttgcttattaggatactagtagttaattaatagttgggttgatcagatcagatctagcgtttttgttgagtggggatattatttcttctacggatctgcacactagggttatgtcactatggttgccattgttattagggaaggtgcaaacttctaatttgaatcacatgatgttgatccaagggacgcataagggacgccaagcttattaaaacgataaaacgatggaacgctcatgggtgaaattttgacttttaaacgtttaaactttgtttaaacatagttttaaacaacataggaaaaataccaatatatcataatttcag

SEQ ID NO: 200595 - DNA, 4266 bp, Zea Mays
gcgaagcgtcccggcaaaggcacccggtggccgcgtccagcgcctaccgtttccgggggggctcctcgcctcctcttcccccgtccacccattctcctggccgctcttccccttcgtcgtcgcactccgctagctcacctcctcgtccccatataaaccatatccctctccgggccccgcgcagccgccggcgacaagcgcgcaggagcagcagttgtcgcgcctcactgatggcgaccgccgtggcgtcgcagccgtgccaccttcccctcagcgccggcggagatcccaggtgcgcggccagcacttcgaatgttcatactctggagaaagtatatggtttcagattcatatgcagaagcattgttgatgtaaagactcacaaattccactcccgcatttcaaagaggaagtgctacttgaggaactcactgtcggagtgtgacaggaccatccacagtggtagatggttggagtttcggagacacaagggagtcttccagagaactagaaggatggttcacattattccattggcttctgatggtgatggcaaccatatatctgttaatggagctctgcaagttggttctacaagcaacattgatgaaataaagttgaaattgaataaagcattgcagagtgaagatatcagcaatggactcgtccagtcgatacatgatgctgcaagatctattgagttggctctcatagagcacagcaaattgccaaagagctcttggtttccaaagacatggctaggcgttgagaacaatgcttggataaaatcactgtcttaccaggctgctgtagactcattgttgaaagcagttatcgatgtttcatctcgtgggaatgacagagatagagatattaatgtgtttgttcaaaggagtttgtcccgcctgctcaccccccttgagagtgttatcaagaatgaattatctaagagggaacctgcattgtatgaatggtattcatccgatcaaaatcctttggtggtgagacaatttgtaaacatttttgaaaatgatccaatgttttactctgctacagcaatatgccttgaaggcgagccgatgaatactagtgaaagtgatctttctctgcttatgctaggtttgatctgtcttgctgcaatcacaaagtttggatcagcaaaagtttcttgtcagcaattctcttcaatggtgcctgatattattggtcgattcatggatatgcttcttgagtttgcccctctaagtaaagcatataacttggcgaaagatattggtcttcggagagaatttttgtataattttggtcctcgtgctgctgttcctaaacttggcaatgaccatggacttgaaatatcattttggattgaactggtgcagaagcaattactctgggctcttgatcgtgaaaagatatggtcaagactgacaacaagtgaaagcattgaggttctggaaaaggatcttgcaatatttggtttttttgttgctttgggtagaagcacacaaggatatttgtctttcaagggtttgactgatttggatgattcactgaatggtattgtaaggtatcttatcggtgggagtgtactatattatccacagctgtcctcgattagttcatatcaactgtatgtggaggtagtctgtgaagagctcgagtggcttcctttttacaatgatgatgttttaagtgcaaaaactgatactgaaggtagagaagaagtgcctaaaggagaagtcatatcaagagtcctaaatgtgtgctcttactggatgactagttttacaaagtacagctcatggcttgagaacccttcaaatgtgaaggctgcaaagttcctttctaagggacatgtcatgttgagtgactgcatgaaggagcttgacatatcaagaaatatgtcaaacgacagtggcttcctagaacctgaagaagaattggatactggaacagaattagcttcctttgacaagtcgcttgaaaatgttgaagaagctctggttaagttagaaaatttgcttcaagaattacatgtttccagttcgcactctggtaaggaggatctgaaggctgcatgctctgatcttgaaatgataagaagactgaagaaagaagctgagcttcttgaggcatcctttctagcaaaagcagaatatctggaggccgatgcaagtagcggatcactatctcctgcagaggaaggacctgtaaagacaagtagcaggacgaacgatacatcagcaccacaaaaaacaggaagcagggtggataataaacgtcgcccattttgggacttctttggtcggtctttgaaagttgatccagctcttgcagatcaggatctgatcactgtcgccaatgtggagaaggaaggcatggagtcaaatgacatcctccgcttcgaacagttaagacgtgagctgattgagttagaaaagagagtgcagaagagtgcggatgaagctcaaaaggaggaggagatggttgtcgcagaaaaaacaactgcaccatcgcctggatcatcagtttcttctcgtcagactaccaagaaagaaaatgtcataactaaatcagtggagaaggtcaaagagactacaacgactgtgttgcaggggacacaactattagcaattgatacaggagctgctatgggtttgctaaaaagagctcttattggggatgaactaactcagaaggaaaagcaggctcttcaaagaacattgacagatttggcgtctgtcgttcctataggaatactcatgcttttgccacttaccgccgttggtcatgctgctattttggctttcatccagagatatgtgccatcgatgatcccgtccacatatgcccccggtaggttggatctccttaggcagattgagaaggttaaggaaatggaagttgctgaaggcagcagtgaagatatattggaggaactgaacaaatgaaataagctgggcatgtacagatggacatgattatactgcttagcttacggtctttcctgtaaagttgttttggaacaagacatttgagggggtttgttttatctaaagattctttgaatggcatacccgctggaaacagaagtgcaaggccctaggaataagtaaccaatcattgtgtcgacaaatgttccacgtctgcaggctggtgtatacataaaacatactccacattatacattacatgggcggctcacggtgcccttcaacatagtagaggatgaatgtccaagttcctcctggacagtgttctgtgtagggtagtggttttgatagaggattgtatatctagttggtatgttggtgatcacctttgttttgttttttaggaaccaagcctactacatgcattattgtctgtacccaaatgccaagttcagtgatctcctacgggattgagtggtgcgggcattttctaataataagccaagcccgtgagcaagatgtaggcgtgaacagtgttcgtcagtcgccgccaccgtctcccctcctgatccaatccaatggcgcgcctccacctcgtagccgtggcaatgggcttgctcttggccttgacgacggcgcaggcaccgggcgcgtccacgatgcccgcgcccatggcgcagcctccggcgacctcggcgcctcctcgtcccgcgccatccccgacccagaagaccgctccagctccggcgcccaatgccacggtacccgcccccgcctcgccgccggcgccgagctctatcgggcagacgccgaccgaggcgccgtcctcccctccgccgcccagcgccgcgtccagcgttgcctccgccttgtacgtggccgccgctatggcggctgtcgtgtttttcttctgaggtcggtactcggcgccgatggatccgccgcctatggtatggtacggtgcggtgtggatttgacacgatggctcccgctaccgctggtcgagtttgcttattaggatactagtagttaattaatagttgggttgatcagatcagatctagcgtttttgttgagtggggatattatttcttctacggatctgcacactagggttatgtcactatggttgccattgttattagggaaggtgcaaacttctaatttgaatcacatgatgttgatccaagggacgcataagggacgccaagcttattaaaacgataaaacgatggaacgctcatgggtgaaattttgacttttaaacgtttaaactttgtttaaacatagttttaaacaacataggaaaaataccaatatatcataatttcag

SEQ ID NO: 200596 - DNA, 4200 bp, Zea Mays
gtcccggcaaaggcacccggtggccgcgtccagcgcctaccgtttccgggggggctcctcgcctcctcttcccccgtccacccattctcctggccgctcttccccttcgtcgtcgcactccgctagctcacctcctcgtccccatataaaccatatccctctccgggccccgcgcagccgccggcgacaagcgcgcaggagcagcagttgtcgcgcctcactgatggcgaccgccgtggcgtcgcagccgtgccaccttcccctcagcgccggcggagatcccaggtgcgcggccagcacttcgaatgttcatactctggagaaagtatatggtttcagattcatatgcagaagcattgttgatgtaaagactcacaaattccactcccgcatttcaaagaggaagtgctacttgaggaactcactgtcggagtgtgacaggaccatccacagtggtagatggttggagtttcggagacacaagggagtcttccagagaactagaaggatggttcacattattccattggcttctgatggtgatggcaaccatatatctgttaatggagctctgcaagttggttctacaagcaacattgatgaaataaagttgaaattgaataaagcattgcagagtgaagatatcagcaatggactcgtccagtcgatacatgatgctgcaagatctattgagttggctctcatagagcacagcaaattgccaaagagctcttggtttccaaagacatggctaggcgttgagaacaatgcttggataaaatcactgtcttaccaggctgctgtagactcattgttgaaagcagttatcgatgtttcatctcgtgggaatgacagagatagagatattaatgtgtttgttcaaaggagtttgtcccgcctgctcaccccccttgagagtgttatcaagaatgaattatctaagagggaacctgcattgtatgaatggtattcatccgatcaaaatcctttggtggtgagacaatttgtaaacatttttgaaaatgatccaatgttttactctgctacagcaatgtttgatctgtcttgctgcaatcacaaagtttggatcagcaaaagtttcttgtcagcaattctcttcaatggtgcctgatattattggtcgattcatggatatgcttcttgagtttgcccctctaagtaaagcatataacttggcgaaagatattggtcttcggagagaatttttgtataattttggtcctcgtgctgctgttcctaaacttggcaatgaccatggacttgaaatatcattttggattgaactggtgcagaagcaattactctgggctcttgatcgtgaaaagatatggtcaagactgacaacaagtgaaagcattgaggttctggaaaaggatcttgcaatatttggtttttttgttgctttgggtagaagcacacaaggatatttgtctttcaagggtttgactgatttggatgattcactgaatggtattgtaaggtatcttatcggtgggagtgtactatattatccacagctgtcctcgattagttcatatcaactgtatgtggaggtagtctgtgaagagctcgagtggcttcctttttacaatgatgatgttttaagtgcaaaaactgatactgaaggtagagaagaagtgcctaaaggagaagtcatatcaagagtcctaaatgtgtgctcttactggatgactagttttacaaagtacagctcatggcttgagaacccttcaaatgtgaaggctgcaaagttcctttctaagggacatgtcatgttgagtgactgcatgaaggagcttgacatatcaagaaatatgtcaaacgacagtggcttcctagaacctgaagaagaattggatactggaacagaattagcttcctttgacaagtcgcttgaaaatgttgaagaagctctggttaagttagaaaatttgcttcaagaattacatgtttccagttcgcactctggtaaggaggatctgaaggctgcatgctctgatcttgaaatgataagaagactgaagaaagaagctgagcttcttgaggcatcctttctagcaaaagcagaatatctggaggccgatgcaagtagcggatcactatctcctgcagaggaaggacctgtaaagacaagtagcaggacgaacgatacatcagcaccacaaaaaacaggaagcagggtggataataaacgtcgcccattttgggacttctttggtcggtctttgaaagttgatccagctcttgcagatcaggatctgatcactgtcgccaatgtggagaaggaaggcatggagtcaaatgacatcctccgcttcgaacagttaagacgtgagctgattgagttagaaaagagagtgcagaagagtgcggatgaagctcaaaaggaggaggagatggttgtcgcagaaaaaacaactgcaccatcgcctggatcatcagtttcttctcgtcagactaccaagaaagaaaatgtcataactaaatcagtggagaaggtcaaagagactacaacgactgtgttgcaggggacacaactattagcaattgatacaggagctgctatgggtttgctaaaaagagctcttattggggatgaactaactcagaaggaaaagcaggctcttcaaagaacattgacagatttggcgtctgtcgttcctataggaatactcatgcttttgccacttaccgccgttggtcatgctgctattttggctttcatccagagatatgtgccatcgatgatcccgtccacatatgcccccggtaggttggatctccttaggcagattgagaaggttaaggaaatggaagttgctgaaggcagcagtgaagatatattggaggaactgaacaaatgaaataagctgggcatgtacagatggacatgattatactgcttagcttacggtctttcctgtaaagttgttttggaacaagacatttgagggggtttgttttatctaaagattctttgaatggcatacccgctggaaacagaagtgcaaggccctaggaataagtaaccaatcattgtgtcgacaaatgttccacgtctgcaggctggtgtatacataaaacatactccacattatacattacatgggcggctcacggtgcccttcaacatagtagaggatgaatgtccaagttcctcctggacagtgttctgtgtagggtagtggttttgatagaggattgtatatctagttggtatgttggtgatcacctttgttttgttttttaggaaccaagcctactacatgcattattgtctgtacccaaatgccaagttcagtgatctcctacgggattgagtggtgcgggcattttctaataataagccaagcccgtgagcaagatgtaggcgtgaacagtgttcgtcagtcgccgccaccgtctcccctcctgatccaatccaatggcgcgcctccacctcgtagccgtggcaatgggcttgctcttggccttgacgacggcgcaggcaccgggcgcgtccacgatgcccgcgcccatggcgcagcctccggcgacctcggcgcctcctcgtcccgcgccatccccgacccagaagaccgctccagctccggcgcccaatgccacggtacccgcccccgcctcgccgccggcgccgagctctatcgggcagacgccgaccgaggcgccgtcctcccctccgccgcccagcgccgcgtccagcgttgcctccgccttgtacgtggccgccgctatggcggctgtcgtgtttttcttctgaggtcggtactcggcgccgatggatccgccgcctatggtatggtacggtgcggtgtggatttgacacgatggctcccgctaccgctggtcgagtttgcttattaggatactagtagttaattaatagttgggttgatcagatcagatctagcgtttttgttgagtggggatattatttcttctacggatctgcacactagggttatgtcactatggttgccattgttattagggaaggtgcaaacttctaatttgaatcacatgatgttgatccaagggacgcataagggacgccaagcttattaaaacgataaaacgatggaacgctcatgggtgaaattttgacttttaaacgtttaaactttgtttaaacatagttttaaacaacataggaaaaataccaatatatcataatttcag

SEQ ID NO: 200597 - DNA, 4334 bp, Zea Mays
ggcaaaggcacccggtggccgcgtccagcgcctaccgtttccgggggggctcctcgcctcctcttcccccgtccacccattctcctggccgctcttccccttcgtcgtcgcactccgctagctcacctcctcgtccccatataaaccatatccctctccgggccccgcgcagccgccggcgacaagcgcgcaggagcagcagttgtcgcgcctcactgatggcgaccgccgtggcgtcgcagccgtgccaccttcccctcagcgccggcggagatcccagattcatatgcagaagcattgttgatgtaaagactcacaaattccactcccgcatttcaaagaggaagtgctacttgaggaactcactgtcggagtgtgacaggaccatccacagtggtagatggttggagtttcggagacacaagggagtcttccagagaactagaaggatggttcacattattccattggcttctgatggtgatggcaaccatatatctgttaatggagctctgcaagttggttctacaagcaacattgatgaaataaagttgaaattgaataaagcattgcagagtgaagatatcagcaatggactcgtccagtcgatacatgatgctgcaagatctattgagttggctctcatagagcacagcaaattgccaaagagctcttggtttccaaagacatggctaggcgttgagaacaatgcttggataaaatcactgtcttaccaggctgctgtagactcattgttgaaagcagttatcgatgtttcatctcgtgggaatgacagagatagagatattaatgtgtttgttcaaaggagtttgtcccgcctgctcaccccccttgagagtgttatcaagaatgaattatctaagagggaacctgcattgtatgaatggtattcatccgatcaaaatcctttggtggtgagacaatttgtaaacatttttgaaaatgatccaatgttttactctgctacagcaatatgccttgaaggcgagccgatgaatactagtgaaagtgatctttctctgcttatgctaggtttgatctgtcttgctgcaatcacaaagtttggatcagcaaaagtttcttgtcagcaattctcttcaatggtgcctgatattattggtcgattcatggatatgcttcttgagtttgcccctctaagtaaagcatataacttggcgaaagatattggtcttcggagagaatttttgtataattttggtcctcgtgctgctgttcctaaacttggcaatgaccatggacttgaaatatcattttggattgaactggtgcagaagcaattactctgggctcttgatcgtgaaaagatatggtcaagactgacaacaagtgaaagcattgaggttctggaaaaggatcttgcaatatttggtttttttgttgctttgggtagaagcacacaaggatatttgtctttcaagggtttgactgatttggatgattcactgaatggtattgtaaggtatcttatcggtgggagtgtactatattatccacagctgtcctcgattagttcatatcaactgtatgtggaggtagtctgtgaagagctcgagtggcttcctttttacaatgatgatgttttaagtgcaaaaactgatactgaaggtagagaagaagtgcctaaaggagaagtcatatcaagagtcctaaatgtgtgctcttactggatgactagttttacaaagtacagctcatggcttgagaacccttcaaatgtgaaggctgcaaagttcctttctaaggggtttgtaattatttggtcacgacaatgcgtatctatctcttgtttgcagatagggatttgtttttgtttttctaaaaagcagatacggatttgtgagtactgattaattttctactgcatgttaataattgtagacatgtcatgttgagtgactgcatgaaggagcttgacatatcaagaaatatgtcaaacgacagtggcttcctagaacctgaagaagaattggatactggaacagaattagcttcctttgacaagtcgcttgaaaatgttgaagaagctctggttaagttagaaaatttgcttcaagaattacatgtttccagttcgcactctggtaaggaggatctgaaggctgcatgctctgatcttgaaatgataagaagactgaagaaagaagctgagcttcttgaggcatcctttctagcaaaagcagaatatctggaggccgatgcaagtagcggatcactatctcctgcagaggaaggacctgtaaagacaagtagcaggacgaacgatacatcagcaccacaaaaaacaggaagcagggtggataataaacgtcgcccattttgggacttctttggtcggtctttgaaagttgatccagctcttgcagatcaggatctgatcactgtcgccaatgtggagaaggaaggcatggagtcaaatgacatcctccgcttcgaacagttaagacgtgagctgattgagttagaaaagagagtgcagaagagtgcggatgaagctcaaaaggaggaggagatggttgtcgcagaaaaaacaactgcaccatcgcctggatcatcagtttcttctcgtcagactaccaagaaagaaaatgtcataactaaatcagtggagaaggtcaaagagactacaacgactgtgttgcaggggacacaactattagcaattgatacaggagctgctatgggtttgctaaaaagagctcttattggggatgaactaactcagaaggaaaagcaggctcttcaaagaacattgacagatttggcgtctgtcgttcctataggaatactcatgcttttgccacttaccgccgttggtcatgctgctattttggctttcatccagagatatgtgccatcgatgatcccgtccacatatgcccccggtaggttggatctccttaggcagattgagaaggttaaggaaatggaagttgctgaaggcagcagtgaagatatattggaggaactgaacaaatgaaataagctgggcatgtacagatggacatgattatactgcttagcttacggtctttcctgtaaagttgttttggaacaagacatttgagggggtttgttttatctaaagattctttgaatggcatacccgctggaaacagaagtgcaaggccctaggaataagtaaccaatcattgtgtcgacaaatgttccacgtctgcaggctggtgtatacataaaacatactccacattatacattacatgggcggctcacggtgcccttcaacatagtagaggatgaatgtccaagttcctcctggacagtgttctgtgtagggtagtggttttgatagaggattgtatatctagttggtatgttggtgatcacctttgttttgttttttaggaaccaagcctactacatgcattattgtctgtacccaaatgccaagttcagtgatctcctacgggattgagtggtgcgggcattttctaataataagccaagcccgtgagcaagatgtaggcgtgaacagtgttcgtcagtcgccgccaccgtctcccctcctgatccaatccaatggcgcgcctccacctcgtagccgtggcaatgggcttgctcttggccttgacgacggcgcaggcaccgggcgcgtccacgatgcccgcgcccatggcgcagcctccggcgacctcggcgcctcctcgtcccgcgccatccccgacccagaagaccgctccagctccggcgcccaatgccacggtacccgcccccgcctcgccgccggcgccgagctctatcgggcagacgccgaccgaggcgccgtcctcccctccgccgcccagcgccgcgtccagcgttgcctccgccttgtacgtggccgccgctatggcggctgtcgtgtttttcttctgaggtcggtactcggcgccgatggatccgccgcctatggtatggtacggtgcggtgtggatttgacacgatggctcccgctaccgctggtcgagtttgcttattaggatactagtagttaattaatagttgggttgatcagatcagatctagcgtttttgttgagtggggatattatttcttctacggatctgcacactagggttatgtcactatggttgccattgttattagggaaggtgcaaacttctaatttgaatcacatgatgttgatccaagggacgcataagggacgccaagcttattaaaacgataaaacgatggaacgctcatgggtgaaattttgacttttaaacgtttaaactttgtttaaacatagttttaaacaacataggaaaaataccaatatatcataatttcag

SEQ ID NO: 200598 - DNA, 4207 bp, Zea Mays
aggcacccggtggccgcgtccagcgcctaccgtttccgggggggctcctcgcctcctcttcccccgtccacccattctcctggccgctcttccccttcgtcgtcgcactccgctagctcacctcctcgtccccatataaaccatatccctctccgggccccgcgcagccgccggcgacaagcgcgcaggagcagcagttgtcgcgcctcactgatggcgaccgccgtggcgtcgcagccgtgccaccttcccctcagcgccggcggagatcccaggtgcgcggccagattcatatgcagaagcattgttgatgtaaagactcacaaattccactcccgcatttcaaagaggaagtgctacttgaggaactcactgtcggagtgtgacaggaccatccacagtggtagatggttggagtttcggagacacaagggagtcttccagagaactagaaggatggttcacattattccattggcttctgatggtgatggcaaccatatatctgttaatggagctctgcaagttggttctacaagcaacattgatgaaataaagttgaaattgaataaagcattgcagagtgaagatatcagcaatggactcgtccagtcgatacatgatgctgcaagatctattgagttggctctcatagagcacagcaaattgccaaagagctcttggtttccaaagacatggctaggcgttgagaacaatgcttggataaaatcactgtcttaccaggctgctgtagactcattgttgaaagcagttatcgatgtttcatctcgtgggaatgacagagatagagatattaatgtgtttgttcaaaggagtttgtcccgcctgctcaccccccttgagagtgttatcaagaatgaattatctaagagggaacctgcattgtatgaatggtattcatccgatcaaaatcctttggtggtgagacaatttgtaaacatttttgaaaatgatccaatgttttactctgctacagcaatatgccttgaaggcgagccgatgaatactagtgaaagtgatctttctctgcttatgctaggtttgatctgtcttgctgcaatcacaaagtttggatcagcaaaagtttcttgtcagcaattctcttcaatggtgcctgatattattggtcgattcatggatatgcttcttgagtttgcccctctaagtaaagcatataacttggcgaaagatattggtcttcggagagaatttttgtataattttggtcctcgtgctgctgttcctaaacttggcaatgaccatggacttgaaatatcattttggattgaactggtgcagaagcaattactctgggctcttgatcgtgaaaagatatggtcaagactgacaacaagtgaaagcattgaggttctggaaaaggatcttgcaatatttggtttttttgttgctttgggtagaagcacacaaggatatttgtctttcaagggtttgactgatttggatgattcactgaatggtattgtaaggtatcttatcggtgggagtgtactatattatccacagctgtcctcgattagttcatatcaactgtatgtggaggtagtctgtgaagagctcgagtggcttcctttttacaatgatgatgttttaagtgcaaaaactgatactgaaggtagagaagaagtgcctaaaggagaagtcatatcaagagtcctaaatgtgtgctcttactggatgactagttttacaaagtacagctcatggcttgagaacccttcaaatgtgaaggctgcaaagttcctttctaagggacatgtcatgttgagtgactgcatgaaggagcttgacatatcaagaaatatgtcaaacgacagtggcttcctagaacctgaagaagaattggatactggaacagaattagcttcctttgacaagtcgcttgaaaatgttgaagaagctctggttaagttagaaaatttgcttcaagaattacatgtttccagttcgcactctggtaaggaggatctgaaggctgcatgctctgatcttgaaatgataagaagactgaagaaagaagctgagcttcttgaggcatcctttctagcaaaagcagaatatctggaggccgatgcaagtagcggatcactatctcctgcagaggaaggacctgtaaagacaagtagcaggacgaacgatacatcagcaccacaaaaaacaggaagcagggtggataataaacgtcgcccattttgggacttctttggtcggtctttgaaagttgatccagctcttgcagatcaggatctgatcactgtcgccaatgtggagaaggaaggcatggagtcaaatgacatcctccgcttcgaacagttaagacgtgagctgattgagttagaaaagagagtgcagaagagtgcggatgaagctcaaaaggaggaggagatggttgtcgcagaaaaaacaactgcaccatcgcctggatcatcagtttcttctcgtcagactaccaagaaagaaaatgtcataactaaatcagtggagaaggtcaaagagactacaacgactgtgttgcaggggacacaactattagcaattgatacaggagctgctatgggtttgctaaaaagagctcttattggggatgaactaactcagaaggaaaagcaggctcttcaaagaacattgacagatttggcgtctgtcgttcctataggaatactcatgcttttgccacttaccgccgttggtcatgctgctattttggctttcatccagagatatgtgccatcgatgatcccgtccacatatgcccccggtaggttggatctccttaggcagattgagaaggttaaggaaatggaagttgctgaaggcagcagtgaagatatattggaggaactgaacaaatgaaataagctgggcatgtacagatggacatgattatactgcttagcttacggtctttcctgtaaagttgttttggaacaagacatttgagggggtttgttttatctaaagattctttgaatggcatacccgctggaaacagaagtgcaaggccctaggaataagtaaccaatcattgtgtcgacaaatgttccacgtctgcaggctggtgtatacataaaacatactccacattatacattacatgggcggctcacggtgcccttcaacatagtagaggatgaatgtccaagttcctcctggacagtgttctgtgtagggtagtggttttgatagaggattgtatatctagttggtatgttggtgatcacctttgttttgttttttaggaaccaagcctactacatgcattattgtctgtacccaaatgccaagttcagtgatctcctacgggattgagtggtgcgggcattttctaataataagccaagcccgtgagcaagatgtaggcgtgaacagtgttcgtcagtcgccgccaccgtctcccctcctgatccaatccaatggcgcgcctccacctcgtagccgtggcaatgggcttgctcttggccttgacgacggcgcaggcaccgggcgcgtccacgatgcccgcgcccatggcgcagcctccggcgacctcggcgcctcctcgtcccgcgccatccccgacccagaagaccgctccagctccggcgcccaatgccacggtacccgcccccgcctcgccgccggcgccgagctctatcgggcagacgccgaccgaggcgccgtcctcccctccgccgcccagcgccgcgtccagcgttgcctccgccttgtacgtggccgccgctatggcggctgtcgtgtttttcttctgaggtcggtactcggcgccgatggatccgccgcctatggtatggtacggtgcggtgtggatttgacacgatggctcccgctaccgctggtcgagtttgcttattaggatactagtagttaattaatagttgggttgatcagatcagatctagcgtttttgttgagtggggatattatttcttctacggatctgcacactagggttatgtcactatggttgccattgttattagggaaggtgcaaacttctaatttgaatcacatgatgttgatccaagggacgcataagggacgccaagcttattaaaacgataaaacgatggaacgctcatgggtgaaattttgacttttaaacgtttaaactttgtttaaacatagttttaaacaacataggaaaaataccaatatatcataatttcag

SEQ ID NO: 200599 - DNA, 4210 bp, Zea Mays
agcgcctaccgtttccgggggggctcctcgcctcctcttcccccgtccacccattctcctggccgctcttccccttcgtcgtcgcactccgctagctcacctcctcgtccccatataaaccatatccctctccgggccccgcgcagccgccggcgacaagcgcgcaggagcagcagttgtcgcgcctcactgatggcgaccgccgtggcgtcgcagccgtgccaccttcccctcagcgccggcggagatcccaggtgcgcggccagcacttcgaatgttcatactctggagaaagtatatggtttcagattcatatgcagaagcattgttgatgtaaagactcacaaattccactcccgcatttcaaagaggaagtgctacttgaggaactcactgtcggagtgtgacaggaccatccacagtggtagatggttggagtttcggagacacaagggagtcttccagagaactagaaggatggttcacattattccattggcttctgatggtgatggcaaccatatatctgttaatggagctctgcaagttggttctacaagcaacattgatgaaataaagttgaaattgaataaagcattgcagagtgaagatatcagcaatggactcgtccagtcgatacatgatgctgcaagatctattgagttggctctcatagagcacagcaaattgccaaagagctcttggtttccaaagacatggctaggcgttgagaacaatgcttggataaaatcactgtcttaccaggctgctgtagactcattgttgaaagcagttatcgatgtttcatctcgtgggaatgacagagatagagatattaatgtgtttgttcaaaggagtttgtcccgcctgctcaccccccttgagagtgttatcaagaatgaattatctaagagggaacctgcattgtatgaatggtattcatccgatcaaaatcctttggtggtgagacaatttgtaaacatttttgaaaatgatccaatgttttactctgctacagcaatatgccttgaaggcgagccgatgaatactagtgaaagtgatctttctctgcttatgctaggtttgatctgtcttgctgcaatcacaaagtttggatcagcaaaagtttcttgtcagcaattctcttcaatggtgcctgatattattggtcgattcatggatatgcttcttgagtttgcccctctaagtaaagcatataacttggcgaaagatattggtcttcggagagaatttttgtataattttggtcctcgtgctgctgttcctaaacttggcaatgaccatggacttgaaatatcattttggattgaactggtgcagaagcaattactctgggctcttgatcgtgaaaagatatggtcaagactgacaacaagtgaaagcattgaggttctggaaaaggatcttgcaatatttggtttttttgttgctttgggtagaagcacacaaggatatttgtctttcaagggtttgactgatttggatgattcactgaatggtattgtaaggtatcttatcggtgggagtgtactatattatccacagctgtcctcgattagttcatatcaactgtatgtggaggtagtctgtgaagagctcgagtggcttcctttttacaatgatgatgttttaagtgcaaaaactgatactgaaggtagagaagaagtgcctaaaggagaagtcatatcaagagtcctaaatgtgtgctcttactggatgactagttttacaaagtacagctcatggcttgagaacccttcaaatgtgaaggctgcaaagttcctttctaagggacatgtcatgttgagtgactgcatgaaggagcttgacatatcaagtggcttcctagaacctgaagaagaattggatactggaacagaattagcttcctttgacaagtcgcttgaaaatgttgaagaagctctggttaagttagaaaatttgcttcaagaattacatgtttccagttcgcactctggtaaggaggatctgaaggctgcatgctctgatcttgaaatgataagaagactgaagaaagaagctgagcttcttgaggcatcctttctagcaaaagcagaatatctggaggccgatgcaagtagcggatcactatctcctgcagaggaaggacctgtaaagacaagtagcaggacgaacgatacatcagcaccacaaaaaacaggaagcagggtggataataaacgtcgcccattttgggacttctttggtcggtctttgaaagttgatccagctcttgcagatcaggatctgatcactgtcgccaatgtggagaaggaaggcatggagtcaaatgacatcctccgcttcgaacagttaagacgtgagctgattgagttagaaaagagagtgcagaagagtgcggatgaagctcaaaaggaggaggagatggttgtcgcagaaaaaacaactgcaccatcgcctggatcatcagtttcttctcgtcagactaccaagaaagaaaatgtcataactaaatcagtggagaaggtcaaagagactacaacgactgtgttgcaggggacacaactattagcaattgatacaggagctgctatgggtttgctaaaaagagctcttattggggatgaactaactcagaaggaaaagcaggctcttcaaagaacattgacagatttggcgtctgtcgttcctataggaatactcatgcttttgccacttaccgccgttggtcatgctgctattttggctttcatccagagatatgtgccatcgatgatcccgtccacatatgcccccggtaggttggatctccttaggcagattgagaaggttaaggaaatggaagttgctgaaggcagcagtgaagatatattggaggaactgaacaaatgaaataagctgggcatgtacagatggacatgattatactgcttagcttacggtctttcctgtaaagttgttttggaacaagacatttgagggggtttgttttatctaaagattctttgaatggcatacccgctggaaacagaagtgcaaggccctaggaataagtaaccaatcattgtgtcgacaaatgttccacgtctgcaggctggtgtatacataaaacatactccacattatacattacatgggcggctcacggtgcccttcaacatagtagaggatgaatgtccaagttcctcctggacagtgttctgtgtagggtagtggttttgatagaggattgtatatctagttggtatgttggtgatcacctttgttttgttttttaggaaccaagcctactacatgcattattgtctgtacccaaatgccaagttcagtgatctcctacgggattgagtggtgcgggcattttctaataataagccaagcccgtgagcaagatgtaggcgtgaacagtgttcgtcagtcgccgccaccgtctcccctcctgatccaatccaatggcgcgcctccacctcgtagccgtggcaatgggcttgctcttggccttgacgacggcgcaggcaccgggcgcgtccacgatgcccgcgcccatggcgcagcctccggcgacctcggcgcctcctcgtcccgcgccatccccgacccagaagaccgctccagctccggcgcccaatgccacggtacccgcccccgcctcgccgccggcgccgagctctatcgggcagacgccgaccgaggcgccgtcctcccctccgccgcccagcgccgcgtccagcgttgcctccgccttgtacgtggccgccgctatggcggctgtcgtgtttttcttctgaggtcggtactcggcgccgatggatccgccgcctatggtatggtacggtgcggtgtggatttgacacgatggctcccgctaccgctggtcgagtttgcttattaggatactagtagttaattaatagttgggttgatcagatcagatctagcgtttttgttgagtggggatattatttcttctacggatctgcacactagggttatgtcactatggttgccattgttattagggaaggtgcaaacttctaatttgaatcacatgatgttgatccaagggacgcataagggacgccaagcttattaaaacgataaaacgatggaacgctcatgggtgaaattttgacttttaaacgtttaaactttgtttaaacatagttttaaacaacataggaaaaataccaatatatcataatttcag

SEQ ID NO: 200600 - DNA, 4174 bp, Zea Mays
gtccacccattctcctggccgctcttccccttcgtcgtcgcactccgctagctcacctcctcgtccccatataaaccatatccctctccgggccccgcgcagccgccggcgacaagcgcgcaggagcagcagttgtcgcgcctcactgatggcgaccgccgtggcgtcgcagccgtgccaccttcccctcagcgccggcggagatcccaggtgcgcggccagcacttcgaatgttcatactctggagaaagtatatggtttcagattcatatgcagaagcattgttgatgtaaagactcacaaattccactcccgcatttcaaagaggaagtgctacttgaggaactcactgtcggagtgtgacaggaccatccacagtggtagatggttggagtttcggagacacaagggagtcttccagagaactagaaggatggttcacattattccattggcttctgatggtgatggcaaccatatatctgttaatggagctctgcaagttggttctacaagcaacattgatgaaataaagttgaaattgaataaagcattgcagagtgaagatatcagcaatggactcgtccagtcgatacatgatgctgcaagatctattgagttggctctcatagagcacagcaaattgccaaagagctcttggtttccaaagacatggctaggcgttgagaacaatgcttggataaaatcactgtcttaccaggctgctgtagactcattgttgaaagcagttatcgatgtttcatctcgtgggaatgacagagatagagatattaatgtgtttgttcaaaggagtttgtcccgcctgctcaccccccttgagagtgttatcaagaatgaattatctaagagggaacctgcattgtatgaatggtattcatccgatcaaaatcctttggtggtgagacaatttgtaaacatttttgaaaatgatccaatgttttactctgctacagcaatatgccttgaaggcgagccgatgaatactagtgaaagtgatctttctctgcttatgctaggtttgatctgtcttgctgcaatcacaaagtttggatcagcaaaagtttcttgtcagcaattctcttcaatggtgcctgatattattggtcgattcatggatatgcttcttgagtttgcccctctaagtaaagcatataacttggcgaaagatattggtcttcggagagaatttttgtataattttggtcctcgtgctgctgttcctaaacttggcaatgaccatggacttgaaatatcattttggattgaactggtgcagaagcaattactctgggctcttgatcgtgaaaagatatggtcaagactgacaacaagtgaaagcattgaggttctggaaaaggatcttgcaatatttggtttttttgttgctttgggtagaagcacacaaggatatttgtctttcaagggtttgactgatttggatgattcactgaatggtattgtaaggtatcttatcggtgggagtgtactatattatccacagctgtcctcgattagttcatatcaactgtagtctgtgaagagctcgagtggcttcctttttacaatgatgatgttttaagtgcaaaaactgatactgaaggtagagaagaagtgcctaaaggagaagtcatatcaagagtcctaaatgtgtgctcttactggatgactagttttacaaagtacagctcatggcttgagaacccttcaaatgtgaaggctgcaaagttcctttctaagggacatgtcatgttgagtgactgcatgaaggagcttgacatatcaagaaatatgtcaaacgacagtggcttcctagaacctgaagaagaattggatactggaacagaattagcttcctttgacaagtcgcttgaaaatgttgaagaagctctggttaagttagaaaatttgcttcaagaattacatgtttccagttcgcactctggtaaggaggatctgaaggctgcatgctctgatcttgaaatgataagaagactgaagaaagaagctgagcttcttgaggcatcctttctagcaaaagcagaatatctggaggccgatgcaagtagcggatcactatctcctgcagaggaaggacctgtaaagacaagtagcaggacgaacgatacatcagcaccacaaaaaacaggaagcagggtggataataaacgtcgcccattttgggacttctttggtcggtctttgaaagttgatccagctcttgcagatcaggatctgatcactgtcgccaatgtggagaaggaaggcatggagtcaaatgacatcctccgcttcgaacagttaagacgtgagctgattgagttagaaaagagagtgcagaagagtgcggatgaagctcaaaaggaggaggagatggttgtcgcagaaaaaacaactgcaccatcgcctggatcatcagtttcttctcgtcagactaccaagaaagaaaatgtcataactaaatcagtggagaaggtcaaagagactacaacgactgtgttgcaggggacacaactattagcaattgatacaggagctgctatgggtttgctaaaaagagctcttattggggatgaactaactcagaaggaaaagcaggctcttcaaagaacattgacagatttggcgtctgtcgttcctataggaatactcatgcttttgccacttaccgccgttggtcatgctgctattttggctttcatccagagatatgtgccatcgatgatcccgtccacatatgcccccggtaggttggatctccttaggcagattgagaaggttaaggaaatggaagttgctgaaggcagcagtgaagatatattggaggaactgaacaaatgaaataagctgggcatgtacagatggacatgattatactgcttagcttacggtctttcctgtaaagttgttttggaacaagacatttgagggggtttgttttatctaaagattctttgaatggcatacccgctggaaacagaagtgcaaggccctaggaataagtaaccaatcattgtgtcgacaaatgttccacgtctgcaggctggtgtatacataaaacatactccacattatacattacatgggcggctcacggtgcccttcaacatagtagaggatgaatgtccaagttcctcctggacagtgttctgtgtagggtagtggttttgatagaggattgtatatctagttggtatgttggtgatcacctttgttttgttttttaggaaccaagcctactacatgcattattgtctgtacccaaatgccaagttcagtgatctcctacgggattgagtggtgcgggcattttctaataataagccaagcccgtgagcaagatgtaggcgtgaacagtgttcgtcagtcgccgccaccgtctcccctcctgatccaatccaatggcgcgcctccacctcgtagccgtggcaatgggcttgctcttggccttgacgacggcgcaggcaccgggcgcgtccacgatgcccgcgcccatggcgcagcctccggcgacctcggcgcctcctcgtcccgcgccatccccgacccagaagaccgctccagctccggcgcccaatgccacggtacccgcccccgcctcgccgccggcgccgagctctatcgggcagacgccgaccgaggcgccgtcctcccctccgccgcccagcgccgcgtccagcgttgcctccgccttgtacgtggccgccgctatggcggctgtcgtgtttttcttctgaggtcggtactcggcgccgatggatccgccgcctatggtatggtacggtgcggtgtggatttgacacgatggctcccgctaccgctggtcgagtttgcttattaggatactagtagttaattaatagttgggttgatcagatcagatctagcgtttttgttgagtggggatattatttcttctacggatctgcacactagggttatgtcactatggttgccattgttattagggaaggtgcaaacttctaatttgaatcacatgatgttgatccaagggacgcataagggacgccaagcttattaaaacgataaaacgatggaacgctcatgggtgaaattttgacttttaaacgtttaaactttgtttaaacatagttttaaacaacataggaaaaataccaatatatcataatttcag

SEQ ID NO: 200601 - DNA, 3862 bp, Zea Mays
gcgcggccagattcatatgcagaagcattgttgatgtaaagactcacaaattccactcccgcatttcaaagaggaagtgctacttgaggaactcactgtcggagtgtgacaggaccatccacagtggtagatggttggagtttcggagacacaagggagtcttccagagaactagaaggatggttcacattattccattggcttctgatggtgatggcaaccatatatctgttaatggagctctgcaagttggttctacaagcaacattgatgaaataaagttgaaattgaataaagcattgcagagtgaagatatcagcaatggactcgtccagtcgatacatgatgctgcaagatctattgagttggctctcatagagcacagcaaattgccaaagagctcttggtttccaaagacatggctaggcgttgagaacaatgcttggataaaatcactgtcttaccaggctgctgtagactcattgttgaaagcagttatcgatgtttcatctcgtgggaatgacagagatagagatattaatgtgtttgttcaaaggagtttgtcccgcctgctcaccccccttgagagtgttatcaagaatgaattatctaagagggaacctgcattgtatgaatggtattcatccgatcaaaatcctttggtggtgagacaatttgtaaacatttttgaaaatgatccaatgttttactctgctacagcaatatgccttgaaggcgagccgatgaatactagtgaaagtgatctttctctgcttatgctaggtttgatctgtcttgctgcaatcacaaagtttggatcagcaaaagtttcttgtcagcaattctcttcaatggtgcctgatattattggtcgattcatggatatgcttcttgagtttgcccctctaagtaaagcatataacttggcgaaagatattggtcttcggagagaatttttgtataattttggtcctcgtgctgctgttcctaaacttggcaatgaccatggacttgaaatatcattttggattgaactggtgcagaagcaattactctgggctcttgatcgtgaaaagatatggtcaagactgacaacaagtgaaagcattgaggttctggaaaaggatcttgcaatatttggtttttttgttgctttgggtagaagcacacaaggatatttgtctttcaagggtttgactgatttggatgattcactgaatggtattgtaaggtatcttatcggtgggagtgtactatattatccacagctgtcctcgattagttcatatcaactgtatgtggaggtagtctgtgaagagctcgagtggcttcctttttacaatgatgatgttttaagtgcaaaaactgatactgaaggtagagaagaagtgcctaaaggagaagtcatatcaagagtcctaaatgtgtgctcttactggatgactagttttacaaagtacagctcatggcttgagaacccttcaaatgtgaaggctgcaaagttcctttctaagggacatgtcatgttgagtgactgcatgaaggagcttgacatatcaagaaatatgtcaaacgacagtggcttcctagaacctgaagaagaattggatactggaacagaattagcttcctttgacaagttcgcactctggtaaggaggatctgaaggctgcatgctctgatcttgaaatgataagaagactgaagaaagaagctgagcttcttgaggcatcctttctagcaaaagcagaatatctggaggccgatgcaagtagcggatcactatctcctgcagaggaaggacctgtaaagacaagtagcaggacgaacgatacatcagcaccacaaaaaacaggaagcagggtggataataaacgtcgcccattttgggacttctttggtcggtctttgaaagttgatccagctcttgcagatcaggatctgatcactgtcgccaatgtggagaaggaaggcatggagtcaaatgacatcctccgcttcgaacagttaagacgtgagctgattgagttagaaaagagagtgcagaagagtgcggatgaagctcaaaaggaggaggagatggttgtcgcagaaaaaacaactgcaccatcgcctggatcatcagtttcttctcgtcagactaccaagaaagaaaatgtcataactaaatcagtggagaaggtcaaagagactacaacgactgtgttgcaggggacacaactattagcaattgatacaggagctgctatgggtttgctaaaaagagctcttattggggatgaactaactcagaaggaaaagcaggctcttcaaagaacattgacagatttggcgtctgtcgttcctataggaatactcatgcttttgccacttaccgccgttggtcatgctgctattttggctttcatccagagatatgtgccatcgatgatcccgtccacatatgcccccggtaggttggatctccttaggcagattgagaaggttaaggaaatggaagttgctgaaggcagcagtgaagatatattggaggaactgaacaaatgaaataagctgggcatgtacagatggacatgattatactgcttagcttacggtctttcctgtaaagttgttttggaacaagacatttgagggggtttgttttatctaaagattctttgaatggcatacccgctggaaacagaagtgcaaggccctaggaataagtaaccaatcattgtgtcgacaaatgttccacgtctgcaggctggtgtatacataaaacatactccacattatacattacatgggcggctcacggtgcccttcaacatagtagaggatgaatgtccaagttcctcctggacagtgttctgtgtagggtagtggttttgatagaggattgtatatctagttggtatgttggtgatcacctttgttttgttttttaggaaccaagcctactacatgcattattgtctgtacccaaatgccaagttcagtgatctcctacgggattgagtggtgcgggcattttctaataataagccaagcccgtgagcaagatgtaggcgtgaacagtgttcgtcagtcgccgccaccgtctcccctcctgatccaatccaatggcgcgcctccacctcgtagccgtggcaatgggcttgctcttggccttgacgacggcgcaggcaccgggcgcgtccacgatgcccgcgcccatggcgcagcctccggcgacctcggcgcctcctcgtcccgcgccatccccgacccagaagaccgctccagctccggcgcccaatgccacggtacccgcccccgcctcgccgccggcgccgagctctatcgggcagacgccgaccgaggcgccgtcctcccctccgccgcccagcgccgcgtccagcgttgcctccgccttgtacgtggccgccgctatggcggctgtcgtgtttttcttctgaggtcggtactcggcgccgatggatccgccgcctatggtatggtacggtgcggtgtggatttgacacgatggctcccgctaccgctggtcgagtttgcttattaggatactagtagttaattaatagttgggttgatcagatcagatctagcgtttttgttgagtggggatattatttcttctacggatctgcacactagggttatgtcactatggttgccattgttattagggaaggtgcaaacttctaatttgaatcacatgatgttgatccaagggacgcataagggacgccaagcttattaaaacgataaaacgatggaacgctcatgggtgaaattttgacttttaaacgtttaaactttgtttaaacatagttttaaacaacataggaaaaataccaatatatcataatttcag

SEQ ID NO: 200602 - DNA, 3576 bp, Zea Mays
gttattttggttttttgcacctttgtgctgcccggaactctgttgggagggtgcttttctaatttaagcattttgtcccgcctgctcaccccccttgagagtgttatcaagaatgaattatctaagagggaacctgcattgtatgaatggtattcatccgatcaaaatcctttggtggtgagacaatttgtaaacatttttgaaaatgatccaatgttttactctgctacagcaatatgccttgaaggcgagccgatgaatactagtgaaagtgatctttctctgcttatgctaggtttgatctgtcttgctgcaatcacaaagtttggatcagcaaaagtttcttgtcagcaattctcttcaatggtgcctgatattattggtcgattcatggatatgcttcttgagtttgcccctctaagtaaagcatataacttggcgaaagatattggtcttcggagagaatttttgtataattttggtcctcgtgctgctgttcctaaacttggcaatgaccatggacttgaaatatcattttggattgaactggtgcagaagcaattactctgggctcttgatcgtgaaaagatatggtcaagactgacaacaagtgaaagcattgaggttctggaaaaggatcttgcaatatttggtttttttgttgctttgggtagaagcacacaaggatatttgtctttcaagggtttgactgatttggatgattcactgaatggtattgtaaggtatcttatcggtgggagtgtactatattatccacagctgtcctcgattagttcatatcaactgtatgtggaggtagtctgtgaagagctcgagtggcttcctttttacaatgatgatgttttaagtgcaaaaactgatactgaaggtagagaagaagtgcctaaaggagaagtcatatcaagagtcctaaatgtgtgctcttactggatgactagttttacaaagtacagctcatggcttgagaacccttcaaatgtgaaggctgcaaagttcctttctaaggggtttgtaattatttggtcacgacaatgcgtatctatctcttgtttgcagatagggatttgtttttgtttttctaaaaagcagatacggatttgtgagtactgattaattttctactgcatgttaataattgtagacatgtcatgttgagtgactgcatgaaggagcttgacatatcaagaaatatgtcaaacgacagtggcttcctagaacctgaagaagaattggatactggaacagaattagcttcctttgacaagtcgcttgaaaatgttgaagaagctctggttaagttagaaaatttgcttcaagaattacatgtttccagttcgcactctggtaaggaggatctgaaggctgcatgctctgatcttgaaatgataagaagactgaagaaagaagctgagcttcttgaggcatcctttctagcaaaagcagaatatctggaggccgatgcaagtagcggatcactatctcctgcagaggaaggacctgtaaagacaagtagcaggacgaacgatacatcagcaccacaaaaaacaggaagcagggtggataataaacgtcgcccattttgggacttctttggtcggtctttgaaagttgatccagctcttgcagatcaggatctgatcactgtcgccaatgtggagaaggaaggcatggagtcaaatgacatcctccgcttcgaacagttaagacgtgagctgattgagttagaaaagagagtgcagaagagtgcggatgaagctcaaaaggaggaggagatggttgtcgcagaaaaaacaactgcaccatcgcctggatcatcagtttcttctcgtcagactaccaagaaagaaaatgtcataactaaatcagtggagaaggtcaaagagactacaacgactgtgttgcaggggacacaactattagcaattgatacaggagctgctatgggtttgctaaaaagagctcttattggggatgaactaactcagaaggaaaagcaggctcttcaaagaacattgacagatttggcgtctgtcgttcctataggaatactcatgcttttgccacttaccgccgttggtcatgctgctattttggctttcatccagagatatgtgccatcgatgatcccgtccacatatgcccccggtaggttggatctccttaggcagattgagaaggttaaggaaatggaagttgctgaaggcagcagtgaagatatattggaggaactgaacaaatgaaataagctgggcatgtacagatggacatgattatactgcttagcttacggtctttcctgtaaagttgttttggaacaagacatttgagggggtttgttttatctaaagattctttgaatggcatacccgctggaaacagaagtgcaaggccctaggaataagtaaccaatcattgtgtcgacaaatgttccacgtctgcaggctggtgtatacataaaacatactccacattatacattacatgggcggctcacggtgcccttcaacatagtagaggatgaatgtccaagttcctcctggacagtgttctgtgtagggtagtggttttgatagaggattgtatatctagttggtatgttggtgatcacctttgttttgttttttaggaaccaagcctactacatgcattattgtctgtacccaaatgccaagttcagtgatctcctacgggattgagtggtgcgggcattttctaataataagccaagcccgtgagcaagatgtaggcgtgaacagtgttcgtcagtcgccgccaccgtctcccctcctgatccaatccaatggcgcgcctccacctcgtagccgtggcaatgggcttgctcttggccttgacgacggcgcaggcaccgggcgcgtccacgatgcccgcgcccatggcgcagcctccggcgacctcggcgcctcctcgtcccgcgccatccccgacccagaagaccgctccagctccggcgcccaatgccacggtacccgcccccgcctcgccgccggcgccgagctctatcgggcagacgccgaccgaggcgccgtcctcccctccgccgcccagcgccgcgtccagcgttgcctccgccttgtacgtggccgccgctatggcggctgtcgtgtttttcttctgaggtcggtactcggcgccgatggatccgccgcctatggtatggtacggtgcggtgtggatttgacacgatggctcccgctaccgctggtcgagtttgcttattaggatactagtagttaattaatagttgggttgatcagatcagatctagcgtttttgttgagtggggatattatttcttctacggatctgcacactagggttatgtcactatggttgccattgttattagggaaggtgcaaacttctaatttgaatcacatgatgttgatccaagggacgcataagggacgccaagcttattaaaacgataaaacgatggaacgctcatgggtgaaattttgacttttaaacgtttaaactttgtttaaacatagttttaaacaacataggaaaaataccaatatatcataatttcag

SEQ ID NO: 200603 - DNA, 1905 bp, Zea Mays
cctgggggcgcctcctgctacagcagatggtcccgtctcccgattcatcagatcccgacgcccccaccgacgccgttcactgttccctccgtccaaaaataaatccagcgtagaaacttgaaagatgaataaaactgctcctacgaaacgttcgcctgaaacccacacaggtgctgcggatggggaagaagcataggttctcaaagcctgaacggcgcgcggctgggggcatcggttgcgtctgcgtgtgctcgtccgatcgatcgaagtgacacccatgttgctgatgatcatcgtggatgacgccgggtcattcattccggcgatgaaccactccccctgggatggcgtaacagtggccgacttcgtcatgcctttcttcctcttcatcgtcggagtcgccctggcgctcgcgtacaagagagtcccggacaagttggacgccacgaaaaaggcagtgctccgtgcactgaagctgttttgtcttggtcttgtcctacaaggtggtttttttcatggtgttcgcagtctaacttttggtgtcgaccttcaagaaatacgtctgatgggtatacttcagagaattgcaatagcttatctgttgactgccctatgtgaaatttggctcaagggagatgaagatgtagattatggatacgatttgctcaagcgataccgctaccaactgttcgtaggcgcaatcgtggggatcacatacatgtctctgttgtacggtacatatgtccgtgactgggagtaccagacatcaggccctggctccatagagaagtctttctttgtgaaatgtggagtaagaggtgacaccagcccaggctgcaacgcggttggcatgatcgaccgtagaatcttgggtatccagcatctctacgggcggccagtttatgcacgatccaagcaatgcagcatcgactcgccacaaaatggcccccttcctcctgatgctccctcttggtgccaggcccccttcgaccctgaagggcttcttagttccgtgatggccattgtcacatgcttgattgggctccaatacggacacgtcatcgtacattttcagaaacacagggagaggataatgaactggctaatcccttccttcagcatgctggtcctagccttcgccatggacttccttggactgcgcatgaacaagccattatacaccctaagctacaccttagccaccgctggcgccgcagggctcctcttctgcggaatctacacgctggtcgacatctacgggtatcggcggccgaccgtcgccatggaatggatggggatgcacgcgctgatgatatacgtcctgatcgcttgcaacatcttgcccatattcatccacggcttctattggaaggagccccaaaacaaccttctgaagttcatcggaattggaccatgaggtgatgaactgatgacggacggtacatcgaatgcggatattaggagtctactccgacagagatagagaaacacgtgcattcaggccaagttttgctatacggccaatgcatcattgctgcgcacagagtgcgtctcttgtatatgataaaaagcctgctgtatataatgacgataccgtttggaaggaaaaatatagtagtatagagatcttacgtgaatgacggcggaaattctcaccgaagtcgcaaaattgtcacgatagtccgcgcagggggcgagcgcgcagctccatactgggatagagccactcggctcataatttgttgtgtttagattgattatatgtagaacgtagtggttttaaaatagaaaattatatttaaatgttcaaccatttagctgctcaaaatctcttgaacggagccgctcccggaacggagccgctccattccaaccggcgccggaaccaaatgctacctacaaaac

SEQ ID NO: 200604 - DNA, 1649 bp, Zea Mays
atatttatctccataaatgcatataagctgatgatcatcgtggatgacgccgggtcattcattccggcgatgaaccactccccctgggatggcgtaacagtggccgacttcgtcatgcctttcttcctcttcatcgtcggagtcgccctggcgctcgcgtacaagagagtcccggacaagttggacgccacgaaaaaggcagtgctccgtgcactgaagctgttttgtcttggtcttgtcctacaaggtggtttttttcatggtgttcgcagtctaacttttggtgtcgaccttcaagaaatacgtctgatgggtatacttcagagaattgcaatagcttatctgttgactgccctatgtgaaatttggctcaagggagatgaagatgtagattatggatacgatttgctcaagcgataccgctaccaactgttcgtaggcgcaatcgtggggatcacatacatgtctctgttgtacggtacatatgtccgtgactgggagtaccagacatcaggccctggctccatagagaagtctttctttgtgaaatgtggagtaagaggtgacaccagcccaggctgcaacgcggttggcatgatcgaccgtagaatcttgggtatccagcatctctacgggcggccagtttatgcacgatccaagcaatgcagcatcgactcgccacaaaatggcccccttcctcctgatgctccctcttggtgccaggcccccttcgaccctgaagggcttcttagttccgtgatggccattgtcacatgcttgattgggctccaatacggacacgtcatcgtacattttcagaaacacagggagaggataatgaactggctaatcccttccttcagcatgctggtcctagccttcgccatggacttccttggactgcgcatgaacaagccattatacaccctaagctacaccttagccaccgctggcgccgcagggctcctcttctgcggaatctacacgctggtcgacatctacgggtatcggcggccgaccgtcgccatggaatggatggggatgcacgcgctgatgatatacgtcctgatcgcttgcaacatcttgcccatattcatccacggcttctattggaaggagccccaaaacaaccttctgaagttcatcggaattggaccatgaggtgatgaactgatgacggacggtacatcgaatgcggatattaggagtctactccgacagagatagagaaacacgtgcattcaggccaagttttgctatacggccaatgcatcattgctgcgcacagagtgcgtctcttgtatatgataaaaagcctgctgtatataatgacgataccgtttggaaggaaaaatatagtagtatagagatcttacgtgaatgacggcggaaattctcaccgaagtcgcaaaattgtcacgatagtccgcgcagggggcgagcgcgcagctccatactgggatagagccactcggctcataatttgttgtgtttagattgattatatgtagaacgtagtggttttaaaatagaaaattatatttaaatgttcaaccatttagctgctcaaaatctcttgaacggagccgctcccggaacggagccgctccattccaaccggcgccggaaccaaatgctacctacaaaac

SEQ ID NO: 200605 - DNA, 2388 bp, Zea Mays
atcgtagcccaaacatttcattagctagctctgaagataagagttgtaggaagctgaactctgcctcgctatcttcagttccgtcacagagtttcagtagttcagttttctccaacatcttatcttcagctcctctatcggtagctgttgcagagtgaagtacatgtgatgagttagcttggttaggcttggacatgacttgtctgaagaatttgaagctgaaggtgagtgttggagggaaccaaatctccagctgcatgcacagcacaagagtgaccaaatacagtattttcagttaaccaaatagtgagctacaattgattggaagctaatggtatctgagttgctccatatcttgttatacaattgattggaagctacaagcaagataggtgatatcactatctggaatatgtaaatggtgtggacaaataaaatatgagaactatgattgaaaacataatattattaattatccactatatgcaccacatcaattttgtaaacatatttatacaccgattagaatgttttgaattttttttgtattttattggacaccttttttttgtttatttccactgttgctcgccctctctaattgtcttctgtttgagtgtttaccaacactggtcggctcgagaaaaaattctgggagaagaaaagaaaagggagagggcagtagtgtggactgtggaggacggtgtggtgcttcagctttcatcatgctagatgctggtgtttgccaatcttaagcctcagtctgatttctgggcagttgtgtgttcgcctctgtggcagtttgttgttgttgttgtatcggaccagattgagagttgaattgtagttcatggcatcatgatatatagaaaccatagcaacacacgtgcatctaactagttaatgtattaagcaccagtaaaagaacacaggcagttataattttcttgttatctttgtattatcctttcttgactttttgtcattttagtttccagttatggtgtttttggtctgttcagtttaattcaattccatttgtgtttcgtgtaatgcaatgcctgcttatttggtgctgtttgattcacatatttgtaacgtgaacggtaaccggttaaaccatgtttgtttaagtccaaccgtaatcagatactacactaaaaaccgataccgtcctacactaagaactgatactgtcctattcaaacatgtcaccgctggtaatcgagtgtgtttcaattggtggttagtgggtagtataagactaagtttcacctatgacatcttatattgttttgtaggtctctcgtttgcataccagctcttgtatctgttggatgcaactgcattttatagtccagcactacatgtacttgggattcatgtttgtcgtgctactggacaagagctgatggattcatcttctaggatatcaaggattagaagtcgtgaacttgagaggcttcgcggtcctccatggttcaaggctgtgcaacgagtgttccttagttgtgtgtacacaactctagattatgcacaaaccggtttaattgctgcagtcttctttttcaagatgatggagtggtggtatcaatctgctgaagaaagaatgtcagctccgactgtatatccaccaccccctcctcctccaactcctaaggttgccaaagacgggattccgttgccacctgacaggacgctctgccccctgtgctgccagaagcgtgctaacccctccgttctttctgtttctggttttgttttttgctacagctgcatattcaaatctgtctcacaggtggggagttctacagatctatagtatgccaaagccaaattgtctctccatcaccagcttacgtgactttgtcttgtgttccagcataaaaggtgccctgtcacgctaatgcctgccggcgttgagcaaatcaggcgtctcttccacgatttgtagccatggaagacccgaaaacttcttttctaaagaccagggacgtcagcaactcagcatacagaaacatatatcagaaccaccattttgtaaactataagaaactcagcatacttttttaagcaaatgcatggatggcactttcttcccgatttcctttgtacggttattcttcgtccattggaaattgcacaggaaaagcaagctggagtttgagcttgacagtcttaggttgggggtgtataatctgttgttaggtgatactagcatatccattgagataggctgttgttaggtgatactagcatatccattgagataggcgttaattgtgtacctgcatgactgtatccactctcttcatttgtttgtaaaaaaaactgtctgtaattttggattggtcctgctcgacgtcacttatattggctgtttggagt

SEQ ID NO: 200606 - DNA, 2633 bp, Zea Mays
atgcctgcgacagtggtcgcgcttgtcgtcctctcccgctcgatcgtcgtcgccgaccggatctggttaccgccgcaaatgcatccacaccgcaccctgcgcttggggaggagggcgcgatgggatcaggagaactcggccaccttccatcgacggcgtggggaggcggatcccctgcgcttggggaggagggctcggatgacggggaccgcggagcagagaaaatgggagctgaaagtgttccgagtgccaaccgcaaccgtaaatttcacaagtggagagggcatgagcgcaaaaggcaacaatcttagcacagcagcaccaaagcgcgtcgtgtcgtgcaaatccaactttgataccactcgctgcctggttatggactccaccaggagcaaccaggtcgccggcagatgcaacagcaccatcgcgtcaagggctgccacggtcccgccgtcgctgaccatgccgcgcggcgaactcgctgacgccatcgtgggcggaggcggaggaggaggagcggacggggacccccgggccgccctcctccgtctgtctgctctcggggaccgcatggccgccgtccggggccgtatctgcgcctctatctcgggcgaagcccggcctctctcctacgccgacatccaatctgtctcctccgagatctccgccgctgcccagctcgtcgtcctcaacgccgccgagctcctcgcttcctccgtcccctttcccgccccacctccacctcctccttccgccgctccctctcccgctcccgtccgagagatcccagttgtggccgcttccgcccaagagcaacccctggaggccgccaaggacgacggtggctacgaggtcgtggagctcgacgccgccgagctgctagcggagcacgtccacttctgcgagatctgcggcaagggcttccgccgcgacgccaacctcaggatgcacatgcgcgcccacggcgaccgcttcaagaccctagacgcgctctcccgccctggtcacggccagccgaagccgcccgttggcagcaacgtgcgcttctcctgcccctttgcgggctgcaacaggaaccgcacacaccgccgcttccggccgctcaagtcggcggtgtgcgcgcggaaccacttccggcgcagccactgccccaagctctacgcctgcgagcgatgtggcggcaagaagcgcttcgctgtcctggcggacctccgcagccacctccgccactgcggcgaggaggcacagtggcgctgctcctgcggcaccaccttctcccgcaaggacaagctcttcggtcatctagcgctctttgaaggccacacgccagcagttactaagccaaacaaggatgtggtgacagggcctacagagtccaccattgatgctatggaggaagggggatttgaagaaggcattcctgaccgggaggaggatgaagagggcggttatgatccagagttcttcaaggagtggatggatgagctcagaggtggtgctggtggctccaattggcctggaccagcagcagatggacattagcaatgttgcgagggttaataggaattattcggcaagccaaccaacctagttgtgatgttatgaatatgtcagcttgattgtctagcaagtcatcctcatacaaaaagtgtaagattcaggtgataaatattataattagtcctattgtggaagaatgtaaacaacaaatgagtctatgactattatcaagagagcagagctagtgctagaggatcccacatgagtggggttgagaggagggataaaccaaggcaagcctccccccaatgtggagagactgcttcgatcccgcgacctggtaactcagtgaagcagctctcaccagtcaccactacatcaggcctgctcctcaagagatgaaacttttttgttaaacttttgccaagaactctgactagaatgaacagcatgtagcttgaattcaatggtggctgcacttataaatggtttgacaagggacatctgcttacatcaagtgaccaggaggatcaataaagactgaataaaggtgatagtaaagaaaagaggtgctttgggatagtttgtaggatttctctttaccattgtgtttgtgcgttcgttctaaccagtagcttgtatggtatggtgcgtgtgttgtttagttgctgttcactgggcctctcccttgccattctcggttgctttcatgttatcctgtgaatttgtgatctaccaggtaatacagtggagaactgtgtcatgctctgtaagcgttctccttggctgtgtgggtcatggagttgccgattactgaggaagaaggatagcttgcaggaaaacggtggcaccagttccctgtgcgctgctgaggatgcgaagtattcgggggagttttagaaaaatactttggttttgtgaaacaatttgattttagaatgtattgatgtgtttggacgcaacaaactttagtatttgttagaaagttaggcatttttagttttaatttaatccagaaaaacagtgcgatatatgtgatgacatgtatgtgcatgtgtgtataactactcgcataagcagtaaacagcaatgaaacatgcacaaatacgaagaacagagtgtacccagcggag

SEQ ID NO: 200607 - DNA, 953 bp, Zea Mays
cccgcgcaagccttgggtgtctgccttactggtggcccccccgggcaccagctcctccttcactaccgtaaccgtaacaaacaaccagcgcaggattatcaccgccatcgtcagggttgttatcggcctccctcttcccccaaccgagatcctaggagataaatcagagccccagcgaccttttccccctctattaccctctcgcgagccctgaccagcaaatcatctaccgtcgggtgctatcaccaccgcgaaatcgagatttagagaggggagatccgccgctagtgagctcgcaaatcgcggttacccaggtcttggcatggtgttctggtgtggtggcacggtgcctaggagccatggctgccatcccgccgctggaccattggcgcttgggcgattgctcgccgggcttgggaattaccgttgtgccatgctatgtcggggaccaagctcacctcaatcaaatcaccggtgaagagcaggtggcccaggaggaggactactatgaggagtgttgggggtcttcttccctgccaaaggtcctcaaggaaaaaacaccttcggacaagacaatacaaaggcatacacgacatgatgacacggatggaagccgaagctatggctgaaggagcttcggcttagtaatatgacgaagccaaaggtcgtcaccgactcaagggaaaaagactgtttagtccttgatcactcacattatgattgcatgtaaatgttggggacataaatgtaattatttcccgggctgtgtcccgcgcttataaatagatgaatagtacccccgtactgttcacgctggattgtaatctctctcatgcaccatctttgcattctcatcttctagcgaaccgaaggtacaattgtattaaataccattaatgtcaattcttacatgtgaatatgaatatgaataaattgtgaggatctgatcatta

SEQ ID NO: 200608 - DNA, 1650 bp, Zea Mays
acgagcgagaactgttgtcatttcatgagacgttactcgggatgcacttgtaacgggatagtgtagtagcaagcataggagtaaggagttttgctagtcttcttcagcttcagtagttcagtccaatcacagatcgcagtacaactgaacccgcctcccgcacaaggcatccaggatttgttcggccttcggacttcggagggtagagaatcgaagcgacgagaacaaagcaatgaacgaggcggtgcaggaggcgaagctgctgcggcaggtgaacgcgctcatcgtggcacacctccgtagccagaacctcgggcaggccgcagccgccgtcgccgccgccaccatgacccccatctccgctgccgaatccgtccccgccaatcacctcctgcgtctcgtggccaagggcctcgccgcggagcacggaggaggtgacgccgcttccgcattcgactccgccgggttcggtgtggcggtgcagccgcccggctccagtgccgtggatttcagtattcaggatgtcaagggctcatccaaaagcttccccaagcacgaggtgaagcatgtctctgaccataagaacgctgcccggtgtgtgaaatttagtcctgatggaaagtattttgcaactgggagtgctgatacatccattaagttttttgaggttgctaagattaagcagactatggtaggagactctaaagatggccctgccaggcctgtggtacggacattttatgatcacacacaggccatcaatgatctggattttcatcctgagagtccaatactgatatcagctgcaaaagacagtacaataagattctttgacttttcaaaaaccaatgcgaggaaagcgttcagagttattcaggatactcataatgttagatctgattctagttctcccattaaccaggtacgctactcttgtactgggagcttgtatgtgactgcttctaaagatggttctctgcgcatttgggatggagtatctgctgaatgtgttcgacctattattggagcacatggatcatcagaagctattagcgcgattttcaccaaagatgagaggtacgtcctatcttgtgggaaagattctcgtgtcaagttatgggaagttggcactggacgacttgtgaagcaatatgcaggagcaattcgcagacaatttcgttgtcaggctgtcttcaatgaaaccgaggaatttgtgctatcagttgatgaacaaaacaatgaggttgtcgtctgggatgcacttactgctgaaaaggttacaagattgccttctggcagcactggtgctcctagatggctcgaccattccccagttgagccagtttttgttagttgtggaaacgatagatcgatcaaattctggaaacaaaccgtataagcttgtagattcaaccacgcaaatcaaaagagtatgttttcagtattactgtttcaggaggaatgtgctagtgtaactttagttgtatatgggagaaatttgcataagcgatttttttttgaaactgcataagcaattgtttgacctaatagcaaatcccaatcagatgtttttttttggttctgcagatgccagttatatgaaccattgacctgatttttattggtcagcctcctttcgatgttctgtta

SEQ ID NO: 200609 - DNA, 1735 bp, Zea Mays
acgagcgagaactgttgtcatttcatgagacgttactcgggatgcacttgtaacgggatagtgtagtagcaagcataggagtaaggagttttgctagtcttcttcagcttcagtagttcagtccaatcacagatcgcagtacaactgaacccgcctcccgcacaaggcatccaggatttgttcggccttcggacttcggagggtagagaatcgaagcgacgagaacaaagcaatgaacgaggcggtgcaggaggcgaagctgctgcggcaggtgaacgcgctcatcgtggcacacctccgtagccagaacctcgggcaggccgcagccgccgtcgccgccgccaccatgacccccatctccgctgccgaatccgtccccgccaatcacctcctgcgtctcgtggccaagggcctcgccgcggagcacggaggaggtgacgccgcttccgcattcgactccgccgggttcggtgtggcggtgcagccgcccggctccagtgccgtggatttcagtattcaggatgtcaagggctcatccaaaagcttccccaagcacgaggtgaagcatgtctctgaccataagaacgctgcccggtgtgtgaaatttagtcctgatggaaagtattttgcaactgggagtgctgatacatccattaagttttttgaggttgctaagattaagcagactatggtaggagactctaaagatggccctgccaggcctgtggtacggacattttatgatcacacacaggccatcaatgatctggattttcatcctgagagtccaatactgatatcagctgcaaaagacagtacaataagattctttgacttttcaaaaaccaatgcgaggaaagcgttcagagttattcaggatactcataatgttagatctgtatgttttcatccttgtggggattaccttttagcagggactgatcacccagttgctcatttatatgatataaatacttttacatgctacttatcagcaaatgcacaggattctagttctcccattaaccaggtacgctactcttgtactgggagcttgtatgtgactgcttctaaagatggttctctgcgcatttgggatggagtatctgctgaatgtgttcgacctattattggagcacatggatcatcagaagctattagcgcgattttcaccaaagatgagagattctcgtgtcaagttatgggaagttggcactggacgacttgtgaagcaatatgcaggagcaattcgcagacaatttcgttgtcaggctgtcttcaatgaaaccgaggaatttgtgctatcagttgatgaacaaaacaatgaggttgtcgtctgggatgcacttactgctgaaaaggttacaagattgccttctggcagcactggtgctcctagatggctcgaccattccccagttgagccagtttttgttagttgtggaaacgatagatcgatcaaattctggaaacaaaccgtataagcttgtagattcaaccacgcaaatcaaaagagtatgttttcagtattactgtttcaggaggaatgtgctagtgtaactttagttgtatatgggagaaatttgcataagcgatttttttttgaaactgcataagcaattgtttgacctaatagcaaatcccaatcagatgtttttttttggttctgcagatgccagttatatgaaccattgacctgatttttattggtcagcctcctttcgatgttctgtta

SEQ ID NO: 200610 - DNA, 3083 bp, Zea Mays
tttggctgttataaaaccactctactttcttcgggattgtcggacaacgcttatctccttgtaggtgaagtgttgaaaaagattgtggctctggcccctttcttctgttgccatttcataaatgagcttgcacgatcaatgcaaagcttgacactttgtgcaatgaaggagcttcgtttgtacgagaattctgaaaaggctcttcttagttctacatcagccaatggaactgcgattcttagagttgtgcaggctttgagttctcttgtcagtactcttcaagatagaaaggatccagaacagcctgctgagaaggaccattcagatgcagtttcccagatttctgaaattaacacagcattggatgctttgtggttggaattgagcaactgcataagcaaaatagaaagctcttcagagtatgcatcaaatctaactcctgcttctgcaagtgcagctacattaacagcaggagtagcacctccattgcctgcaggaacgcaaaataggcgtactcaaggcttgctggggcgcagcgggattcgcaggcggggcgcagcgggatttggcatcggtgatggcgcagaggtggctagggcgaatttgccggaggtgacaggcgcagcgggatttgcaggcggggcgcagcgggatttggcggcggcgacgcagagctgcgccagctcaccgatttatggcgatggcgcgttcgcgtctacggtctatccatctccaaaacgatgggcagctgacctacccaaccaccaagagctgaagagcaaattcctgtcccgcacatctgctcgccgcccagcgaacctgatggcgctcgtcgacgcgaaggccgccggcgcgtccacctccaccgtggccgctgcgcccacggtggagcacctgttgttcctcgtcgtcctcgacggcgtcgagacgcccatccacgaggggacgctgtacggaagcgccgggggcacagtcaccgtcaccggccctggccagctctccgccgacggcctcgagagcgtcctggtgcgcggcggcgggaccggggccggcgccgtgcggttcacgctctgcgccgacgcggccgccgagggcgtcggcgctgcgtgcttcgagcggtgcggcgcggcccgcgtggagggcgcgcgcgaggtgtccgtgtcctcgtgccgcgccgtggaagtggagcgcgcgggcagggtcaccctcgaccgctgccgcgacgcgcggctccggggcgggggcgcgctccgcgccacgcggtgccggcgcgctgacgtcgagagcttcggcggggtgcgcctggcgcggtgcaaggccgcgcgcgccgactggtgcggcaccgtcgaggtcgagctgtgcagggccgtcgacgtccgccgctgcggagctgtcaccggagagcggtgccgcgtcgtgaacgctgcagggtgcggcagcgtcgaggtggcgcgggccgtgatcaacatggtggaggaagagcagccgtacccagcagcccatccccagcagcactgcctcgtcgtctcgcatattggcgttggcatcaccgtcggcattgtgcccattaccatgccgccgctgcccgcggccgacgatttactcattctcgagttcatcgcgagcaaccgccgtatcccccacgccgtgttcaactccttcatcgcctcccaatccccaccctccgccttctcccgcacctcacagcgcctccgaaaagccctagtgctccgcgccctcgacgccgccctctacaccgtgggcgcctcctgctcctccagcctcctcctccacaaggcgcgaaaggtcctcgccgaccccgacgcagccgcctgcttcccccaccagattccttttacagaaaatgaagaaaacgatgaggctagggctgcggtggccgatctcaagcgcctcctcgaccttgagtgggccaacctcccgccctccacgctcgagctcgtcgccggggacgggtcccaccagactggtgccgctgccgaccacaccatgcgtacaaagcttcgcctgggagtcagcgaagcgtgaaattttagctaagcctgtgcaggttggatccgcttctcatcaatcaattcggacgcaagttgctgataacgcgagcaatgccaataaagctgatggcgcccggcgagatgaggcacatccttctaattctaatgtaaactatgaggctgatagtgatcgtgaaagtatggttgggcaccaaaatgcatcggttaaaggagcagagggtcaactttcagagaagtctgtctttacttctaaaaagcgcgttcttgtggagagaattccgaagtgggatagctctgatgatgatcagccagtgcggaagcgcaagttagatccatttgagagaaaaccatatccttctcctacatgtgcatataagatcagaaagaaatggagtaagatagagatagaaaccttgctggaaggggtggacaagtatggcataggcaactggaaagatatcaaattagcttaccctggtgtctttgaggagagatcaacggtagatctgaaggacaagtttagaaatttgggaaagcgccaccatgaatcgtcttgaggcttagtggcgctgtgcttttgctctgccctggagatattttatgttgatggcagtggtatgcaaaagaaggcctatgtaaggtgcatggagacatttgggtttcgtgccaaggatattgttgacttgttgagtgcactgttcttaaggcgtcgcttagacgtccaggcggaggtccaacgcctagccgccttgcccgcctaccgtacctaggcgatggtccaacgccttgtatcgtcttaccgctttaaaaaacatcgttgatggttgagtgtttaaagataagtaactggaaccccacatgatggcatgttgtcacgggcgtgcacaactcgagcacccatctggctcagaaaagcaccatgggaagatagaactctggcattggtggaatctgatgcaatggtcattgtaattctgaattgaaaattttgaaccagtgacacactaattgttcaagaagctcaatatcgtttgctccaggagtcagaag

SEQ ID NO: 200611 - DNA, 2879 bp, Zea Mays
tttggctgttataaaaccactctactttcttcgggattgtcggacaacgcttatctccttgtaggtgaagtgttgaaaaagattgtggctctggcccctttcttctgttgccatttcataaatgagcttgcacgatcaatgcaaagcttgacactttgtgcaatgaaggagcttcgtttgtacgagaattctgaaaaggctcttcttagttctacatcagccaatggaactgcgattcttagagttgtgcaggctttgagttctcttgtcagtactcttcaagatagaaaggatccagaacagcctgctgagaaggaccattcagatgcagtttcccagatttctgaaattaacacagcattggatgctttgtggttggaattgagcaactgcataagcaaaatagaaagctcttcagagtatgcatcaaatctaactcctgcttctgcaagtgcagctacattaacagcaggagtagcacctccattgcctgcaggaacgcaaaataggcgtactcaaggcttgctggggcgcagcgggattcgcaggcggggcgcagcgggatttggcatcggtgatggcgcagaggtggctagggcgaatttgccggaggtgacaggcgcagcgggatttgcaggcggggcgcagcgggatttggcggcggcgacgcagagctgcgccagctcaccgatttatggcgatggcgcgttcgcgtctacggtctatccatctccaaaacgatgggcagctgacctacccaaccaccaagagctgaagagcaaattcctgtcccgcacatctgctcgccgcccagcgaacctgatggcgctcgtcgacgcgaaggccgccggcgcgtccacctccaccgtggccgctgcgcccacggtggagcacctgttgttcctcgtcgtcctcgacggcgtcgagacgcccatccacgaggggacgctgtacggaagcgccgggggcacagtcaccgtcaccggccctggccagctctccgccgacggcctcgagagcgtcctggtgcgcggcggcgggaccggggccggcgccgtgcggttcacgctctgcgccgacgcggccgccgagggcgtcggcgctgcgtgcttcgagcggtgcggcgcggcccgcgtggagggcgcgcgcgaggtgtccgtgtcctcgtgccgcgccgtggaagtggagcgcgcgggcagggtcaccctcgaccgctgccgcgacgcgcggctccggggcgggggcgcgctccgcgccacgcggtgccggcgcgctgacgtcgagagcttcggcggggtgcgcctggcgcggtgcaaggccgcgcgcgccgactggtgcggcaccgtcgaggtcgagctgtgcagggccgtcgacgtccgccgctgcggagctgtcaccggagagcggtgccgcgtcgtgaacgctgcagggtgcggcagcgtcgaggtggcgcgggccgtgatcaacatggtggaggaagagcagccgtagtcagcttcgcctccgaaaagccctagtgctccgcgccctcgacgccgccctctacaccgtgggcgcctcctgctcctccagcctcctcctccacaaggcgcgaaaggtcctcgccgaccccgacgcagccgcctgcttcccccaccagattccttttacagaaaatgaagaaaacgatgaggctagggctgcggtggccgatctcaagcgcctcctcgaccttgagtgggccaacctcccgccctccacgctcgagctcgtcgccggggacgggtcccaccagactggtgccgctgccgaccacaccatgcgtacaaagcttcgcctgttcggggagtcagcgaagcgtgaaattttagctaagcctgtgcaggttggatccgcttctcatcaatcaattcggacgcaagttgctgataacgcgagcaatgccaataaagctgatggcgcccggcgagatgaggcacatccttctaattctaatgtaaactatgaggctgatagtgatcgtgaaagtatggttgggcaccaaaatgcatcggttaaaggagcagagggtcaactttcagagaagtctgtctttacttctaaaaagcgcgttcttgtggagagaattccgaagtgggatagctctgatgatgatcagccagtgcggaagcgcaagttagatccatttgagagaaaaccatatccttctcctacatgtgcatataagatcagaaagaaatggagtaagatagagatagaaaccttgctggaaggggtggacaagtatggcataggcaactggaaagatatcaaattagcttaccctggtgtctttgaggagagatcaacggtagatctgaaggacaagtttagaaatttgggaaagcgccaccatgaatcgtcttgaggcttagtggcgctgtgcttttgctctgccctggagatattttatgttgatggcagtggtatgcaaaagaaggcctatgtaaggtgcatggagacatttgggtttcgtgccaaggatattgttgacttgttgagtgcactgttcttaaggcgtcgcttagacgtccaggcggaggtccaacgcctagccgccttgcccgcctaccgtacctaggcgatggtccaacgccttgtatcgtcttaccgctttaaaaaacatcgttgatggttgagtgtttaaagataagtaactggaaccccacatgatggcatgttgtcacgggcgtgcacaactcgagcacccatctggctcagaaaagcaccatgggaagatagaactctggcattggtggaatctgatgcaatggtcattgtaattctgaattgaaaattttgaaccagtgacacactaattgttcaagaagctcaatatcgtttgctccaggagtcagaag

SEQ ID NO: 200612 - DNA, 3532 bp, Zea Mays
tttggaatttggaacccaacgctgcatttcccaactgggggcacacattaacctcagcctcatttctcttttatttccgctctcctccattctctgtttgctactttgcaagtctcgaacaaaacctgaagcaactcgaagcgaagccgcgatactgcgagaagcggaagcggggagggcgaggaggagcagcaatggaggcgctgctggagctcgagaagatgcagagggtgctgtccctcatgagttcacgcggcctctcccacaccgactccagctgcggcggcgctgccgctgaccgcttcctcgcccaattcctcctcttcatggtgcaaccgtttgattctcttaccctggagaataagttccttttgatctctgagctattaagaaaggctactcctaatactttggaagaagtgcagcatctcacccatctggaaggtagtggtaatagttgtgaagtaatgatgatcttacattaaccttatgagtttatccggaaattttcttgttgattgggtctggaactctgataagacataggaccctttcaaacgcagctaataaagatatatgttctggaggttcactccagccaattaagaagtttaagatgcatgccgagaaatcaaccgttcaagctatgccgatggttggttttgatgcgatggcaagagctaagtctacgcttgaagattttgtatgtattctttgtagttggtactcgtaaaaatccttaatggaaacactgccatgaattaatcctggagtgacccaggtcttctgggctgccttttagtttttcttcttttatttttctcaagagaaacctgtttaccttttcttttctcacatcaataaaatcttagcacattaggggattcctttactgtttttgctaaaaaaacactgtcatactgccttttgttgagattttgcaatgcaagtgctacaaaacaattgaaccgcttatagaggcattaagcccgtataaaaaatagcaaggtatctttgaatgtattttgttgttccattattagtcttatagagaaactgggtcacatgctgttctaaattttgatttttcctgttcaaacatgtcttttttggggggttatgagtctatcttgagcacttcctgataattatgtttccctaaagtcccttttttccttcttgagaaaacagtgtaggtcgtactttatgtttcatggtttggatgttaacaagccacaagccattttcaagtatctacctgttctttctttcacagagagttacatatatcagttagatgcttcaaatgaagactgtttacatgtagtcccagatgacaacacttcaaaagtgttgggaaagaaagaagaatctctcaatgagacatccttgtctcaaatgattgaaccccttgaagggcttcttcagtgccaaggattaatgacagaccgattgcgaactgaactcaaatcaggcattcagtattggtctctagagaggaagctctgccaagcattactaagaaatgagaagatctcgattgaagatgttatgatggcaatccatctgaaatcatttgactatcgagttcttaacctgttgatgtttcaacttactggtcagcatgtcaatgaattgcatatggacttcttgtcagtttcagaatttttggttgagatatctgatgacctgtgagtttgctctgaatcttattcccatgcatcacagcataacaaaatggtaggaactgcctacttcttaaaaatctgtcattaatgttttggtaaatttgtaaaatctgaggcaaggtagtgcatgggttaagatggaactagtgcttctattgagatgtcggtgttgtatgtaaatggaaaacaataattttaatttaaatgaaattgtgttttagttatcatgtaatctaactattaaaggatctgcggatatagaaacccaaaaacttatgcacttttgtagtgtaccttagtgtgatttatgggaaaatcatcagattagtagcgttgttatatacaatcctgtacctttttccttcttaatcaaatgacatgcagctctcctgcattgtttgagaaaaaagtgtatataagtcctcgggggtcaatataagcctagatgcaccatgtgctggacagacactatgaataactttcagtcttttttttatttgtttcacaaaccatgtcatcaattgaaatagctgtttcacccgtgacttgtttttgaatatcttgcaggtatgattatgaggtaagttgggctaccgaaactgatggtatcgtataatcttagctgtactagtgagtgtaggcctaactgttgaagaagttcaatttgttttgtaggatgacgttatgaacaatacgttcaatatccttcgcatgtttgctgcaatatatggaccattagaggcaccgaatatgctggccaagtgcataggcgaggctgaagagaaatacgagagcttctccaagaaactggatcctagtctctcaggtagttactggagaagatgtgaggaagcgacgaaggaaggcggaaaaacatcaggccatgcatatggaacatggaatatccctcgtgtgataagcaacgaagatgctttccgacgtgaaagacggagcaaacacgatgcttgtgctgtgatcacttgataggcaaatttcatgttccagacttccaggtgaaatgcagaaatgacctgcaaccgttgatgtaaggtgctaggggtctgctcagtgggaactccttgaggatatagtggtccttggcctaccttgggcccctttgatgctcacaaatgtacccattttcaagtcaaattttcacaaatgcagaaatgacatgctgaatttagtttctgtaaggctgtctccatcggataccccatctcatctcttttcaaacttatctgtaaataatgtcaaacagtatagttttttactgagtccaagaagggaacaagtcggtctggactctggagtgcgccttgtggccacgtgagagcatctgattcacgacgggctacagtgacagatggatatgtatcggtgtatcctgctactcctacccctatactcgtggctgcgcctgctacagtgacagacgggctacagtgattcacattccatgtgattggttgttaggatcagcagatcctggtcgaagccgagatgcaggttgggcttaacctgtatgcattgatgcaaaccaaaataagttctcttgtttggttgtttgtcctcaattagttaggatcaacactgttttaggtaagttgtatggatttagctttaagttgcacgactcaactatatttctaaaattacaatgccataaattataacgccataaattacacaaaatccaaatttatacaattataaattacaataacttatcctttacatatcttttacaaaattataaattacaattatagtattgatactgaggcacaagaacactttataaaattatagtttaaagtatgcattaccagtttaccagcgtc

SEQ ID NO: 200613 - DNA, 2775 bp, Zea Mays
tttagcccaagcccaacttgagaaaatgaggagaaaggcctcaggattttggaatttggaacccaacgctgcatttcccaactgggggcacacattaacctcagcctcatttctcttttatttccgctctcctccattctctgtttgctactttgcaagtctcgaacaaaacctgaagcaactcgaagcgaagccgcgatactgcgagaagcggaagcggggagggcgaggaggagcagcaatggaggcgctgctggagctcgagaagatgcagagggtgctgtccctcatgagttcacgcggcctctcccacaccgactccagctgcggcggcgctgccgctgaccgcttcctcgcccaattcctcctcttcatggtgcaaccgtttgattctcttaccctggagaataagttccttttgatctctgagctattaagaaaggctactcctaatactttggaagaagtgcagcatctcacccatctggaagctaataaagatatatgttctggaggttcactccagccaattaagaagtttaagatgcatgccgagaaatcaaccgttcaagctatgccgatggttggttttgatgcgatggcaagagctaagtctacgcttgaagattttgtatgtattctttgtagttggtactcgtaaaaatccttaatggaaacactgccatgaattaatcctggagtgacccaggtcttctgggctgccttttagtttttcttcttttatttttctcaagagaaacctgtttaccttttcttttctcacatcaataaaatcttagcacattaggggattcctttactgtttttgctaaaaaaacactgtcatactgccttttgttgagattttgcaatgcaagtgctacaaaacaattgaaccgcttatagaggcattaagcccgtataaaaaatagcaaggtatctttgaatgtattttgttgttccattattagtcttatagagaaactgggtcacatgctgttctaaattttgatttttcctgttcaaacatgtcttttttggggggttatgagtctatcttgagcacttcctgataattatgtttccctaaagtcccttttttccttcttgagaaaacagtgtaggtcgtactttatgtttcatggtttggatgttaacaagccacaagccattttcaagtatctacctgttctttctttcacagagagttacatatatcagttagatgcttcaaatgaagactgtttacatgtagtcccagatgacaacacttcaaaagtgttgggaaagaaagaagaatctctcaatgagacatccttgtctcaaatgattgaaccccttgaagggcttcttcagtgccaaggattaatgacagaccgattgcgaactgaactcaaatcaggcattcagtattggtctctagagaggaagctctgccaagcattactaagaaatgagaagatctcgattgaagatgttatgatggcaatccatctgaaatcatttgactatcgagttcttaacctgttgatgtttcaacttactggtcagcatgtcaatgaattgcatatggacttcttgtcagtttcagaatttttggttgagatatctgatgacctgtatgattatgaggatgacgttatgaacaatacgttcaatatccttcgcatgtttgctgcaatatatggaccattagaggcaccgaatatgctggccaagtgcataggcgaggctgaagagaaatacgagagcttctccaagaaactggatcctagtctctcaggtagttactggagaagatgtgaggaagcgacgaaggaaggcggaaaaacatcaggccatgcatatggaacatggaatatccctcgtgtgataagcaacgaagatgctttccgacgtgaaagacggagcaaacacgatgcttgtgctgtgatcacttgataggtgaaatgcagaaatgacctgcaaccgttgatgtaaggtgctaggggtctgctcagtgggaactccttgaggatatagtggtccttggcctaccttgggcccctttgatgctcacaaatgtacccattttcaagtcaaattttcacaaatgcagaaatgacatgctgaatttagtttctgtaaggctgtctccatcggataccccatctcatctcttttcaaacttatctgtaaataatgtcaaacagtatagttttttactgagtccaagaagggaacaagtcggtctggactctggagtgcgccttgtggccacgtgagagcatctgattcacgacgggctacagtgacagatggatatgtatcggtgtatcctgctactcctacccctatactcgtggctgcgcctgctacagtgacagacgggctacagtgattcacattccatgtgattggttgttaggatcagcagatcctggtcgaagccgagatgcaggttgggcttaacctgtatgcattgatgcaaaccaaaataagttctcttgtttggttgtttgtcctcaattagttaggatcaacactgttttaggtaagttgtatggatttagctttaagttgcacgactcaactatatttctaaaattacaatgccataaattataacgccataaattacacaaaatccaaatttatacaattataaattacaataacttatcctttacatatcttttacaaaattataaattacaattatagtattgatactgaggcacaagaacactttataaaattatagtttaaagtatgcattaccagtttaccagcgtc

SEQ ID NO: 200614 - DNA, 1549 bp, Zea Mays
gaactttccacaagggattgacatttaccagggataaatgcgtttgatcaaacaccaccagaagaatggtttcaaatgaatgctgttcttcgtgtaagcctggggaacttcttgttctttgcaatattttctctcgtgatgattggtgtgaaagaccagaatgaccggcgagatgcctggcaccatggtggctggattgcaaagattgctgtatgggctgttctcattgttcttatgttctgtgtgccgaacattgtcattactatttacgaggtactttcgaagtttggatctggcttctttcttctagtacaggttgtgatgcttttagacttcacaaataattggaatgactcatgggttgagaaagaagagcggaaatgggaaatagctttgctggtagtgactgtggtttgctatctttctacattggccttctctggtgtgctcttcatgtggtttaatccatccggtcatgactgtggtctcaatgtgttctttatcgtcatgacactcatccttgcttttgcgtttgcaatagttgctttacatcctcaggtccatggaagcgttatgcctgcttctgtcatttctgtttactgcgcatacctgtgctacacgagtctctcgagtgaaccggatgactatgagtgcaatgggcttcacaggcattctaagcaggtttcaatgagtgctcttatactcgggatgctcactacggtgctctctgttgtgtactcagcagtccgtgctggatcctcgactacattcctttcaccgccatcatctcctagatctggagccaaaaacccgctactcggtgacgaggaggacggcaaaggcgatggcaaagaaagcgaaccgcgacccgtgagctactcctacaccttcttccacctcatcttcgcccttgcaagcatgtattcagccatgctcctgaccggctggacgagcgctgcatcagagagctccgagctgatggatgttggatggacgaccgtctgggtgcgcatctgcacggaatgggtcaccgccgggttgtacatctggaccctcatcgccccactgctcttcccagaccgtgatttctcctaggcacccacgcacccatagcctatgagttgtttggtggtgttagttgcgattgtgaatatgaataagccgaagctgggagctggtagggatctggtattgtctctgtatgctatctggcatgcctaatgtgatggcactggttagtacctgtttgtatggccttgtatagaatatatttcgaccgagtgtaggttgtggactttaaaagcagaaaaacaaaactgagcagaaaaacaaaactaagggtaaaatgaggaacactagcaaaactgaggataccagcttaaaaaccctatatcttaaggggtaagtacaaaaaataaagagacgtattttggttaagtaatatctcgattctctaagtctagatatgttccattcatacaattcatataaggtcttgttcggttaattcccttacccatggattggatgggattgaaaaaaataagaa

SEQ ID NO: 200615 - DNA, 1780 bp, Zea Mays
taaatgcgtttgatcaaacaccaccagaagaatggtttcaaatgaatgctgttcttcgtgtaagcctggggaacttcttgttctttgcaatattttctctcgtgatgattggtgtgaaagaccagaatgaccggcgagatgcctggcaccatggtggctggattgcaaagattgctgtatgggctgttctcattgttcttatgttctgtgtgccgaacattgtcattactatttacgaggtactttcgaagtttggatctggcttctttcttctagtacaggttgtgatgcttttagacttcacaaataattggaatgactcatgggttgagaaagaagagcggaaatgggaaatagctttgctggtagtgactgtggtttgctatctttctacattggccttctctggtgtgctcttcatgtggtttaatccatccggtcatgactgtggtctcaatgtgttctttatcgtcatgacactcatccttgcttttgcgtttgcaatagttgctttacatcctcaggtccatggaagcgttatgcctgcttctgtcatttctgtttactgcgcatacctgtgctacacgagtctctcgagtgaaccggatgactatgagtgcaatgggcttcacaggcattctaagcaggtttcaatgagtgctcttatactcgggatgctcactacggtgctctctgttgtgtactcagcagtccgtgctggatcctcgactacattcctttcaccgccatcatctcctagatctggagccaaaaacccgctactcggtgacgaggaggacggcaaaggcgatggcaaagaaagcgaaccgcgacccgtgagctactcctacaccttcttccacctcatcttcgcccttgcaagcatgtattcagccatgctcctgaccggctggacgagcgctgcatcagagagctccgagctgatggatgttggatggacgaccgtctgggtgcgcatctgcacggaatgggtcaccgccgggttgtacatctggaccctcatcgccccactgctcttcccagaccgtgatttctcctaggcacccacgcacccatagcctatgagttgtttggtggtgttagttgcgattgtgaatatgaataagccgaagctgggagctggtagggatctggtattgtctctgtatgctatctggcatgcctaatgtgatggcactggttagtacctgtttgtatggccttgtatagaatatatttcgaccgagtgtaggttgtggactttaaagtcatatagctatacttgacctgatgtcaagtcgcggttgtgtgtaatgacgacaattatcatgtgtaagaatacgtctattgctcgtaatgttgtaataactacgactgtagcttgtgtttagggcatctacaacctactacataaatacataaataacatatatcttagggtttttaaagttggtgctctcagttttgctaatgtcctcatttttattcttagtcgtgttttttttctcagttttgtccttctagtgttatagagcagaaaaacaaaactgagcagaaaaacaaaactaagggtaaaatgaggaacactagcaaaactgaggataccagcttaaaaaccctatatcttaaggggtaagtacaaaaaataaagagacgtattttggttaagtaatatctcgattctctaagtctagatatgttccattcatacaattcatataaggtcttgttcggttaattcccttacccatggattggatgggattgaaaaaaataagaa

SEQ ID NO: 200616 - DNA, 824 bp, Zea Mays
aaacaaaagccgaaaaccgcagtacgctgtacgcagctgtccctcgcagttgggcgcaccggtctactcctcgatcggcaaggccgcaactacctagatctcgaaccctcgccgccgcttctttcccgatcgccgcggccatggcgaaggagttccccgtgccgccggtggtcttcacgccgtccacaccgacgcaccgccgattatgtgcctaatttgtttaggggatgctgtggacagtggactgccttttaccagtcacggagtgtttttgttgtgttgtcacagaactacatacgatctggccagttgatctcttagttccattgggcatggttggtgttcggtaaaaagaaaaggaaatcaaggtccagaaacagcaaatgtgcagtaattaggttttaccgaagtattggtggaaatctaattactttctaaaggtcgtggtatgtgcaaatctgtttattatgattacttaccacgactttattttaggatcatcgtggtagtttcttttcttttaatgcattttggcagagataattgttctatctttaggtatcatgttagatacttaatcatcataaatcaaagggacgttagttttctttttatttgttacaagttgtgaccctcgcaatgaatttatcttctggggtaacaatatatgttatttacaatttgtgcctttgtgtgattacgcataaccattttatggttaatatatgtgaatgtgaaaaggccagcattatttttttaaaggaaatgatgtgtcattattcatcaaatccatttgttgcaactgttaaggaatcagtaaaatc

SEQ ID NO: 200617 - DNA, 804 bp, Zea Mays
tttcttttcatatgttacctaaaggaatctgtgtgtgctttgtccattatgtatctcaggccaggtcttatattgcttgtttaatatgctaagtagaaatgttctggtgatgagatatgagcatggttatcaaagtggtaaaacgaggcgtggcgactaactactgccttacgcataagcgaattatgtgcctaatttgtttaggggatgctgtggacagtggactgccttttaccagtcacggagtgtttttgttgtgttgtcacagaactacatacgatctggccagttgatctcttagttccattgggcatggttggtgttcggtaaaaagaaaaggaaatcaaggtccagaaacagcaaatgtgcagtaattaggttttaccgaagtattggtggaaatctaattactttctaaaggtcgtggtatgtgcaaatctgtttattatgattacttaccacgactttattttaggatcatcgtggtagtttcttttcttttaatgcattttggcagagataattgttctatctttaggtatcatgttagatacttaatcatcataaatcaaagggacgttagttttctttttatttgttacaagttgtgaccctcgcaatgaatttatcttctggggtaacaatatatgttatttacaatttgtgcctttgtgtgattacgcataaccattttatggttaatatatgtgaatgtgaaaaggccagcattatttttttaaaggaaatgatgtgtcattattcatcaaatccatttgttgcaactgttaaggaatcagtaaaatc

SEQ ID NO: 200618 - DNA, 416 bp, Zea Mays
ccttggttgtccagagcctatgatccttgcaccgaaagatatgcaagtatttagaggtgcagatggcattgcatgcaaatacaactggaattcattacccttggcaaacatgcagcaatgttattgggtcctactgggcagattccccaagatctatgcttccaatctaccaagaactgatagcagctggtatcaagatctgggttttcagcagcaacacagatgatgtaattcctgtaactgcgacaaggtactcgatagatgctctcaagctcccaacggctggaggttggaaccaagtatacaaaggacaaacccttgtaaccatagcaggcgcaggacatgaagtgccgctgcaccggcctcgacaagctttgattatgttcagacacttcttgcagaataaaccaatgcca

SEQ ID NO: 200619 - DNA, 3200 bp, Zea Mays
gctctctggactgtgggtgattgggtgtggtcgtgtgggcctaaaatgggatggcccatccaagcccgacccgtatttgccagattcgagtgaactggatccaactaaacaaacaattttccccatttgccattcccgacgagcaccttcaccgtctcctcccagtcccacctcgcgtggcacgccatggctttctccccgcgctcgccgtggtcgcgtgccaagaaaaccgacgtctactcaaccttcgttgtccacggcgatgacgatgaagacgacgcccgcggcggcaggggcccctccacgcgggcggaggaagacgaggaggaagacccctcctcgctgcctccgcttcttcagcggctccccaaggactttggcggcgcctcgttcgacgacgacgaggacccctactcctccgaccctgacgatgcttccctctctgccacggcggccttcaagagcggcgtcccggcctccggtcgatctccgttcctggatctgcggcgctcaagcccccgcgctaccgatgacgacccgtactctaccttcgtcgttcattccaccacacgctcggggagaacctcctccagccctcgcgggtccgcctccggcacattcatccgtcgctcgggtggctcgtctagccctcgcgagtccgtctctggcacattcatccgccggaccggcagcccgtcgagccccgggaagtcagcctccggcacattcatccgccggccagggagcccgtcgagcccccgcgggtcgttctctggcaccttcattcgccacaccagcgggggctccagttcccatgaatctgcctctggcggcggcgggggtttcgggtcctctttctggactccagcggtggagcagtcagaggagctccggcagccatcgcctctgatgcagcaacaacagcaacaacattcaaggcggaagccatcggtcagctcggtgccagacagtgttaccagggaggatccttccaccaagtacgagctgctccatgagcttgggaaaggttcatatggtgcagtgtacaaagcaagggatctcagaacgcaggagcttgtggctgtcaagatcatctcattaacagaaggggaagaaggctatgaagacatacggggagaaattgagatgctgcagcaatgcagccatccaaatgttgtccgctactttggaagctaccaaggagaggagtacctatggataattatggaatactgtggtggtggaagtgttgctgacttgataggcatcacagaggagcctcttgatgaatcccaaatagcttacatttgtagagaagcactaaagggccttgcttacctgcactccatttttaaagttcacagagatattaaggggggcaacatccttctaactgagcaaggcgaggtgaagttgggtgattttggtgtagctgcccagctgacaagaaccatgtcaaagcgcaacacgttcattggtactccacattggatggcaccagaggtcattcaagaaagtcgttatgatggaaaggtagacgtttgggcattaggtgtatctgcaatcgagatggcagagggcatgccaccaagatccactgtgcatccaatgagagttatcttcatgatatctagtgaaccagcacctatgctggaggataaagagaaatggtctctcctcttccatgattttattgcaaagtgtcttactaaagaccccagacttcggcctgctgcaattgagatgctgaagcacaaatttattgagaagtgcaatagtggagcttcgaaaatgttggcaaagatcaaggtagcgaagaagattagagccacactagctgtgcaaaatgagctgtctgaccctgacaatacaacgcaagatgtgccttttcgaataaatgaggactatggggaaactgtccctacaagttctcagcaacacatgaaacatggcacatataatgattgtcaggtgattttggtactatgattgttcatactgaagatggggacgaagtgacagaatcacccattttcccaagaacagaattcatacccggccttggtagcatcaattctttcacacatgatccaaagagagcagaacttatttcaagtttttgtttcttgatagggcggagaacataggtgatagtgatgccaataaagaccgagatacagattatggtcctgacatgcaggaatcaaaagtgatctcacctttaactggaacagtgaagaagaatattggtgcagaagggactataaggtgccatgataatcaaattaacttgtcaccaggacttgcaaacacaacaactaaattgaacaacagcccaagccgtaaagcgttttcagttcaggataaggtatatccttcatggtttagacatcagctatttcccccctatgtctgaactaggccaaagtattttagtttttgctactgctcgccactttaagccccatgtctaattttccaacgtttctatgattttctctttgtagctctggtcaatttatgctgccggcaacactgtaccaataccatttcttaaggcaattgacatttcaccactagctctagtatcagaaaatgaatcaggaaatggcctggctgggtcaagtacaaatgatgctttggaggcagttagggagctgttcagtggtgatgggcaggcaaagaaaggacggaaagggcaaaacgaagtccctcttcctccgggtgtgcatcacaggctgacgacaagccccacattgatgaacctggcccaagctctagcttatcataaaacgtgctatgaggacatgccgctacaagattcacaagcgacgcaagagcagcaaacgatacaaaatctttgtgacacacttcgcacaatactgggttgacacaggaatctctacggaagtggaaatttctgtccctgttaatagcctcttggagtttcactatgtagagacggcatcaaattttgctaatcagattttgtggcactaacgcatattgtagcctggttttgtatcgttgtcaatgcatttgttctccaaataaagagaaatagttaagcagaaataaacgaaaagttatttatgttggctattcgaaatcatgggaggcgtgatttctgctgtcttgaccccgtattccttgtgtctggccattgtacgccatgcttcgtgttgttaagtgtcagtttt

SEQ ID NO: 200620 - DNA, 3487 bp, Zea Mays
atccaagcccgacccgtatttgccagattcgagtgaactggatccaactaaacaaacaattttccccatttgccattcccgacgagcaccttcaccgtctcctcccagtcccacctcgcgtggcacgccatggctttctccccgcgctcgccgtggtcgcgtgccaagaaaaccgacgtctactcaaccttcgttgtccacggcgatgacgatgaagacgacgcccgcggcggcaggggcccctccacgcgggcggaggaagacgaggaggaagacccctcctcgctgcctccgcttcttcagcggctccccaaggactttggcggcgcctcgttcgacgacgacgaggacccctactcctccgaccctgacgatgcttccctctctgccacggcggccttcaagagcggcgtcccggcctccggtcgatctccgttcctggatctgcggcgctcaagcccccgcgctaccgatgacgacccgtactctaccttcgtcgttcattccaccacacgctcggggagaacctcctccagccctcgcgggtccgcctccggcacattcatccgtcgctcgggtggctcgtctagccctcgcgagtccgtctctggcacattcatccgccggaccggcagcccgtcgagccccgggaagtcagcctccggcacattcatccgccggccagggagcccgtcgagcccccgcgggtcgttctctggcaccttcattcgccacaccagcgggggctccagttcccatgaatctgcctctggcggcggcgggggtttcgggtcctctttctggactccagcggtggagcagtcagaggagctccggcagccatcgcctctgatgcagcaacaacagcaacaacattcaaggcggaagccatcggtcagctcggtgccagacagtgttaccagggaggatccttccaccaagtacgagctgctccatgagcttgggaaaggttcatatggtgcagtgtacaaagcaagggatctcagaacgcaggagcttgtggctgtcaagatcatctcattaacagaaggggaagaaggctatgaagacatacggggagaaattgagatgctgcagcaatgcagccatccaaatgttgtccgctactttggaagctaccaaggagaggagtacctatggataattatggaatactgtggtggtggaagtgttgctgacttgataggcatcacagaggagcctcttgatgaatcccaaatagcttacatttgtagagaagcactaaagggccttgcttacctgcactccatttttaaagttcacagagatattaaggggggcaacatccttctaactgagcaaggcgaggtgaagttgggtgattttggtgtagctgcccagctgacaagaaccatgtcaaagcgcaacacgttcattggtactccacattggatggcaccagaggtcattcaagaaagtcgttatgatggaaaggtagacgtttgggcattaggtgtatctgcaatcgagatggcagagggcatgccaccaagatccactgtgcatccaatgagagttatcttcatgatatctagtgaaccagcacctatgctggaggataaagagaaatggtctctcctcttccatgattttattgcaaagtgtcttactaaagaccccagacttcggcctgctgcaattgagatgctgaagcacaaatttattgagaagtgcaatagtggagcttcgaaaatgttggcaaagatcaaggtagcgaagaagattagagccacactagctgtgcaaaatgagctgtctgaccctgacaatacaacgcaagatgtgccttttcgaataaatgaggactatggggaaactgtccctacaagttctcagcaacacatgaaacatggcacatataatgattgtcaggcaggtgattttggtactatgattgttcatactgaagatggggacgaagtgacagaatcacccattttcccaagaacagaattcatacccggccttggtagcatcaattctttcacacatgatccaaagagagcagaacttatttcaagtttttgggcggagaacataggtgatagtgatgccaataaagaccgagatacagattatggtcctgacatgcaggaatcaaaagtgatctcacctttaactggaacagtgaagaagaatattggtgcagaagggactataaggtgccatgataatcaaattaacttgtcaccaggacttgcaaacacaacaactaaattgaacaacagcccaagccgtaaagcgttttcagttcaggataagctctggtcaatttatgctgccggcaacactgtaccaataccatttcttaaggcaattgacatttcaccactagctctagtatcagaaaatgaatcaggaaatggcctggctgggtcaagtacaaatgatgctttggaggcagttagggagctgttcagtggtgatgggcaggcaaagaaaggacggaaagggcaaaacgaagtatgcggcagattcttttctttaactcttgcagagtaacttatcttttaatgattgcagagggaaacttaggccgttcttagtgggagtttcattctcattaaatgacataccacctaagcaaacaggatgacatggcatgcaattcaatgaagggggatatgagtttcatactttcatgaggatgtatctagacctagacaaatgttgacttgacagctttggaaacagtgcgatggaactatccattgagaatgaccttaggccaatttcagtggggagttctctaacacagttgccgggactgccacgccaacttttgtgtctgtgccaacgggtttcatccgataaaactccctctatctctctccatagttaacctggcaagtcatcaaaattgctgatgtgtaatagcattaaatgcaaatgaaactcagatgaaactcccagtgagatcgaccttagtctaatactgcatttggtgcattaggtccctcttcctccgggtgtgcatcacaggctgacgacaagccccacattgatgaacctggcccaagctctagcttatcataaaacgtgctatgaggacatgccgctacaagattcacaagcgacgcaagagcagcaaacgatacaaaatctttgtgacacacttcgcacaatactgggttgacacaggaatctctacggaagtggaaatttctgtccctgttaatagcctcttggagtttcactatgtagagacggcatcaaattttgctaatcagattttgtggcactaacgcatattgtagcctggttttgtatcgttgtcaatgcatttgttctccaaataaagagaaatagttaagcagaaataaacgaaaagttatttatgttggctattcgaaatcatgggaggcgtgatttctgctgtcttgaccccgtattccttgtgtctggccattgtacgccatgcttcgtgttgttaagtgtcagtttt

SEQ ID NO: 200621 - DNA, 3677 bp, Zea Mays
caattttccccatttgccattcccgacgagcaccttcaccgtctcctcccagtcccacctcgcgtggcacgccatggctttctccccgcgctcgccgtggtcgcgtgccaagaaaaccgacgtctactcaaccttcgttgtccacggcgatgacgatgaagacgacgcccgcggcggcaggggcccctccacgcgggcggaggaagacgaggaggaagacccctcctcgctgcctccgcttcttcagcggctccccaaggactttggcggcgcctcgttcgacgacgacgaggacccctactcctccgaccctgacgatgcttccctctctgccacggcggccttcaagagcggcgtcccggcctccggtcgatctccgttcctggatctgcggcgctcaagcccccgcgctaccgatgacgacccgtactctaccttcgtcgttcattccaccacacgctcggggagaacctcctccagccctcgcgggtccgcctccggcacattcatccgtcgctcgggtggctcgtctagccctcgcgagtccgtctctggcacattcatccgccggaccggcagcccgtcgagccccgggaagtcagcctccggcacattcatccgccggccagggagcccgtcgagcccccgcgggtcgttctctggcaccttcattcgccacaccagcgggggctccagttcccatgaatctgcctctggcggcggcgggggtttcgggtcctctttctggactccagcggtggagcagtcagaggagctccggcagccatcgcctctgatgcagcaacaacagcaacaacattcaaggcggaagccatcggtcagctcggtgccagacagtgttaccagggaggatccttccaccaagtacgagctgctccatgagcttgggaaaggttcatatggtgcagtgtacaaagcaagggatctcagaacgcaggagcttgtggctgtcaagatcatctcattaacagaaggggaagaaggctatgaagacatacggggagaaattgagatgctgcagcaatgcagccatccaaatgttgtccgctactttggaagctaccaaggagaggagtacctatggataattatggaatactgtggtggtggaagtgttgctgacttgataggcatcacagaggagcctcttgatgaatcccaaatagcttacatttgtagagaagcactaaagggccttgcttacctgcactccatttttaaagttcacagagatattaaggggggcaacatccttctaactgagcaaggcgaggtgaagttgggtgattttggtgtagctgcccagctgacaagaaccatgtcaaagcgcaacacgttcattggtactccacattggatggcaccagaggtcattcaagaaagtcgttatgatggaaaggtagacgtttgggcattaggtgtatctgcaatcgagatggcagagggcatgccaccaagatccactgtgcatccaatgagagtaagcggtgcttctcaatgcgttgtcagtatctgcagttaatgaggctaataggctgtaacctgtaacagaataaactgctctatctttggtgcagtgtacttgtctctttaatttcatttctgatgcatttgttttaacttcatcttgctaactatttggtatacatatcaatctattatttcattttcgtttagattgatagactggctaacggtctctcttccccctgcctatctcaggttatcttcatgatatctagtgaaccagcacctatgctggaggataaagagaaatggtctctcctcttccatgattttattgcaaagtgtcttactaaagaccccagacttcggcctgctgcaattgagatgctgaagcacaaatttattgagaagtgcaatagtggagcttcgaaaatgttggcaaagatcaaggtagcgaagaagattagagccacactagctgtgcaaaatgagctgtctgaccctgacaatacaacgcaagatgtgccttttcgaataaatgaggactatggggaaactgtccctacaagttctcagcaacacatgaaacatggcacatataatgattgtcaggcaggtgattttggtactatgattgttcatactgaagatggggacgaagtgacagaatcacccattttcccaagaacagaattcatacccggccttggtagcatcaattctttcacacatgatccaaagagagcagaacttatttcaagtttttggtatgagaaacataaatttatcttattgtttgtgttgtcagtcattgaaagcagcttaacaagaaggttttatttatcccatcacaaatcttatgcacagtttcttgatagggcggagaacataggtgatagtgatgccaataaagaccgagatacagattatggtcctgacatgcaggaatcaaaagtgatctcacctttaactggaacagtgaagaagaatattggtgcagaagggactataaggtgccatgataatcaaattaacttgtcaccaggacttgcaaacacaacaactaaattgaacaacagcccaagccgtaaagcgttttcagttcaggataagctctggtcaatttatgctgccggcaacactgtaccaataccatttcttaaggcaattgacatttcaccactagctctagtatcagaaaatgaatcaggaaatggcctggctgggtcaagtacaaatgatgctttggaggcagttagggagctgttcagtggtgatgggcaggcaaagaaaggacggaaagggcaaaacgaagtatgcggcagattcttttctttaactcttgcagagtaacttatcttttaatgattgcagagggaaacttaggccgttcttagtgggagtttcattctcattaaatgacataccacctaagcaaacaggatgacatggcatgcaattcaatgaagggggatatgagtttcatactttcatgaggatgtatctagacctagacaaatgttgacttgacagctttggaaacagtgcgatggaactatccattgagaatgaccttaggccaatttcagtggggagttctctaacacagttgccgggactgccacgccaacttttgtgtctgtgccaacgggtttcatccgataaaactccctctatctctctccatagttaacctggtccctcttcctccgggtgtgcatcacaggctgacgacaagccccacattgatgaacctggcccaagctctagcttatcataaaacgtgctatgaggacatgccgctacaagattcacaagcgacgcaagagcagcaaacgatacaaaatctttgtgacacacttcgcacaatactgggttgacacaggaatctctacggaagtggaaatttctgtccctgttaatagcctcttggagtttcactatgtagagacggcatcaaattttgctaatcagattttgtggcactaacgcatattgtagcctggttttgtatcgttgtcaatgcatttgttctccaaataaagagaaatagttaagcagaaataaacgaaaagttatttatgttggctattcgaaatcatgggaggcgtgatttctgctgtcttgaccccgtattccttgtgtctggccattgtacgccatgcttcgtgttgttaagtgtcagtttt

SEQ ID NO: 200622 - DNA, 3179 bp, Zea Mays
caattttccccatttgccattcccgacgagcaccttcaccgtctcctcccagtcccacctcgcgtggcacgccatggctttctccccgcgctcgccgtggtcgcgtgccaagaaaaccgacgtctactcaaccttcgttgtccacggcgatgacgatgaagacgacgcccgcggcggcaggggcccctccacgcgggcggaggaagacgaggaggaagacccctcctcgctgcctccgcttcttcagcggctccccaaggactttggcggcgcctcgttcgacgacgacgaggacccctactcctccgaccctgacgatgcttccctctctgccacggcggccttcaagagcggcgtcccggcctccggtcgatctccgttcctggatctgcggcgctcaagcccccgcgctaccgatgacgacccgtactctaccttcgtcgttcattccaccacacgctcggggagaacctcctccagccctcgcgggtccgcctccggcacattcatccgtcgctcgggtggctcgtctagccctcgcgagtccgtctctggcacattcatccgccggaccggcagcccgtcgagccccgggaagtcagcctccggcacattcatccgccggccagggagcccgtcgagcccccgcgggtcgttctctggcaccttcattcgccacaccagcgggggctccagttcccatgaatctgcctctggcggcggcgggggtttcgggtcctctttctggactccagcggtggagcagtcagaggagctccggcagccatcgcctctgatgcagcaacaacagcaacaacattcaaggcggaagccatcggtcagctcggtgccagacagtgttaccagggaggatccttccaccaagtacgagctgctccatgagcttgggaaaggttcatatggtgcagtgtacaaagcaagggatctcagaacgcaggagcttgtggctgtcaagatcatctcattaacagaaggggaagaaggctatgaagacatacggggagaaattgagatgctgcagcaatgcagccatccaaatgttgtccgctactttggaagctaccaaggagaggagtacctatggataattatggaatactgtggtggtggaagtgttgctgacttgataggcatcacagaggagcctcttgatgaatcccaaatagcttacatttgtagagaagcactaaagggccttgcttacctgcactccatttttaaagttcacagagatattaaggggggcaacatccttctaactgagcaaggcgaggtgaagttgggtgattttggtgtagctgcccagctgacaagaaccatgtcaaagcgcaacacgttcattggtactccacattggatggcaccagaggtcattcaagaaagtcgttatgatggaaaggtagacgtttgggcattaggtgtatctgcaatcgagatggcagagggcatgccaccaagatccactgtgcatccaatgagagtaagcggtgcttctcaatgcgttgtcagtatctgcagttaatgaggctaataggctgtaacctgtaacagaataaactgctctatctttggtgcagtgtacttgtctctttaatttcatttctgatgcatttgttttaacttcatcttgctaactatttggtatacatatcaatctattatttcattttcgtttagattgatagactggctaacggtctctcttccccctgcctatctcaggttatcttcatgatatctagtgaaccagcacctatgctggaggataaagagaaatggtctctcctcttccatgattttattgcaaagtgtcttactaaagaccccagacttcggcctgctgcaattgagatgctgaagcacaaatttattgagaagtgcaatagtggagcttcgaaaatgttggcaaagatcaaggtagcgaagaagattagagccacactagctgtgcaaaatgagctgtctgaccctgacaatacaacgcaagatgtgccttttcgaataaatgaggactatggggaaactgtccctacaagttctcagcaacacatgaaacatggcacatataatgattgtcaggtgattttggtactatgattgttcatactgaagatggggacgaagtgacagaatcacccattttcccaagaacagaattcatacccggccttggtagcatcaattctttcacacatgatccaaagagagcagaacttatttcaagtttttgggcggagaacataggtgatagtgatgccaataaagaccgagatacagattatggtcctgacatgcaggaatcaaaagtgatctcacctttaactggaacagtgaagaagaatattggtgcagaagggactataaggtgccatgataatcaaattaacttgtcaccaggacttgcaaacacaacaactaaattgaacaacagcccaagccgtaaagcgttttcagttcaggataagctctggtcaatttatgctgccggcaacactgtaccaataccatttcttaaggcaattgacatttcaccactagctctagtatcagaaaatgaatcaggaaatggcctggctgggtcaagtacaaatgatgctttggaggcagttagggagctgttcagtggtgatgggcaggcaaagaaaggacggaaagggcaaaacgaagtccctcttcctccgggtgtgcatcacaggctgacgacaagccccacattgatgaacctggcccaagctctagcttatcataaaacgtgctatgaggacatgccgctacaagattcacaagcgacgcaagagcagcaaacgatacaaaatctttgtgacacacttcgcacaatactgggttgacacaggaatctctacggaagtggaaatttctgtccctgttaatagcctcttggagtttcactatgtagagacggcatcaaattttgctaatcagattttgtggcactaacgcatattgtagcctggttttgtatcgttgtcaatgcatttgttctccaaataaagagaaatagttaagcagaaataaacgaaaagttatttatgttggctattcgaaatcatgggaggcgtgatttctgctgtcttgaccccgtattccttgtgtctggccattgtacgccatgcttcgtgttgttaagtgtcagtttt

SEQ ID NO: 200623 - DNA, 3422 bp, Zea Mays
caattttccccatttgccattcccgacgagcaccttcaccgtctcctcccagtcccacctcgcgtggcacgccatggctttctccccgcgctcgccgtggtcgcgtgccaagaaaaccgacgtctactcaaccttcgttgtccacggcgatgacgatgaagacgacgcccgcggcggcaggggcccctccacgcgggcggaggaagacgaggaggaagacccctcctcgctgcctccgcttcttcagcggctccccaaggactttggcggcgcctcgttcgacgacgacgaggacccctactcctccgaccctgacgatgcttccctctctgccacggcggccttcaagagcggcgtcccggcctccggtcgatctccgttcctggatctgcggcgctcaagcccccgcgctaccgatgacgacccgtactctaccttcgtcgttcattccaccacacgctcggggagaacctcctccagccctcgcgggtccgcctccggcacattcatccgtcgctcgggtggctcgtctagccctcgcgagtccgtctctggcacattcatccgccggaccggcagcccgtcgagccccgggaagtcagcctccggcacattcatccgccggccagggagcccgtcgagcccccgcgggtcgttctctggcaccttcattcgccacaccagcgggggctccagttcccatgaatctgcctctggcggcggcgggggtttcgggtcctctttctggactccagcggtggagcagtcagaggagctccggcagccatcgcctctgatgcagcaacaacagcaacaacattcaaggcggaagccatcggtcagctcggtgccagacagtgttaccagggaggatccttccaccaagtacgagctgctccatgagcttgggaaaggttcatatggtgcagtgtacaaagcaagggatctcagaacgcaggagcttgtggctgtcaagatcatctcattaacagaaggggaagaaggctatgaagacatacggggagaaattgagatgctgcagcaatgcagccatccaaatgttgtccgctactttggaagctaccaaggagaggagtacctatggataattatggaatactgtggtggtggaagtgttgctgacttgataggcatcacagaggagcctcttgatgaatcccaaatagcttacatttgtagagaagcactaaaggttctaacaccacatttgtggggcaattaaatgtcttcggatatttaacttttgtgtgcttattttcttctccagggccttgcttacctgcactccatttttaaagttcacagagatattaaggggggcaacatccttctaactgagcaaggcgaggtgaagttgggtgattttggtgtagctgcccagctgacaagaaccatgtcaaagcgcaacacgttcattggtactccacattggatggcaccagaggtcattcaagaaagtcgttatgatggaaaggtagacgtttgggcattaggtgtatctgcaatcgagatggcagagggcatgccaccaagatccactgtgcatccaatgagagtaagcggtgcttctcaatgcgttgtcagtatctgcagttaatgaggctaataggctgtaacctgtaacagaataaactgctctatctttggtgcagtgtacttgtctctttaatttcatttctgatgcatttgttttaacttcatcttgctaactatttggtatacatatcaatctattatttcattttcgtttagattgatagactggctaacggtctctcttccccctgcctatctcaggttatcttcatgatatctagtgaaccagcacctatgctggaggataaagagaaatggtctctcctcttccatgattttattgcaaagtgtcttactaaagaccccagacttcggcctgctgcaattgagatgctgaagcacaaatttattgagaagtgcaatagtggagcttcgaaaatgttggcaaagatcaaggtagcgaagaagattagagccacactagctgtgcaaaatgagctgtctgaccctgacaatacaacgcaagatgtgccttttcgaataaatgaggactatggggaaactgtccctacaagttctcagcaacacatgaaacatggcacatataatgattgtcaggcagatggggacgaagtgacagaatcacccattttcccaagaacagaattcatacccggccttggtagcatcaattctttcacacatgatccaaagagagcagaacttatttcaagtttttgggcggagaacataggtgatagtgatgccaataaagaccgagatacagattatggtcctgacatgcaggaatcaaaagtgatctcacctttaactggaacagtgaagaagaatattggtgcagaagggactataaggtgccatgataatcaaattaacttgtcaccaggacttgcaaacacaacaactaaattgaacaacagcccaagccgtaaagcgttttcagttcaggataagctctggtcaatttatgctgccggcaacactgtaccaataccatttcttaaggcaattgacatttcaccactagctctagtatcagaaaatgaatcaggaaatggcctggctgggtcaagtacaaatgatgctttggaggcagttagggagctgttcagtggtgatgggcaggcaaagaaaggacggaaagggcaaaacgaagtccctcttcctccgggtgtgcatcacaggctgacgacaagccccacattgatgaacctggcccaagctctagcttatcataaaacgtgctatgaggacatgccgctacaagattcacaagcgacgcaagagcagcaaacgatacaaaatctttgtgacacacttcgcacaatactgaggttgtagatctgcaagagtgaaggctgcaacctttggagttccgaagcctgcatggagccaagggtgaacgtggcactgatcctgctcgtggtggagaactgaggatcgaaggaacgcatgacatgtgcctaccgtggagcaggcctaatggcttctgcgttttagcctgtggacgctttggtcactggaagctgggttgacacaggaatctctacggaagtggaaatttctgtccctgttaatagcctcttggagtttcactatgtagagacggcatcaaattttgctaatcagattttgtggcactaacgcatattgtagcctggttttgtatcgttgtcaatgcatttgttctccaaataaagagaaatagttaagcagaaataaacgaaaagttatttatgttggctattcgaaatcatgggaggcgtgatttctgctgtcttgaccccgtattccttgtgtctggccattgtacgccatgcttcgtgttgttaagtgtcagtttt

SEQ ID NO: 200624 - DNA, 1851 bp, Zea Mays
ggaaatattattcagggtgttatcatcctactggcaggtggcccctgcccaatatgtcatcttcactatggatgttcattggtactccacattggatggcaccagaggtcattcaagaaagtcgttatgatggaaagacgtttgggcattaggtgtatctgcaatcgagatggcagagggcatgccaccaagatccactgtgcatccaatgagagttatcttcatgatatctagtgaaccagcacctatgctggaggataaagagaaatggtctctcctcttccatgattttattgcaaagtgtcttactaaagaccccagacttcggcctgctgcaattgagatgctgaagcacaaatttattgagaagtgcaatagtggagcttcgaaaatgttggcaaagatcaaggtagcgaagaagattagagccacactagctgtgcaaaatgagctgtctgaccctgacaatacaacgcaagatgtgccttttcgaataaatgaggactatggggaaactgtccctacaagttctcagcaacacatgaaacatggcacatataatgattgtcaggcaggtgattttggtactatgattgttcatactgaagatggggacgaagtgacagaatcacccattttcccaagaacagaattcatacccggccttggtagcatcaattctttcacacatgatccaaagagagcagaacttatttcaagtttttgggcggagaacataggtgatagtgatgccaataaagaccgagatacagattatggtcctgacatgcaggaatcaaaagtgatctcacctttaactggaacagtgaagaagaatattggtgcagaagggactataaggtgccatgataatcaaattaacttgtcaccaggacttgcaaacacaacaactaaattgaacaacagcccaagccgtaaagcgttttcagttcaggataagctctggtcaatttatgctgccggcaacactgtaccaataccatttcttaaggcaattgacatttcaccactagctctagtatcagaaaatgaatcaggaaatggcctggctgggtcaagtacaaatgatgctttggaggcagttagggagctgttcagtggtgatgggcaggcaaagaaaggacggaaagggcaaaacgaagtccctcttcctccgggtgtgcatcacaggctgacgacaagccccacattgatgaacctggcccaagctctagcttatcataaaacgtgctatgaggacatgccgctacaagattcacaagcgacgcaagagcagcaaacgatacaaaatctttgtgacacacttcgcacaatactgaggttgtagatctgcaagagtgaaggctgcaacctttggagttccgaagcctgcatggagccaagggtgaacgtggcactgatcctgctcgtggtggagaactgaggatcgaaggaacgcatgacatgtgcctaccgtggagcaggcctaatggcttctgcgttttagcctgtggacgctttggtcactggaagctgggttgacacaggaatctctacggaagtggaaatttctgtccctgttaatagcctcttggagtttcactatgtagagacggcatcaaattttgctaatcagattttgtggcactaacgcatattgtagcctggttttgtatcgttgtcaatgcatttgttctccaaataaagagaaatagttaagcagaaataaacgaaaagttatttatgttggctattcgaaatcatgggaggcgtgatttctgctgtcttgaccccgtattccttgtgtctggccattgtacgccatgcttcgtgttgttaagtgtcagtttt

SEQ ID NO: 200625 - DNA, 1415 bp, Zea Mays
gaactctcttctattaatgaaatggtctctcctcttccatgattttattgcaaagtgtcttactaaagaccccagacttcggcctgctgcaattgagatgctgaagcacaaatttattgagaagtgcaatagtggagcttcgaaaatgttggcaaagatcaaggtagcgaagaagattagagccacactagctgtgcaaaatgagctgtctgaccctgacaatacaacgcaagatgtgccttttcgaataaatgaggactatggggaaactgtccctacaagttctcagcaacacatgaaacatggcacatataatgattgtcaggtgattttggtactatgattgttcatactgaagatggggacgaagtgacagaatcacccattttcccaagaacagaattcatacccggccttggtagcatcaattctttcacacatgatccaaagagagcagaacttatttcaagtttttgtttcttgatagggcggagaacataggtgatagtgatgccaataaagaccgagatacagattatggtcctgacatgcaggaatcaaaagtgatctcacctttaactggaacagtgaagaagaatattggtgcagaagggactataaggtgccatgataatcaaattaacttgtcaccaggacttgcaaacacaacaactaaattgaacaacagcccaagccgtaaagcgttttcagttcaggataagctctggtcaatttatgctgccggcaacactgtaccaataccatttcttaaggcaattgacatttcaccactagctctagtatcagaaaatgaatcaggaaatggcctggctgggtcaagtacaaatgatgctttggaggcagttagggagctgttcagtggtgatgggcaggcaaagaaaggacggaaagggcaaaacgaagtccctcttcctccgggtgtgcatcacaggctgacgacaagccccacattgatgaacctggcccaagctctagcttatcataaaacgtgctatgaggacatgccgctacaagattcacaagcgacgcaagagcagcaaacgatacaaaatctttgtgacacacttcgcacaatactgggttgacacaggaatctctacggaagtggaaatttctgtccctgttaatagcctcttggagtttcactatgtagagacggcatcaaattttgctaatcagattttgtggcactaacgcatattgtagcctggttttgtatcgttgtcaatgcatttgttctccaaataaagagaaatagttaagcagaaataaacgaaaagttatttatgttggctattcgaaatcatgggaggcgtgatttctgctgtcttgaccccgtattccttgtgtctggccattgtacgccatgcttcgtgttgttaagtgtcagtttt

SEQ ID NO: 200626 - DNA, 8729 bp, Zea Mays
ccatgtgcgccgcttcgggtctcctcgcagtcctcctcgaagtcgcagagaagctgttcgtcggaatgggtcggggcagcaagtgggacgggacgccgcttgtgcagtgcattcaagtgttgggtgggcactctgtcagtgtaagggacttacacacctggctccttttgatcaagaaggcgctcggcacgcagtgggccacgcagctgactatcgcgttggaaaacgccgtggctagcaatgaagctaaagggccggcggtgaccttcgagtttgacggggagagctccggcttgctcgccccgggggacaaccggtggccattctcgaatggtcttgggtttgccacatggatatacgtagagtccttctcaggctcacttaacacagctacggccactgcagccgttgcagccgctgcagcatctgcatctgggaagtcatcaccttcagcagcagcggctgctgcctgcacgcttgcgggagaagggacaaagcacatgcccaggattttcagtttccttacttcggaaaaccatggtattgaggcctatttcaatgaccagtttctagttgtggagagtgcggctgggaaggggaagaaggcttctctccatttcacttatgaattcaaaccccggtgctggtactttgttggtctggagcactctagcaaacaagctttgcttggtaagtctgagagtgaattgcggttgtatgtggatggggaccttcatgagagctgtccatttgagcccccacgcatcgtgaaaccactggttttttgttgcattgggaccaatccatcaccaactattgccggtcttcagcggcggcggcggcaatgtccattgtttgctgagatgggacctatctatatctttacagagcctatcgggccagagaaaatgagtcgacttgcttccaggggaggagatgcacttcccagcttcggcaacggtgctggttttccttggaaagctacaagtaaccacatcagggaaactgcagaggatggttatacactcgatattgagattggtggaagcttacatcttctttatcatcccagcctgctcaatggccggttttgttctgatgcttcaccttctggctcaacaggtactcaccgaagacctgcagaagttcttggcatggttcatatctctaatcgtgtccgtccagctgaatctttatgggcattggcttatggtggtcctatggcattattaccactgattgtgagcaatgtcgagatggataacctggaacctatacttggcgatttgtcatcgtctcttgctactgcatctctttctgttcctattttcaggatcatttctgtggctgttcaacatcctgggaataaagaagagttatgccgtactcatggaccagagcttctatctcaagttttacattatgtattggacacactatccagacttgaaagtggaaagaaagagatactgagtgatgaagagcttgttactgcaattgtatctttgtgtcagtctcaaagaaacgatcatagtcaaaaggtgcagctctttagcactttgctgttggacctgaagatgtggagttcatgcaactatattttgcagaaaaagcttctttcttcacttgcagacatggtttttgcagaatctacttgcatgcgtgatgcaaatgcactgcaaatgcttcttgatgggtgcagaaggtgttactgggtagttcatgaagcagattcaattgataccttcacacttactggaaacgagagacctttgggaaatgtgaatgctctggtcgatgagcttttggttgttattgaactgttgataggagcagcaccttctacattggcttctgatgatgttcgttgtttggttggatttattgtagactgcccacaacctaaccagagggaagctaaatctggtgatagcaatattctccatagctgtaatgtgtcacatgattctgcttcgtggaatgaatcttctaagcttaccaataaggattcaaaatttaaaaatgccagtggtgaaacaaactgccaggatcatcagattcaatcagtgcagcattatgaacccaactctcatgaaactggagttggacttggatctactagcaaatggagcctattaaagggtcagttcttaaagaatttgggtggcatggatgttccaaatatctctgacaatgtgcaaaatattgataatggtgatggagttcttgttgggatagtccgtgttttgggcgctttagttgcttcaggccacctgacttctacctcgcctactgtgagaccgaagttaccaagtggttttctgactacctctaatggagaaggaaataccatgtttgaagacagagtatctctactgctctttgcattgcagaaagctttccaagcagccccgaggaggcttatgaccagaaatgtctacacggcgttaatttcttcagtgatcaatgtttcttcaaaagataacctgaaaaatttacaagattctggataccattttaaacacattcctcttttggtagtcctacttcgttctcttccatatgcatcaaggtcattccaagctcgtgttattcaggatcttctatatttggtttgcagtcaccccaagaacagaagtacaatgacttccatcaatgaatggccagaatgcatattggaagttttgatttctaatcatgagatgggggacaacaaagattcagatggtataagcatatgtgaggttgaagacgtagtacacaatcttctacttgttgtgctgcagcattcaatgcgaaaaaaagatgggtggaaggacgtagaggcaacaatacattgtgcagaatggctttcaatggttggaggaactagcaccggtgaccaaagaattaggcgtgaagaagcattaccaattttcaagaggagattactgggtagtctgcttaatttttctgcccaggagcttcaagttcagcaaactgaagggattgctgctgctgcagctggtgttgcagcagagggtttagtgcctaaagaaacaaaagtacatgcagagaaagttgccaatctctcagtaatgttggctgagaatgcagttgttctgctgatgcttgtggaagatcatttgaggtcacgcagtcaacaatttttcatggcctgtttagctgatagtgctgcctcacctgcttcaatggcttcatcagctgtcagtaggtcaaattcattgagtagaactggcagtgagcatttggaagctggggactcgagacagtctttgtcaagtgatgctggtggtcttccagttgatgttcttgcttctacggtagatacaaatgggcaactttctgctgaagtgatggaacgtgtaacagcagcagcagcagctgagccttatggatctgtcagacatgcatttgtatcttatgggagctgtatttcggatctttcagaagggtggaagtacagaacccgattgtggtatggtgtatgcatccctcccaaatctaatgtgtttggtggtggggggagtggttgggtgtcatggaagtccgttcttgagaaggactccgatggaaactggattgaacttccattggtaaagaagtcagtagcgatgctgcaggcacttcttttagattctggacttggtggttgcctcgatagtggagttggatttgggcctggcatgggtgttatgggtgcctttaatcagttgttagatagtgatcagccatttttttgcatgctccggttgatccttgtttcaatgagggaggatgacagtggggaggatgacattttcatgaggaacattagcatgaagaatgtgatttcagaagtattaggctgtcaaactggaagcatgctgggacttggtggtaactccagtgcatctatgagaaaacgtccagctgcacttttgtggagagtgcttggccctgttcttaatatgccagtttctgaatctaagagacaacgagttctggttgcttcttctattctttattcagagttatggcatgctgtaagcagtgacagaaaaccagtgagaaaaaagtatgttggattgatcatgccgccatttgtagctgtcctgaaaagatatcgttctgttttggctggtatacatgagcttacatgtccagatgtgcaaaatccactacttattgatgactgggcttcgacagcagacacttcacctgttgaggttggtgttgcaatgatatcacctgcctgggctgctgcttttgcctctccaccagttgcaatggcattggccatgattgctgctggtgcctctgggacagaaacaatagcaccgccaaccaataagttgcgcaggcgtgacacctcattgctagaacgtagggcagctaaattgcacactttctcaagttttcagatgcctatagatactacaccaagcttgcccacatcagcaccaaaggacaaagcagctgcaaaagctgcagccttggctgctgctcgtgaccttgagcgtagtgctaagattggttcaagaaggggtcttagtgctgtagcgatggctacttcaggacagaggaggtctgctggtgatattgagagagcccaaaggtggaacatatctgaagctatgggtgctgcatggatggagtgtctgcagtctgctgactcaaagtctgtttcaggaagagatttttctgctctttcatacaaatatgttgcacttcttgtttccagttttgcgttagcacgcaatttgcagcgagttgagatggagagacgaacacaagtcgaaatattgaaccgcagttgcatgtctattggacttcgggcatggcagcatcttcttcactgcttgatagagacaagtagactctacggaccttttggagaactcctctgtagtcccgatagtattttctggaagttagacttaactgaaagttcgttaagaatgagaagatttatgaaaaggaactacaattggttgaatcacttgggtgcttctgctaattatgtggagcagaagtttctttgtgatggtgcagacgcatgccactcagaagatggagactctttacttagtgttcttcctgcaagttctttgattacagtagatgaagtacatgaacaaattgtgcagagacaaagtgataatatctgcagcagtgtggatgatcaactgacagattcgtcaacaactgatcagatttttacaggatcaatagattcaagaagttctgacttttctggtgttcgcaacttgattcgatccacagtagttacacctggttacaagactaataatgagcgaattattattgaacttccttcaatgatgattcggccattgaaggttgtacgaggaaccttccaagtcacctcaaagaggattaacttcatagttgatgagcatatgagtgacagttacatggatgatattgcatccactagtggccaatatgatcagcaagatagagatcggagctggttcctatcatcacttcatcagatttttagtagaagatatctactacgtcaaagtgctttggaattatttatggtagacaggtcaaactttttatttgatttcgaggatataggatcacgtacacatgcttatcgggcccttgttcacaccaaacctccttatttgaacaccgtttccgttgctacccaaaggcctgaacaaatcttcaagcagacacagttgatggagcgctgggctaaatgggagattagcaattttgaatatttgatggaactgaacactctcgctggccgcacttacaatgacattactcagtatcctgtttttccatgggtaatagcagattacaagtccaaaactttggatttggaaagtccgtccacataccgagatctttcaaagccaattggtgcactaaatcctgcacgtttgaagaaattccaagaccattactccagtttcaaggatccaatcatcccaaaatttcactatggttcacattactccaatcctggcacggtattgtattatcttgctaggatagaaccttttagcatcctctatgctcagctgcaaggtgccaagttcgatcatgatgattgtgcattctctgatgtcgccagaacatggaacagtgttcttgagggcatgaatgatgtaaaagagctagttccagagatgttttaccttcctgaggtatttactaatataaggcagtgaaactggaacccttaatgtttgagtattattgcaggttctgtagcactgcctccttgggctaaaaatgctgttgattttatacatatgcatcggaaagctctcgagagtgatcatgtctccacacgtttgcatgaatggatcgatctaatatttggatataaacaaagaggtaaaggagcagaggtagccaacaatatcttccctcatgttacatatgatgggatggtggacattgataaaatcactgatccagtgcaacggcgaagtgtacaaaatcaaatatgttattttggacagacaccatctcaattgctgacagttccacacataagaaggcggtcgttgacacaaatattacaattgcagacaatattccggaacccaagtgaggttagatcttatgtgcttccaagtccagagcactgcaatgttcctgctagcacgatgcttgtatccaatgattgtcttgtagtcatagattctaatgttcccacagcacatgtggcattgcaccattggcagccaaataccccagatggcctaggggcgcctttcctctttcatcacgggaaaaatgccataaattcaagtggtggtgcaatatttcgcatatttaaaggatcttcaggttctgcagaagactatcagtttccacgagctgtagcatttgcagcctctgcagtacaaagttcatcagctgttgttgttacatgtgacaaagaagttataactggcaggcatgcagataactctgtgaagatgatctctccggatggagcaaggactatcgaaactgcatttgggcatcttgcacctgtgacctgcctcgcactgtctgcagacagtagctatcttgttacagggtctcgtgacacaacagttatactttggaggatacgtcaggtgggttctgcacataagaaaaatgctccagaacctccaccatctacaccgacaacacctactagtcctctagccactggtagtagcagcgacagtagtccaagcaaaactctagaaacctacaggaggcgacgaattgaaggccctatgcatgtactaagaggacatctcggagaagtaacctgctgttctgttagttctgatttggggcttgttggttcatcttcgagtgtgtctggtgtcctattacattccttgagaacaggtcggctaataaagaagctcgatgtgccagaagcccattccatatgcttttcttctcaaggcattgtattggtttggaatgaagttgagaacagactgtccaccttcactgttaacggaatccctattgctaccgcagttgtgtcacctttctctgcacgagtcagttgcattgagatttctacagatgggcaatttgctgcaatgggaacttgttcatctagcaatgacaatcatgactgcagcactgctctggaagataattctgagcttgacaagcccggtagtgatgaggatgtacaaggatcaaatgagaccaggctatctgttgacgctccctctatctgcttccttgatctatacaaacttgaggtaatccataagctgaagctggaagaaggacaggacgtcacagcactcgctctagaccaagaaaacaccacccttctggtttcgacagctgataagcagctaatagtctacacgggtccggctccaagtaccccgtaggtcaatccattagctccccggtgcttggttggaaaaaatgtaatggagatcagcgctagctaccttgacggcccaactgacagtgagctcggagacgacagtacagataatgcacgttaggcgacgggcttctcttgccgtgagcatggcgctgctgtacgtagaggctccaatggattgtgctgtaatacaagactgagactggaacctgaaatgggcgacatgtgcaccaaaaggtgaagagccgttgcgctgctggaaaactctcctgtacagggacctcgttgacattttccatgtagtcgtagtgaaacctgccacgctgcggccaaaataattgttagaagcagcaatccgaatgtaattattgccagtgcctcgtacaagtcgcgttagcttcttgttagccgtgtgcaacggcgagccggcacgcaaagatttgttagcttgttgtcattgcatctgtgtacaaagtctcgtccaagaaattgattcactttcgcttgcgcacaacgtagacacgcaatcccttgttcagatgtagtagcttataggtagattgtgttgattatatgttcaaaaagtaattaaaacgtccattagcagagggagagtgtgtgtatataaaggggatcgcgcgtgctgaagttgggagatagattccacttccacgttctagccactctgttgcccctcctgctatgttacggccgtcatttttcacttgcggcaagcaatgccacaatgttttatcttcgtacatgtgaataccttgctactggttctgtgatattgatgagcaacgaacatgtgaagcacagattaatgtatcttgtttcactaatacacgaggat

SEQ ID NO: 200627 - DNA, 9750 bp, Zea Mays
cctagctaaaaaagcagccgcgaccagtgatcgcgcgcccgcagcgacgccatttcttcgccttccccgctcggccgcttcctttttctctcttcctccgccactcccacgccatgcaccgcgccaccaccgttaatcttggactagcatttcccccaaacaccgaccgtttctccccggcctcatacccaaatcgcaaattttttgatcaagagattcgcataattttcccccaattccatcgtcgtctccagaaccccattttttcgccattgtgtttgatccttgctcatttctccagtgactctccaattcctcacatttttctcaaactttatggagtaagcttttgagatgggggaggaggacaccggcgagatgcccgatgcctcgccgcccgcgccgtgggagcacggcgtcgacgagcggttcgctgacgaatcgctcggcctgttcgacgacgaggcgtacaccgtcgaagaggaggatgtgtcggacacggagatgaccgccggttccccggcagccccctcggagccctccccgccgctgcggaggcgcctggcgccggtagtgccgtcggacgtgcccgagcaggtggtgcgcgccgtggacgcggtgattatgggcggcggggtcgagcgcctccgtgacatggtctccgaggagaatggcgaggtctcgcatttcatcgtggacgtgctgatggtcaccatgggaggcgtggatggactcgacgagggcgctggcgaaggcatcggcgcggccaccggattgccacccagcatcatgtccagttcgcgagctgccgcgatagcggccgagctcgtaccatacctccccttcggcgttgagccgtcgccgcgcacccgcatgactcgtggcctccttgccactctcagtgcctgcacccgcaaccgaaccatgtgcgccgcttcgggtctcctcgcagtcctcctcgaagtcgcagagaagctgttcgtcggaatgggtcggggcagcaagtgggacgggacgccgcttgtgcagtgcattcaagtgttgggtgggcactctgtcagtgtaagggacttacacacctggctccttttgatcaagaaggcgctcggcacgcagtgggccacgcagctgactatcgcgttggaaaacgccgtggctagcaatgaagctaaagggccggcggtgaccttcgagtttgacggggagagctccggcttgctcgccccgggggacaaccggtggccattctcgaatggtcttgggtttgccacatggatatacgtagagtccttctcaggctcacttaacacagctacggccactgcagccgttgcagccgctgcagcatctgcatctgggaagtcatcaccttcagcagcagcggctgctgcctgcacgcttgcgggagaagggacaaagcacatgcccaggattttcagtttccttacttcggaaaaccatggtattgaggcctatttcaatgaccagtttctagttgtggagagtgcggctgggaaggggaagaaggcttctctccatttcacttatgaattcaaaccccggtgctggtactttgttggtctggagcactctagcaaacaagctttgcttggtaagtctgagagtgaattgcggttgtatgtggatggggaccttcatgagagctgtccatttgagcccccacgcatcgtgaaaccactggttttttgttgcattgggaccaatccatcaccaactattgccggtcttcagcggcggcggcggcaatgtccattgtttgctgagatgggacctatctatatctttacagagcctatcgggccagagaaaatgagtcgacttgcttccaggggaggagatgcacttcccagcttcggcaacggtgctggttttccttggaaagctacaagtaaccacatcagggaaactgcagaggatggttatacactcgatattgagattggtggaagcttacatcttctttatcatcccagcctgctcaatggccggttttgttctgatgcttcaccttctggctcaacaggtactcaccgaagacctgcagaagttcttggcatggttcatatctctaatcgtgtccgtccagctgaatctttatgggcattggcttatggtggtcctatggcattattaccactgattgtgagcaatgtcgagatggataacctggaacctatacttggcgatttgtcatcgtctcttgctactgcatctctttctgttcctattttcaggatcatttctgtggctgttcaacatcctgggaataaagaagagttatgccgtactcatggaccagagcttctatctcaagttttacattatgtattggacacactatccagacttgaaagtggaaagaaagagatactgagtgatgaagagcttgttactgcaattgtatctttgtgtcagtctcaaagaaacgatcatagtcaaaaggtgcagctctttagcactttgctgttggacctgaagatgtggagttcatgcaactatattttgcagaaaaagcttctttcttcacttgcagacatggtttttgcagaatctacttgcatgcgtgatgcaaatgcactgcaaatgcttcttgatgggtgcagaaggtgttactgggtagttcatgaagcagattcaattgataccttcacacttactggaaacgagagacctttgggaaatgtgaatgctctggtcgatgagcttttggttgttattgaactgttgataggagcagcaccttctacattggcttctgatgatgttcgttgtttggttggatttattgtagactgcccacaacctaaccaggttgctagggtattgcttctcatctacagattgattgtgcacccgaacacttctagagccaatacgtttgctcagtcgttcatttctcgtggagtagtagaagcattactcgttcttttgcagagggaagctaaatctggtgatagcaatattctccatagctgtaatgtgtcacatgattctgcttcgtggaatgaatcttctaagcttaccaataaggattcaaaatttaaaaatgccagtggtgaaacaaactgccaggatcatcagattcaatcagtgcagcattatgaacccaactctcatgaaactggagttggacttggatctactagcaaatggagcctattaaagggtcagttcttaaagaatttgggtggcatggatgttccaaatatctctgacaatgtgcaaaatattgataatggtgatggagttcttgttgggatagtccgtgttttgggcgctttagttgcttcaggccacctgacttctacctcgcctactgtgagaccgaagttaccaagtggttttctgactacctctaatggagaaggaaataccatgtttgaagacagagtatctctactgctctttgcattgcagaaagctttccaagcagccccgaggaggcttatgaccagaaatgtctacacggcgttaatttcttcagtgatcaatgtttcttcaaaagataacctgaaaaatttacaagattctggataccattttaaacacattcctcttttggtagtcctacttcgttctcttccatatgcatcaaggtcattccaagctcgtgttattcaggatcttctatatttggtttgcagtcaccccaagaacagaagtacaatgacttccatcaatgaatggccagaatgcatattggaagttttgatttctaatcatgagatgggggacaacaaagattcagatggtataagcatatgtgaggttgaagacgtagtacacaatcttctacttgttgtgctgcagcattcaatgcgaaaaaaagatgggtggaaggacgtagaggcaacaatacattgtgcagaatggctttcaatggttggaggaactagcaccggtgaccaaagaattaggcgtgaagaagcattaccaattttcaagaggagattactgggtagtctgcttaatttttctgcccaggagcttcaagttcagcaaactgaagggattgctgctgctgcagctggtgttgcagcagagggtttagtgcctaaagaaacaaaagtacatgcagagaaagttgccaatctctcagtaatgttggctgagaatgcagttgttctgctgatgcttgtggaagatcatttgaggtcacgcagtcaacaatttttcatggcctgtttagctgatagtgctgcctcacctgcttcaatggcttcatcagctgtcagtaggtcaaattcattgagtagaactggcagtgagcatttggaagctggggactcgagacagtctttgtcaagtgatgctggtggtcttccagttgatgttcttgcttctacggtagatacaaatgggcaactttctgctgaagtgatggaacgtgtaacagcagcagcagcagctgagccttatggatctgtcagacatgcatttgtatcttatgggagctgtatttcggatctttcagaagggtggaagtacagaacccgattgtggtatggtgtatgcatccctcccaaatctaatgtgtttggtggtggggggagtggttgggtgtcatggaagtccgttcttgagaaggactccgatggaaactggattgaacttccattggtaaagaagtcagtagcgatgctgcaggcacttcttttagattctggacttggtggttgcctcgatagtggagttggatttgggcctggcatgggtgttatgggtgcctttaatcagttgttagatagtgatcagccatttttttgcatgctccggttgatccttgtttcaatgagggaggatgacagtggggaggatgacattttcatgaggaacattagcatgaagaatgtgatttcagaagtattaggctgtcaaactggaagcatgctgggacttggtggtaactccagtgcatctatgagaaaacgtccagctgcacttttgtggagagtgcttggccctgttcttaatatgccagtttctgaatctaagagacaacgagttctggttgcttcttctattctttattcagagttatggcatgctgtaagcagtgacagaaaaccagtgagaaaaaagtatgttggattgatcatgccgccatttgtagctgtcctgaaaagatatcgttctgttttggctggtatacatgagcttacatgtccagatgtgcaaaatccactacttattgatgactgggcttcgacagcagacacttcacctgttgaggttggtgttgcaatgatatcacctgcctgggctgctgcttttgcctctccaccagttgcaatggcattggccatgattgctgctggtgcctctgggacagaaacaatagcaccgccaaccaataagttgcgcaggcgtgacacctcattgctagaacgtagggcagctaaattgcacactttctcaagttttcagatgcctatagatactacaccaagcttgcccacatcagcaccaaaggacaaagcagctgcaaaagctgcagccttggctgctgctcgtgaccttgagcgtagtgctaagattggttcaagaaggggtcttagtgctgtagcgatggctacttcaggacagaggaggtctgctggtgatattgagagagcccaaaggtggaacatatctgaagctatgggtgctgcatggatggagtgtctgcagtctgctgactcaaagtctgtttcaggaagagatttttctgctctttcatacaaatatgttgcacttcttgtttccagttttgcgttagcacgcaatttgcagcgagttgagatggagagacgaacacaagtcgaaatattgaaccgcagttgcatgtctattggacttcgggcatggcagcatcttcttcactgcttgatagagacaagtagactctacggaccttttggagaactcctctgtagtcccgatagtattttctggaagttagacttaactgaaagttcgttaagaatgagaagatttatgaaaaggaactacaattggttgaatcacttgggtgcttctgctaattatgtggagcagaagtttctttgtgatggtgcagacgcatgccactcagaagatggagactctttacttagtgttcttcctgcaagttctttgattacagtagatgaagtacatgaacaaattgtgcagagacaaagtgataatatctgcagcagtgtggatgatcaactgacagattcgtcaacaactgatcagatttttacaggatcaatagattcaagaagttctgacttttctggtgttcgcaacttgattcgatccacagtagttacacctggttacaagactaataatgagcgaattattattgaacttccttcaatgatgattcggccattgaaggttgtacgaggaaccttccaagtcacctcaaagaggattaacttcatagttgatgagcatatgagtgacagttacatggatgatattgcatccactagtggccaatatgatcagcaagatagagatcggagctggttcctatcatcacttcatcagatttttagtagaagatatctactacgtcaaagtgctttggaattatttatggtagacaggtcaaactttttatttgatttcgaggatataggatcacgtacacatgcttatcgggcccttgttcacaccaaacctccttatttgaacaccgtttccgttgctacccaaaggcctgaacaaatcttcaagcagacacagttgatggagcgctgggctaaatgggagattagcaattttgaatatttgatggaactgaacactctcgctggccgcacttacaatgacattactcagtatcctgtttttccatgggtaatagcagattacaagtccaaaactttggatttggaaagtccgtccacataccgagatctttcaaagccaattggtgcactaaatcctgcacgtttgaagaaattccaagaccattactccagtttcaaggatccaatcatcccaaaatttcactatggttcacattactccaatcctggcacggtattgtattatcttgctaggatagaaccttttagcatcctctatgctcagctgcaaggtgccaagttcgatcatgatgattgtgcattctctgatgtcgccagaacatggaacagtgttcttgagggcatgaatgatgtaaaagagctagttccagagatgttttaccttcctgaggtatttactaatgtaaacccaagtggaagactaggttctgtagcactgcctccttgggctaaaaatgctgttgattttatacatatgcatcggaaagctctcgagagtgatcatgtctccacacgtttgcatgaatggatcgatctaatatttggatataaacaaagaggtaaaggagcagaggtagccaacaatatcttccctcatgttacatatgatgggatggtggacattgataaaatcactgatccagtgcaacggcgaagtgtacaaaatcaaatatgttattttggacagacaccatctcaattgctgacagttccacacataagaaggcggtcgttgacacaaatattacaattgcagacaatattccggaacccaagtgaggttagatcttatgtgcttccaagtccagagcactgcaatgttcctgctagcacgatgcttgtatccaatgattgtcttgtagtcatagattctaatgttcccacagcacatgtggcattgcaccattggcagccaaataccccagatggcctaggggcgcctttcctctttcatcacgggaaaaatgccataaattcaagtggtggtgcaatatttcgcatatttaaaggatcttcaggttctgcagaagactatcagtttccacgagctgtagcatttgcagcctctgcagtacaaagttcatcagctgttgttgttacatgtgacaaagaagttataactggcaggcatgcagataactctgtgaagatgatctctccggatggagcaaggactatcgaaactgcatttgggcatcttgcacctgtgacctgcctcgcactgtctgcagacagtagctatcttgttacagggtctcgtgacacaacagttatactttggaggatacgtcaggtgggttctgcacataagaaaaatgctccagaacctccaccatctacaccgacaacacctactagtcctctagccactggtagtagcagcgacagtagtccaagcaaaactctagaaacctacaggaggcgacgaattgaaggccctatgcatgtactaagaggacatctcggagaagtaacctgctgttctgttagttctgatttggggcttgttggttcatcttcgagtgtgtctggtgtcctattacattccttgagaacaggtcggctaataaagaagctcgatgtgccagaagcccattccatatgcttttcttctcaaggcattgtattggtttggaatgaagttgagaacagactgtccaccttcactgttaacggaatccctattgctaccgcagttgtgtcacctttctctgcacgagtcagttgcattgagatttctacagatgggcaatttgctgcaatgggaacttgttcatctagcaatgacaatcatgactgcagcactgctctggaagataattctgagcttgacaagcccggtagtgatgaggatgtacaaggatcaaatgagaccaggctatctgttgacgctccctctatctgcttccttgatctatacaaacttgaggtaatccataagctgaagctggaagaaggacaggacgtcacagcactcgctctagaccaagaaaacaccacccttctggtttcgacagctgataagcagctaatagtctacacgggtccggctccaagtaccccgtaggtcaatccattagctccccggtgcttggttggaaaaaatgtaatggagatcagcgctagctaccttgacggcccaactgacagtgagctcggagacgacagtacagataatgcacgttaggcgacgggcttctcttgccgtgagcatggcgctgctgtacgtagaggctccaatggattgtgctgtaatacaagactgagactggaacctgaaatgggcgacatgtgcaccaaaaggtgaagagccgttgcgctgctggaaaactctcctgtacagggacctcgttgacattttccatgtagtcgtagtgaaacctgccacgctgcggccaaaataattgttagaagcagcaatccgaatgtaattattgccagtgcctcgtacaagtcgcgttagcttcttgttagccgtgtgcaacggcgagccggcacgcaaagatttgttagcttgttgtcattgcatctgtgtacaaagtctcgtccaagaaattgattcactttcgcttgcgcacaacgtagacacgcaatcccttgttcagatgtagtagcttataggtagattgtgttgattatatgttcaaaaagtaattaaaacgtccattagcagagggagagtgtgtgtatataaaggggatcgcgcgtgctgaagttgggagatagattccacttccacgttctagccactctgttgcccctcctgctatgttacggccgtcatttttcacttgcggcaagcaatgccacaatgttttatcttcgtacatgtgaataccttgctactggttctgtgatattgatgagcaacgaacatgtgaagcacagattaatgtatcttgtttcactaatacacgaggat

SEQ ID NO: 200628 - DNA, 737 bp, Zea Mays
ctctcctctggctgccgctctccacagtcctcgggctccaagccttgcgtaaaccccgacccccacgcgcatagatgaagactaggtcgcagacgtcgccgaagcctctcaagacggtggcgatggctcccaggccgagcagcaccaagcggaagccgaggcccaagccggcggggaagggcgacccccgcgcacccaagaagccacccaccgccttcttctacttcatggaggattttcgcaagatctataagcaagaaaaaccaagtgtaaaatcaatgcaggaaatagggaaggcatgtggcgaaaaatggaatacaatgacatttgaggaaagctgaacatttgtctgttccaaattcccgatggttcactgtaactggatgaatcaatcagctgtatattacagaactgtgatttttagtggaatttataaataccactagttggaaccgtcagctcacgcagatatgtatcttttgtagtcgacttgcacattttgatgacaccgagtcttctacccggtgtttttcatctggagataatttgtgtttcgtgctaactgctcgttaaattgcttattatagagttgtatgtatgattgtgtatataataatgtcctccaacgcaaaaaaatatatatattatcacagctaaaacaaatgatatccctactgtcaagtatagtacttagactgtagatattgataccgaacactcatatatcgaattcattt

SEQ ID NO: 200629 - DNA, 922 bp, Zea Mays
ccggcccacgagaggcggatgctcagcgcctcagcggccagatcgtcttcccttcccccctaccctgtgcgtgtctgctccctctcctctggctgccgctctccacagtcctcgggctccaagccttgcgtaaaccccgacccccacgcgcatagatgaagactaggtcgcagacgtcgccgaagcctctcaagacggtggcgatggctcccaggccgagcagcaccaagcggaagccgaggcccaagccggcggggaagggcgacccccgcgcacccaagaagccacccaccgccttcttctacttcatggaggattttcgcaagatctataagcaagaaaaaccaagtgtaaaatcaatgcaggaaatagggaaggcatgtggcgaaaaatggaatacaatgacatttgagttttcacttaattcatttcacaggaaaaggtcaagtattatgatatagctactgagaaacgtgcagaatttgagaaggcgatgattgaatataacaagaaaaaggaaagctgaacatttgtctgttccaaattcccgatggttcactgtaactggatgaatcaatcagctgtatattacagaactgtgatttttagtggaatttataaataccactagttggaaccgtcagctcacgcagatatgtatcttttgtagtcgacttgcacattttgatgacaccgagtcttctacccggtgtttttcatctggagataatttgtgtttcgtgctaactgctcgttaaattgcttattatagagttgtatgtatgattgtgtatataataatgtcctccaacgcaaaaaaatatatatattatcacagctaaaacaaatgatatccctactgtcaagtatagtacttagactgtagatattgataccgaacactcatatatcgaattcattt

SEQ ID NO: 200630 - DNA, 879 bp, Zea Mays
accctgcaggcgtcatccgtatcttccttctcagctctggccatgccgcctctcctcttctcccttcgaccctcgccctgttcaggcttcccgctacgccgactcctattccgctgctccgcttcctccgcctccaccttctcgtcgctcgcctcttaccacgcctccttcgcccgccggatggccctcgccggcatccatccgcaccaccgcatcgcggtcggggtctccggtggaccggactcgatggcgctgtgcgtgctcgccacggcctggaagaaggcagcggggaggaaggccggtgatgaggaggatcccgtcgcctcggcattcgtggacgggctcctcggagttgtcgtcgaccacggtctgcgccccgagagcgccgacgaggcgcggctagtgcgtgaccgcgtccgtggcatgggtgttgagtgtgagattgctaactgtgagtggccgtatggccctccaaagcaagggaaggtgcaagaggctgcccgcgaagtgaggtaccaaaaactattggacatttgtataaagcaacagataggaatcttgcttattgcacaccattctgatgaccaggcagagctctttgttctcagactatctcgccaaagtggggttttagggcttgctggtacagcttttgtgtctcagttgtttgcatctaatgtaaaatatgatggggagagatttcgacgttatggcatacttcttgtgcggcctatgcttgagttttcaaaagatgacatgtataagatatgtcaaggtagtaatcaaccctgggtggaagatccaacgaatactagtatgaagtatgctagaaaccgaattcgggcgtctttaagaaaattatccaccgaaggtaccttc

SEQ ID NO: 200631 - DNA, 933 bp, Zea Mays
agtccccacccgccccactgtgacactgacaccgttcgaagcaaaaagagcgaacacgagcacgaacacaagcgcagagcagccaagcgccacacacacgccgacgcgaaccaaccaaccagctggtagtaggttcgccgcgctgacgatgatgcctcgccgcgcccttctcttcgccgcggtgctcctcgcggcctccgccgccgcggtctccgggttccacctgggaggggacgagagcggtctcgtgaggggtgtgctcgccgcgctccgcgagcgagccgaggccgaggacgccgctcgcttcgccgtcgcccactacaacaagaaccagggcgccgctttggagtttactagggtgctcaaatccaagcggcaggtggtgaccgggaccctgcatgacctgatactggaggcagctgatgctggaaaaaagagtgtgtacagagcaaaggtttgggtgaagccgtgggaagatttcaagtctgtcgttgagtttcgccttgttggagactctgaatctgaacccgagccttctgttgcttctgatgttagctctgggcaagatattgtacaagaagaggctcgcctgcacaccattgagaatgatgggctttccggcgatttcacatcatcatcttaggcaaggatggaaagcgtaaaggtttaaaatgaagatttaggtatttagagtatgtcaagctgaaatgctttgccttgtttattggaatatgtatgtttcgtttcaaacgtgggagcatagaactgtatatttcggtatttcacactgttcatttccatgtctgtatataaggaggttcttctggctatatatatattttgatcctcaagtactttttctctgtcttctgtgtactttagagaatcagtcctgccgcgtctttggttagtgcgtaatatggaatagacgat

SEQ ID NO: 200632 - DNA, 1694 bp, Zea Mays
cttaggtctcaactctttgggggagtgacctactagatttgctagaatcaacgtttcggttaatgggcgccgctttggagtttactagggtgctcaaatccaagcggcaggtggtgaccgggaccctgcatgacctgatactggaggcagctgatgctggaaaaaagagtgtgtacagagcaaaggtttgggtgaagccgtgggaagatttcaagtctgtcgttgagtttcgccttgttggagactctgaatctgaacccgagccttctgttgcttctgatgttagctctgggcaagatattgtacaagaagaggctcgcctgcacaccattgagaatgatgggctttccggcgatttcacatcatcatcttaggtatgatttcatctctttttatcttcttgtgcaacgggtgccacttctggtctcttgctatttggttaaccgacctatgatcacacgagccaaggacaggctgccagtgatcccaatgactgtaaccatgatttgtttttatcttgcattggtatcttgtatagtaatggttcagtgcatgatgcaaactaaacaatgtctatatagttgcttttatctttgccatggctattgtgggaactgggaagtatctagtcctgatgtgggaccttatatgttggcatctggaagatggtttttactggatggatactgttagttgaattcgttgggattgctatttgtttttttatggaaaaccaagagtgatactcttcatgtaatcatgtgatgcattcgcactggtgctttgggcccatcaaaccgtgtactatcagtagacagcttgctgttcggattcttaacagaactttgtatgcaggcatacgaagttttgttaagaaactaaatagcaggaagcacacacctatgccagacactcctcgttccacaagacagcatttgcatcatgcagtgcttaacatagccatatctcattcgcagtgtttgtttatcttgtaatactatgtggaaaaacagtggcatagctcaggaatctaggccacaatcaaatccttttcaggaaccaggtgatatccaatgctttgatgaacaatagatgtttatgtgtggtgtgctgcggttgtatcagtcctcagaaaagaacttcccttttttaggaccaactggactcttatctctgtctgtttatttgctttctgatgcatacatcataaattggtatttttaacttgcaacccaagttacttgatattagataactgtcttgtttggtgtattaatgttaatagtctagcaaagaaaaaaaccatctttacttttctcatatgcaacattctgcaaagacaatgtgatataagttttggctcatccctcacttcaaacatacttggtgtgactaggattccaggcaaggatggaaagcgtaaaggtttaaaatgaagatttaggtatttagagtatgtcaagctgaaatgctttgccttgtttattggaatatgtatgtttcgtttcaaacgtgggagcatagaactgtatatttcggtatttcacactgttcatttccatgtctgtatataaggaggttcttctggctatatatatattttgatcctcaagtactttttctctgtcttctgtgtactttagagaatcagtcctgccgcgtctttggttagtgcgtaatatggaatagacgat

SEQ ID NO: 200633 - DNA, 458 bp, Zea Mays
aaacaggtgctattagattagcgagagtcgttcctccaccaaccaattcgcttctctgtcaacttcacttcctcgtcgacgcctccggcccaccaaccatgccggcggctgcggcggcgcagaggctcctcgcggcgagcacgaaaatcatcggcgttgggcgcaactacatagcccactccaaggagctcggcaatccggtccccaaggagcccgtcctgttcctgaagccgacctcgtcgtttctccacgctggtgtggccaccgccgccgttgagatcccggagccgctcgagtcgctacaccacgagaccaaagaagaatgaaggtggtagagatagggggagctcaggaactgcttaatgtattggaaggtgctaaagatgataaaacacgaaaagaaactctaaaagctcttgctgcgctttcaaaatctggtgagtaaaacatactagcca

SEQ ID NO: 200634 - DNA, 182 bp, Zea Mays
ccgggttcaagccccagcctctgcatattatgcggaccaaagaagaatgaaggtggtagagatagggggagctcaggaactgcttaatgtattggaaggtgctaaagatgataaaacacgaaaagaaactctaaaagctcttgctgcgctttcaaaatctggtgagtaaaacatactagcca

SEQ ID NO: 200635 - DNA, 167 bp, Zea Mays
cgggaagcctacggcactggaccaaagaagaatgaaggtggtagagatagggggagctcaggaactgcttaatgtattggaaggtgctaaagatgataaaacacgaaaagaaactctaaaagctcttgctgcgctttcaaaatctggtgagtaaaacatactagcca

SEQ ID NO: 200636 - DNA, 171 bp, Zea Mays
gcccagtgtatttacagctcttaaaccaaagaagaatgaaggtggtagagatagggggagctcaggaactgcttaatgtattggaaggtgctaaagatgataaaacacgaaaagaaactctaaaagctcttgctgcgctttcaaaatctggtgagtaaaacatactagcca

SEQ ID NO: 200637 - DNA, 778 bp, Zea Mays
gcccataccgacttttcttctccccccttccccccccccccccccccccccaccggcgagccgacgaacccaccctcgtggcacgtacggcaccgccgcgatgtcgttgccggcagcgaccgcgccgtcctcttcgggggcgacgcagcccacggagcagcagggaggctcgagggagcggcgggtggagtcgctgggatggctgacggagtcggcggtgatgccgaagaagcacaaggccatcgagggggtcggcgccgcttcgatcctcgacctcaaggcccagctctaccgcacccaggaggaggcccgaaaccccacagcccccggcgccgctgcttccggcggggagttccgccgcgcaaagatacgctccgcacccaccgaccctctcggggccaagaactccggcgttgaatcccgggcccacaaggataagctggagcttaaagccgtgaaagacggttctgcaagctatgctgctctagaaaagaaagcagagttgtatgaaaaattatacagaggcgagctacctgacgaagaagacaaagagaaatactgtgtggatttcttccaaaaaagttccgatcgtatctatgagcctcagatgccagagattagccacagagccactgatgctgcagagccggtaaatgatcatgaagattctatgcctaatgcgaaaccgttggggcttggccgagcaggcactacaatcgacagagatgagcacaagcgctttgtgagctgctggggattggcatagtttcactgcttg

SEQ ID NO: 200638 - DNA, 856 bp, Zea Mays
atccgacggccacgagactcccatcgttcggatataagtgcccctccaaccgaaaacctgtccttctccgcgcactccaccccactcgccgccgccgctgccaccgccgcttgctgccgcagccgccatgggggcgtacaagtacgtgtcggaactatggaggaggaagcagtcggacgtgatgcgcttcgtgcagcgcgtgcgctgctgggagtacaggcagcagccgtccatcgtccgcctcaccaggcccacccgccccgacaaggcccgtcgtctcggctacaaggccaagcagggatatgttgtctaccgtgtccgtgtgaagcgtggtggcaggaagaggcctgtgcccaagggtattgtctatggcaagcccaagcaccagggtatcacccagctcaagttccagaggaacaagaggtctgtcgctgaggagagagctggacgtaagcttggtggactgagggttcttaactcctactgggtgaatgaggatagtacctacaagtacttcgagatcatccttgtggacgttgcccacaaagccatcaaaaccgacccgaggatcaactggctatgcaaccctgtgcacaagcaccgcgagctccgtggcctcacctcagcaggcaagaagtaccgtggcctgcggggcaagggccacactcaccacaagaacaggccctcaaggagagccacctggaagcgcaaccagaccctctccctccgtcgctaccgctgagcagctcgtcgggtgcttggatactgccactgtccgaccattcccaatcaagacaacaagggtgcctgtctctgaatagtgcggtgaggatgataactatgttgacatgttgaa

SEQ ID NO: 200639 - DNA, 1805 bp, Zea Mays
ctgggcttcttcttgggcatttggcaggtcttttaggactgtggatgcttcttttcacaatcttcgccgctagaaaattccagcagcccatcaaggatgacgtcggagacaaatctgttttcatgttcaacgctctccctgaagaggaaaagaaggcttggatccagaaactcgagaggcaaaaggggcaagagttgtttgagtagaaaagagtagcttgtcttggtgcagccaatagttcgtccgtgaatgtttgtagctcatgtatatgattatggctccagaaatttgacaaatacacccaaagacatgaagacgagaacacgttccaatagagatgtaattacaaatctgttagatcacaggtaagatgtaactaaataaagcagttttgttgttatagtcgttgacaatattttagtttgttgctcccatgccttaatcaagtaaatacaaaattcactacttgattggaaggtggaggaaacagaaaaagttatctatgaacgtacatatgatgagcaaacagataatggtaacagaaacagaagaccacattcgcttgcatgataatggaccatccaccgagttcagtctaaaactaccaaacttaatcaccacaatacaactcaatagttctcacatacaatacaactcagatacatataagccttggaatgccttaaacatgtggcagatccccaagacattggctactacttggtagcacccaatcgcaaggtataccatgcagactgttctggtaataagctcttaaaacatcaagaaaatttgcaccaacatgactgatgccctaaataaatagctatgaatcaccaccattcaacctaccaatggtacacaaattttgaagaaatcagttgcagagtcgactagtttccatagacagcgccatttgagttcagagaggctccgttctggggaacgtcagctccctctacctccgacaagaagccattctcaaagaacgctgaatggagggcttgtacgcactgttttgcctcactgtcattgactaccaaggaaatgttcaccttggacgccccttgtgagatcatctggacattaacaccatttcttcgcagaacgttgaatgcctggcatgcagcaaaacagggtcagccattcatgttctcatgtccattatctaaaataaaagcacgacctagcatgaaagttcagaatcacaagatgtcatgttacaagtagtatcatgaaaagctatgaccttttcaagaatcaatgacgatcgctgtacattccctatcagtgagatgatcgatctacgttgcagcagatgaacaactgcaaattttttaagctcttcaacgacatgatcaagttcctgccacatcattgtaaaaaaaaagaatgagggcagtaaaaaaacttgctgaaaaaaaatgccaggttaaacttgcaaagtaaaactatgagaagcaaaaacagcaaaagaattcaatatgttatctgttctgtaagtttaacatgtacctaaaaggctatcgtgggttctcaactgctgcaagaatccatattgatcaaaactcatagttacaaaatgtgtaatttaggttttaccaagcatttcaaaattcctagcttaatcataccattgaacagagaggataacaaatgcagagtaaaacatttggtagccggttgttattggaagtactgcctgtattgtttgctgaaagttgaacaaaaaatatttccttactcagatgcttacctgctggatcaattcacgactccatagttttgatggatctagagtcaac

SEQ ID NO: 200640 - DNA, 1427 bp, Zea Mays
atgcggtccatcttcagtggagttgttcaccttcagatgaattgtgcgcaccttgaaaactgtttacatgaagcaagagaagaggcccgaacaaacaaatgttcacctgacagaagggctgttgagtatgatgctctgcggtcgtctgctttgaggatacatggtttgttcgaaaggctaaataactgcatcactgcaccaggtgtgactggctttgcagagtcactgcattctttggctgcctccttggcaagctatgtaaagaaggatgaagctgataccactgttcagtttcaacaatgcatcaagatcctggcggacaaagcagtacatggaggtatcacaaaagagttggatgagaagaaagagctgattaagaatctctacaataaacttcaacaagaaaaacaggaaccaaaaacaataatactaacctcatccgatgcccaccaatctgagcagccaaggcatgcatacctagccttctcgaggacaattcaggaggtatggtgcataaaaagaatctcagttgttcctcatgtggagaacctccagaggctcacatgttgggctccaaagttgcaatgttccagtattcctcagtcgaaatttacaatgcctacaaaccacagcctactcttgagattcacaatcccgatatgcacaaagatgccccaaggttgctgccctcgtgtttcgtgctctgattgttgagtcttcaatgagagctgattccagttatatagagctacaatgcttccgagagaagggaaaccggcaaaggggaaaagagacgaatagaagggcattggtgccctctcacacacaggccaagtatacatccacatgccacaatgacttgggcctggtgcatatggtattacagctgttattattggagctattggctatttattcataagatggaaggggtggaaactttctgatatgatgtttgtgacgaagcgtggattatctgatgcttgcaatgttgtggggaaacaagtggatcaggtttcagaaagtgttaatgatgctgcgtcccttgcagtagcaatcatgaaaaagggactgcggagtcgaatatttctgggctgtgacaacaagcccctttccaggcaagaaataatggatgctgttaacaatagtggaaaatttgacacgaagtttggaggctttattggtactgacgatccattggggaagataatggagaattcaaaaactcgggctgagatcggttgggaaccaaagtatccaagcttcaccgaattccttggtatcatcagttaacatccttgcatactgttcagttagtctgactcagctgagttgcaaccgtgattagattgtacatcgtttgaatttttatatggtctgaattggtgatggtgtacatctcagactaattttttattctcacagta

SEQ ID NO: 200641 - DNA, 840 bp, Zea Mays
agaacagaacacgagaagttgactatcgcgaggtggccaagaaggaaaagtagcggcggcatggggtcgcccaaggcggccaagagcatggtgaagcaacgcatctggcgtcaccggctcgtcgcgccgttcgctgccgttctcatcacggccgtcgtcgtattctccggcctgttcgcgcaggacccaagtgccacctcggagttcactgccgtgaacgcgggtaacaccctgccagtgcgcgataagtcggaatccacaggtgcagcagccagaggatctcccaacaaggaggatcttgcaacagctgcatttgagcaagaattggatgttggaaattctgagcccaatcaagctttccaaggcaccgtgcctgcagcaggcgagagagggacagcaacggcagtgccggtccaacgagaaagaagcagtggaggatctgaacctgaagagaagcaatcgcccccacaggaccaggaaggagaagaaacctctgctaagtcaggagctagcttctgtgctcggacggtggtacacaaactggaggaagaatatgtcctttgtgctctgctggagcctcggctctcaacaaactcctctctaggttgctctcctcgggctttctatctcaaggagatgttttcgtgggtcgaggttgtatttttgttttgactttgtacctttgtacggggttcagagaggcctctcaataactccctgtactattttttttcttctttttaatgaaatgccacacgagtttattttgcattgttcgagaaaaaaaatagataaatatgttttataaaaaaaagatcaaggattgtttgtttgggatta

SEQ ID NO: 200642 - DNA, 947 bp, Zea Mays
agaacagaacacgagaagttgactatcgcgaggtggccaagaaggaaaagtagcggcggcatggggtcgcccaaggcggccaagagcatggtgaagcaacgcatctggcgtcaccggctcgtcgcgccgttcgctgccgttctcatcacggccgtcgtcgtattctccggcctgttcgcgcaggacccaagtgccacctcggagttcactgccgtgaacgcgggtaacaccctgccagtgcgcgataagtcggaatccacaggtgcagcagccagaggatctcccaacaaggaggatcttgcaacagctgcatttgagcaagaattggatgttggaaattctgagcccaatcaagctttccaaggcaccgtgcctgcagcaggcgagagagggacagcaacggcagtgccggtccaacgagaaagaagcagtggaggatctgaacctgaagagaagcaatcgcccccacaggaccaggaaggagaagaaacctctgctaagtcagcataatgttcacccatcgtggataatgggacataagagtttcaaagtgctgaaaataggaatcttgattattgtatcaaagagaggcatggtgcttcattgaaggaaacaaaaatacattagcacaactagtagtatcccactagctttgctggtttcttggattaggctacccgcagtgagcaacggtacgcgaagcgctacttctgtatttaacagatgcaatgtttcctaatctatttatactttcgaaagtataccatgggatgcaaagtttgaaacatgccgttccatgaaatttgatttcttttaatgaaacaatgctggcttcacataattacacccttccaatttgtccaaagaaacatatctaacgatttaaggtgtggcatacagatgatgttggattttgagttatgctggagtaaaagggccaccatctc

SEQ ID NO: 200643 - DNA, 4235 bp, Zea Mays
ctttcaatcactaggattcggtcctgttggtcgcctgctcaacattaaaaatatcagctggatctttgcaagagggcagtcgatgagaacatcatagtgtatcttggaacgggatgtgggaagacacacattgccgtgttactcatgtatgagcttggtcacctcatccgcaaacccagccgcgaggtctgcgtcttcctcgcaccgaccataccccttgtccgtcagcaagcaatggtgattgcagattccacaaattttaaagttcaacgttactatggaagtggtaaacactctagagatcaccaggcatgggagaaagagatgggagaatatgaggtccttgtaatgacccctcaaatattattgcacaatttgcggcattgtttcatcaggatggacttaattgcactattgatatttgatgaatgtcatcatgcacaagcacaaaaaaggcatccatatgcacaaattatgaaggaattctacaataatgctgataaacatcctcgtgtttttggcatgactgcttcaccaattattggaaaaggtggttctaacaagcttacctacactaaatgtatcaacagtctcgaggaattacttaatgcaaaggtttgttcagttgataatgtagaacttgaaagtgtgattgcttctcctaaggttgaagtgtacttttatggtccagttggtcactctaacttgactacagcttatatcaaagagcttggtggctataagtttcagtctgaatgcatgttaagagagagtgtatgcaatttcaatgagtcactgaagaaactgaagtccttatggaggttgcatgaaaatttgattttctgtttgcaagaagttggtctctttggagctctccaagctgcaaggacttttctctcttccagtagtgttagtctagatggaaagggggctgacattaatgattatgcaaacaaagcaatgtctcttctcagccgggacatcttagaaggtccggatgctgattcatttgacttagagacaatagaagaacctttcttctcaaaaaaatttgcagttcttattaacgttctatcgagatacaggttggaggaaaacatgaagtgcattgtttttgtgaaaagaatcattgtcgcaagagtagtagttcaaattctccaaaatctgaagtgccttgatttttggagatgtgagtttcttgtgggatgccactcggggttaaggaatatgtcaagggataagatgagttctatcattgaaaagttctcttcgggtgaggtaaaccttttggttgctactagtgtaggtgaggagggacttgatattcagacttgctgccttgttgtgcggtttgatctccctgaaactgttaatagctttatccaatcaagggggcgtgcccggatgagtaaatcgaaatatgtttttctcttggagaggggaaatcattctcaggagaagttacttgatgattatattactggtgaaatcattatggataaagagattaacttgagaacatcaaatgatatgttcaattgccttgaggagaacatctatcgagtcaatgatactggtgcttccattagcactgcttgcagtgtatctctattacatcgctactgtgataaccttcctagagatattttttttgttccttccccatcattcttctttgttgatgacgtcgatggaatagtatgcaaattaattcttccaccaaatgctgctttccgtcaagtgaatggtcaaccctgtccatcgaaagatgaagctaagagagatgcatgcttgaaagcatgcatcaaacttcatgaactcggtgctttgacagattttcttctacctggccaaggctctagaaagattaaggtatcaacaacaaataattcagaaagcaacaaagacgatgatgaaagttttagggaagagctttatgagatgttaatccctgcagttctgagaccttcaagatgcaaactagactcctcgtttaagttgcatttctattacatagaatttattcccataccagcagatagacgatatcagatgtttggtctttttgtgatcaatcgccttccagaggaatctgaaaagttggatgttgaattgcatcttgctcgtgcgaggattgtgaaagcaggaattaaatatttgggaaagattgagtttaacaaagaagagatgatactcgcacacaattttcaagaaatgtttttgaaagttctcctggatagatctgagttcacaccatcttatattttgttggggaatgatggtgcattggacatggattcaacattttaccttttacttcccatcaagcagaaattctatggtgataatatgattgattggccagcagtaaagcggtgtttatcatcacctgcatttcaagatccaatgggtttgtctctgcatgattcatatttaccaaatgagtctttgaagcttcttggtggaacatacaacaaagctgatgtgattggcagtttggtctatactccccacaccgacctgtttttcttcgttgatgccattctggatggaacaaatgctaaaagtgagttgaacggtgcaacgtatgcagaacattttaaacaaaggttacatatcaagctttcccatcctgagcagccgcttttgaaagctaagcaactcttctgtctgcgtaatctgcttcataaccgacaactagagagcacagaatctgaggctcgtgaattgatggagcactttgtggagttacctccagagctatgctctttgaagataattgggttctcaaaagatatgggcagttctttgtccttgctaccatctctaatgtatcgcttggagaatttgttggtggctattgagttgaaggatgtcatgtcatcttatttcccagaggcttctcaaattagtgcctcgggtatccttgaatcattgactactgaaaggtgtttagagaggatctctttggagcgattagaagtcctaggtgatgctttcttgaagtatgtagttgggcgtcataactttatttcatatgagggacttgatgaaggtcagttgaccaggagacgttctgatatagtgagtaattcgaatttgtatgagttatcaattagaagaaatttgcaggtgagttgattgtatcgatgatcccaatatttattttatgctaagttttatatatttatagcagttatttcatactatcttattgtagaagacatccaatgtgcttgtccttgtgctattgacatggttggttgaacggttgaacctcaagcacaagatggcaaaagtttaaattatgatttttgtcacgactatttataaacagacccacgttgtggcttgggacttagtgttgcattttttttaacatgcaggagtacaatatcaaatatcccatgcaaaataagttaaggcatcgagaaaaaaaagttaaggcatatgcctcagtggttgagaaagaaaacaaacaaaaaaaggtcttaaagccctttgtgtgtcataatagccatcttgcagctccttttttctctcgaaccacacaggagaactgcgtgtcatttcattaagaaaaaagaaaggaattcaaatccctgagaggttagcaaccccttagggctagtttggaaactcaaatcccttcgggattgaaggggattggagaggaaattagttcatttcaacctcaatcccctccaatcccgaaagggatttgaggttcccaaagtagcccttaggggaaatccctcgctattcaaatcccccctcccccatggatcccttccaattcccttgtcaccaaaccagcccttaggggatagaaaaccaacaccgttctttttttctcgaacgtgcaggagaactgcgccccattatatattaagcagaaaaaaggggtggtcttaaaagaccaatacaaaaatcccagcttggtcacggcccttaggatggttagggaagaggcggtgctctggtccatgactggtgccaaggccttgtccttcctccaagtcgatgagttgctggcttaaaacagcggtgtgggtcgtgtttcctccatgttttagtcggtgatccgtagttagtctctagtggtgtgtgtgctgtattggggttctctcccccctttcttttcttctattaatacaaagatgtgcagctctcctgcgtattctagaaaaaaaggtctccttacggaggccagtagcaagcatacataaataacg

SEQ ID NO: 200644 - DNA, 4394 bp, Zea Mays
ccggtctattcagctattcttctcgtgctcccacctctctctctctctctctctctctgcttacctcaacttggggaacgcgcacggccgttccacatacgccgagactccgacagactcagctcccagggttctgttcctttcccccacaatcgtacgcttccgctcgaagcttccgccatgagcgaggacgaggctgagagctcgagctccggcgcggccgcgagcgaacccaaggatccgagaacgatcgctcgcaaatatcagctggatctttgcaagagggcagtcgatgagaacatcatagtgtatcttggaacgggatgtgggaagacacacattgccgtgttactcatgtatgagcttggtcacctcatccgcaaacccagccgcgaggtctgcgtcttcctcgcaccgaccataccccttgtccgtcagcaagcaatggtgattgcagattccacaaattttaaagttcaacgttactatggaagtggtaaacactctagagatcaccaggcatgggagaaagagatgggagaatatgaggtccttgtaatgacccctcaaatattattgcacaatttgcggcattgtttcatcaggatggacttaattgcactattgatatttgatgaatgtcatcatgcacaagcacaaaaaaggcatccatatgcacaaattatgaaggaattctacaataatgctgataaacatcctcgtgtttttggcatgactgcttcaccaattattggaaaaggtggttctaacaagcttacctacactaaatgtatcaacagtctcgaggaattacttaatgcaaaggttgaagtgtacttttatggtccagttggtcactctaacttgactacagcttatatcaaagagcttggtggctataagtttcagtctgaatgcatgttaagagagagtgtatgcaatttcaatgagtcactgaagaaactgaagtccttatggaggttgcatgaaaatttgattttctgtttgcaagaagttggtctctttggagctctccaagctgcaaggacttttctctcttccagtagtgttagtctagatggaaagggggctgacattaatgattatgcaaacaaagcaatgtctcttctcagccgggacatcttagaaggtccggatgctgattcatttgacttagagacaatagaagaacctttcttctcaaaaaaatttgcagttcttattaacgttctatcgagatacaggttggaggaaaacatgaagtgcattgtttttgtgaaaagaatcattgtcgcaagagtagtagttcaaattctccaaaatctgaagtgccttgatttttggagatgtgagtttcttgtgggatgccactcggggttaaggaatatgtcaagggataagatgagttctatcattgaaaagttctcttcgggtgaggtaaaccttttggttgctactagtgtaggtgaggagggacttgatattcagacttgctgccttgttgtgcggtttgatctccctgaaactgttaatagctttatccaatcaagggggcgtgcccggatgagtaaatcgaaatatgtttttctcttggagaggggaaatcattctcaggagaagttacttgatgattatattactggtgaaatcattatggataaagagattaacttgagaacatcaaatgatatgttcaattgccttgaggagaacatctatcgagtcaatgatactggtgcttccattagcactgcttgcagtgtatctctattacatcgctactgtgataaccttcctagagatattttttttgttccttccccatcattcttctttgttgatgacgtcgatggaatagtatgcaaattaattcttccaccaaatgctgctttccgtcaagtgaatggtcaaccctgtccatcgaaagatgaagctaagagagatgcatgcttgaaagcatgcatcaaacttcatgaactcggtgctttgacagattttcttctacctggccaaggctctagaaagattaaggtatcaacaacaaataattcagaaagcaacaaagacgatgatgaaagttttagggaagagctttatgagatgttaatccctgcagttctgagaccttcaagatgcaaactagactcctcgtttaagttgcatttctattacatagaatttattcccataccagcagatagacgatatcagatgtttggtctttttgtgatcaatcgccttccagaggaatctgaaaagttggatgttgaattgcatcttgctcgtgcgaggattgtgaaagcaggaattaaatatttgggaaagattgagtttaacaaagaagagatgatactcgcacacaattttcaagaaatgtttttgaaagttctcctggatagatctgagttcacaccatcttatattttgttggggaatgatggtgcattggacatggattcaacattttaccttttacttcccatcaagcagaaattctatggtgataatatgattgattggccagcagtaaagcggtgtttatcatcacctgcatttcaagatccaatgggtttgtctctgcatgattcatatttaccaaatgagtctttgaagcttcttggtggaacatacaacaaagctgatgtgattggcagtttggtctatactccccacaccgacctgtttttcttcgttgatgccattctggatggaacaaatgctaaaagtgagttgaacggtgcaacgtatgcagaacattttaaacaaaggttacatatcaagctttcccatcctgagcagccgcttttgaaagctaagcaactcttctgtctgcgtaatctgcttcataaccgacaactagagagcacagaatctgaggctcgtgaattgatggagcactttgtggagttacctccagagctatgctctttgaagataattgggttctcaaaagatatgggcagttctttgtccttgctaccatctctaatgtatcgcttggagaatttgttggtggctattgagttgaaggatgtcatgtcatcttatttcccagaggcttctcaaattagtgcctcgggtatccttgaatcattgactactgaaaggtgtttagagaggatctctttggagcgattagaagtcctaggtgatgctttcttgaagtatgtagttgggcgtcataactttatttcatatgagggacttgatgaaggtcagttgaccaggagacgttctgatatagtgagtaattcgaatttgtatgagttatcaattagaagaaatttgcaggtgagttgattgtatcgatgatcccaatatttattttatgctaagttttatatatttatagcagttatttcatactatcttattgtagaagacatccaatgtgcttgtccttgtgctattgacatggttggttgaacggttgaacctcaagcacaagatggcaaaagtttaaattatgatttttgtcacgactatttataaacagacccacgttgtggcttgggacttagtgttgcattttttttaacatgcaggagtacaatatcaaatatcccatgcaaaataagttaaggcatcgagaaaaaaaagttaaggcatatgcctcagtggttgagaaagaaaacaaacaaaaaaaggtcttaaagccctttgtgtgtcataatagccatcttgcagctccttttttctctcgaaccacacaggagaactgcgtgtcatttcattaagaaaaaagaaaggaattcaaatccctgagaggttagcaaccccttagggctagtttggaaactcaaatcccttcgggattgaaggggattggagaggaaattagttcatttcaacctcaatcccctccaatcccgaaagggatttgaggttcccaaagtagcccttaggggaaatccctcgctattcaaatcccccctcccccatggatcccttccaattcccttgtcaccaaaccagcccttaggggatagaaaaccaacaccgttctttttttctcgaacgtgcaggagaactgcgccccattatatattaagcagaaaaaaggggtggtcttaaaagaccaatacaaaaatcccagcttggtcacggcccttaggatggttagggaagaggcggtgctctggtccatgactggtgccaaggccttgtccttcctccaagtcgatgagttgctggcttaaaacagcggtgtgggtcgtgtttcctccatgttttagtcggtgatccgtagttagtctctagtggtgtgtgtgctgtattggggttctctcccccctttcttttcttctattaatacaaagatgtgcagctctcctgcgtattctagaaaaaaaggtctccttacggaggccagtagcaagcatacataaataacg

SEQ ID NO: 200645 - DNA, 4619 bp, Zea Mays
cgaaaaccaggcgagacagtttgggtatcctgtgaacccggcctccccggccatcagcagtgccccccgggccccggtctattcagctattcttctcgtgctcccacctctctctctctctctctctctctgcttacctcaacttggggaacgcgcacggccgttccacatacgccgagactccgacagactcagctcccagggttctgttcctttcccccacaatcgtacgcttccgctcgaagcttccgccatgagcgaggacgaggctgagagctcgagctccggcgcggccgcgagcgaacccaaggatccgagaacgatcgctcgcaaatatcagctggatctttgcaagagggcagtcgatgagaacatcatagtgtatcttggaacgggatgtgggaagacacacattgccgtgttactcatgtatgagcttggtcacctcatccgcaaacccagccgcgaggtctgcgtcttcctcgcaccgaccataccccttgtccgtcagcaagcaatggtgattgcagattccacaaattttaaagttcaacgttactatggaagtggtaaacactctagagatcaccaggcatgggagaaagagatgggagaatatgaggtccttgtaatgacccctcaaatattattgcacaatttgcggcattgtttcatcaggatggacttaattgcactattgatatttgatgaatgtcatcatgcacaagcacaaaaaaggcatccatatgcacaaattatgaaggaattctacaataatgctgataaacatcctcgtgtttttggcatgactgcttcaccaattattggaaaaggtggttctaacaagcttacctacactaaatgtatcaacagtctcgaggaattacttaatgcaaaggtttgttcagttgataatgtagaacttgaaagtgtgattgcttctcctaaggttgaagtgtacttttatggtccagttggtcactctaacttgactacagcttatatcaaagagcttggtggctataagtttcagcttctaatgtgctttgaacagtctgaatgcatgttaagagagagtgtatgcaatttcaatgagtcactgaagaaactgaagtccttatggaggttgcatgaaaatttgattttctgtttgcaagaagttggtctctttggagctctccaagctgcaaggacttttctctcttccagtagtgttagtctagatggaaagggggctgacattaatgattatgcaaacaaagcaatgtctcttctcagccgggacatcttagaaggtccggatgctgattcatttgacttagagacaatagaagaacctttcttctcaaaaaaatttgcagttcttattaacgttctatcgagatacaggttggaggaaaacatgaagtgcattgtttttgtgaaaagaatcattgtcgcaagagtagtagttcaaattctccaaaatctgaagtgccttgatttttggagatgtgagtttcttgtgggatgccactcggggttaaggaatatgtcaagggataagatgagttctatcattgaaaagttctcttcgggtgaggtaaaccttttggttgctactagtgtaggtgaggagggacttgatattcagacttgctgccttgttgtgcggtttgatctccctgaaactgttaatagctttatccaatcaagggggcgtgcccggatgagtaaatcgaaatatgtttttctcttggagaggggaaatcattctcaggagaagttacttgatgattatattactggtgaaatcattatggataaagagattaacttgagaacatcaaatgatatgttcaattgccttgaggagaacatctatcgagtcaatgatactggtgcttccattagcactgcttgcagtgtatctctattacatcgctactgtgataaccttcctagagatatgtatgcaaaggatcatttattattctacccattttgtgtcatgggaatatcctagaataatttgatacatcttgttgcagtttttttgttccttccccatcattcttctttgttgatgacgtcgatggaatagtatgcaaattaattcttccaccaaatgctgctttccgtcaagtgaatggtcaaccctgtccatcgaaagatgaagctaagagagatgcatgcttgaaagcatgcatcaaacttcatgaactcggtgctttgacagattttcttctacctggccaaggctctagaaagattaaggtatcaacaacaaataattcagaaagcaacaaagacgatgatgaaagttttagggaagagctttatgagatgttaatccctgcagttctgagaccttcaagatgcaaactagactcctcgtttaagttgcatttctattacatagaatttattcccataccagcagatagacgatatcagatgtttggtctttttgtgatcaatcgccttccagaggaatctgaaaagttggatgttgaattgcatcttgctcgtgcgaggattgtgaaagcaggaattaaatatttgggaaagattgagtttaacaaagaagagatgatactcgcacacaattttcaagaaatgtttttgaaagttctcctggatagatctgagttcacaccatcttatattttgttggggaatgatggtgcattggacatggattcaacattttaccttttacttcccatcaagcagaaattctatggtgataatatgattgattggccagcagtaaagcggtgtttatcatcacctgcatttcaagatccaatgggtttgtctctgcatgattcatatttaccaaatgagtctttgaagcttcttggtggaacatacaacaaagctgatgtgattggcagtttggtctatactccccacaccgacctgtttttcttcgttgatgccattctggatggaacaaatgctaaaagtgagttgaacggtgcaacgtatgcagaacattttaaacaaaggttacatatcaagctttcccatcctgagcagccgcttttgaaagctaagcaactcttctgtctgcgtaatctgcttcataaccgacaactagagagcacagaatctgaggctcgtgaattgatggagcactttgtggagttacctccagagctatgctctttgaagataattgggttctcaaaagatatgggcagttctttgtccttgctaccatctctaatgtatcgcttggagaatttgttggtggctattgagttgaaggatgtcatgtcatcttatttcccagaggcttctcaaattagtgcctcgggtatccttgaatcattgactactgaaaggtgtttagagaggatctctttggagcgattagaagtcctaggtgatgctttcttgaagtatgtagttgggcgtcataactttatttcatatgagggacttgatgaaggtcagttgaccaggagacgttctgatatagtgagtaattcgaatttgtatgagttatcaattagaagaaatttgcaggtgagttgattgtatcgatgatcccaatatttattttatgctaagttttatatatttatagcagttatttcatactatcttattgtagaagacatccaatgtgcttgtccttgtgctattgacatggttggttgaacggttgaacctcaagcacaagatggcaaaagtttaaattatgatttttgtcacgactatttataaacagacccacgttgtggcttgggacttagtgttgcattttttttaacatgcaggagtacaatatcaaatatcccatgcaaaataagttaaggcatcgagaaaaaaaagttaaggcatatgcctcagtggttgagaaagaaaacaaacaaaaaaaggtcttaaagccctttgtgtgtcataatagccatcttgcagctccttttttctctcgaaccacacaggagaactgcgtgtcatttcattaagaaaaaagaaaggaattcaaatccctgagaggttagcaaccccttagggctagtttggaaactcaaatcccttcgggattgaaggggattggagaggaaattagttcatttcaacctcaatcccctccaatcccgaaagggatttgaggttcccaaagtagcccttaggggaaatccctcgctattcaaatcccccctcccccatggatcccttccaattcccttgtcaccaaaccagcccttaggggatagaaaaccaacaccgttctttttttctcgaacgtgcaggagaactgcgccccattatatattaagcagaaaaaaggggtggtcttaaaagaccaatacaaaaatcccagcttggtcacggcccttaggatggttagggaagaggcggtgctctggtccatgactggtgccaaggccttgtccttcctccaagtcgatgagttgctggcttaaaacagcggtgtgggtcgtgtttcctccatgttttagtcggtgatccgtagttagtctctagtggtgtgtgtgctgtattggggttctctcccccctttcttttcttctattaatacaaagatgtgcagctctcctgcgtattctagaaaaaaaggtctccttacggaggccagtagcaagcatacataaataacg

SEQ ID NO: 200646 - DNA, 4480 bp, Zea Mays
catcaattgacgcacgcctcctgcggcagatccgcaattccgcagcccgcacacgaaaaccaggcgagacagtttgggtatcctgtgaacccggcctccccggccatcagcagtgccccccgggccccggtctattcagctattcttctcgtgctcccacctctctctctctctctctctctctgcttacctcaacttggggaacgcgcacggccgttccacatacgccgagactccgacagactcagctcccagggttctgttcctttcccccacaatcgtacgcttccgctcgaagcttccgccatgagcgaggacgaggctgagagctcgagctccggcgcggccgcgagcgaacccaaggatccgagaacgatcgctcgcaaatatcagctggatctttgcaagagggcagtcgatgagaacatcatagtgtatcttggaacgggatgtgggaagacacacattgccgtgttactcatgtatgagcttggtcacctcatccgcaaacccagccgcgaggtctgcgtcttcctcgcaccgaccataccccttgtccgtcagcaagcaatggtgattgcagattccacaaattttaaagttcaacgttactatggaagtggtaaacactctagagatcaccaggcatgggagaaagagatgggagaatatgaggtccttgtaatgacccctcaaatattattgcacaatttgcggcattgtttcatcaggatggacttaattgcactattgatatttgatgaatgtcatcatgcacaagcacaaaaaaggcatccatatgcacaaattatgaaggaattctacaataatgctgataaacatcctcgtgtttttggcatgactgcttcaccaattattggaaaaggtggttctaacaagcttacctacactaaatgtatcaacagtctcgaggaattacttaatgcaaaggtttgttcagttgataatgtagaacttgaaagtgtgattgcttctcctaaggttgaagtgtacttttatggtccagttggtcactctaacttgactacagcttatatcaaagagcttggtggctataagtttcagtctgaatgcatgttaagagagagtgtatgcaatttcaatgagtcactgaagaaactgaagtccttatggaggttgcatgaaaatttgattttctgtttgcaagaagttggtctctttggagctctccaagctgcaaggacttttctctcttccagtagtgttagtctagatggaaagggggctgacattaatgattatgcaaacaaagcaatgtctcttctcagccgggacatcttagaaggtccggatgctgattcatttgacttagagacaatagaagaacctttcttctcaaaaaaatttgcagttcttattaacgttctatcgagatacaggttggaggaaaacatgaagtgcattgtttttgtgaaaagaatcattgtcgcaagagtagtagttcaaattctccaaaatctgaagtgccttgatttttggagatgtgagtttcttgtgggatgccactcggggttaaggaatatgtcaagggataagatgagttctatcattgaaaagttctcttcgggtgaggtaaaccttttggttgctactagtgtaggtgaggagggacttgatattcagacttgctgccttgttgtgcggtttgatctccctgaaactgttaatagctttatccaatcaagggggcgtgcccggatgagtaaatcgaaatatgtttttctcttggagaggggaaatcattctcaggagaagttacttgatgattatattactggtgaaatcattatggataaagagattaacttgagaacatcaaatgatatgttcaattgccttgaggagaacatctatcgagtcaatgatactggtgcttccattagcactgcttgcagtgtatctctattacatcgctactgtgataaccttcctagagatattttttttgttccttccccatcattcttctttgttgatgacgtcgatggaatagtatgcaaattaattcttccaccaaatgctgctttccgtcaagtgaatggtcaaccctgtccatcgaaagatgaagctaagagagatgcatgcttgaaagcatgcatcaaacttcatgaactcggtgctttgacagattttcttctacctggccaaggctctagaaagattaaggtatcaacaacaaataattcagaaagcaacaaagacgatgatgaaagttttagggaagagctttatgagatgttaatccctgcagttctgagaccttcaagatgcaaactagactcctcgtttaagttgcatttctattacatagaatttattcccataccagcagatagacgatatcagatgtttggtctttttgtgatcaatcgccttccagaggaatctgaaaagttggatgttgaattgcatcttgctcgtgcgaggattgtgaaagcaggaattaaatatttgggaaagattgagtttaacaaagaagagatgatactcgcacacaattttcaagaaatgtttttgaaagttctcctggatagatctgagttcacaccatcttatattttgttggggaatgatggtgcattggacatggattcaacattttaccttttacttcccatcaagcagaaattctatggtgataatatgattgattggccagcagtaaagcggtgtttatcatcacctgcatttcaagatccaatgggtttgtctctgcatgattcatatttaccaaatgagtctttgaagcttcttggtggaacatacaacaaagctgatgtgattggcagtttggtctatactccccacaccgacctgtttttcttcgttgatgccattctggatggaacaaatgctaaaagtgagttgaacggtgcaacgtatgcagaacattttaaacaaaggttacatatcaagctttcccatcctgagcagccgcttttgaaagctaagcaactcttctgtctgcgtaatctgcttcataaccgacaactagagagcacagaatctgaggctcgtgaattgatggagcactttgtggagttacctccagagctatgctctttgaagataattgggttctcaaaagatatgggcagttctttgtccttgctaccatctctaatgtatcgcttggagaatttgttggtggctattgagttgaaggatgtcatgtcatcttatttcccagaggcttctcaaattagtgcctcgggtatccttgaatcattgactactgaaaggtgtttagagaggatctctttggagcgattagaagtcctaggtgatgctttcttgaagtatgtagttgggcgtcataactttatttcatatgagggacttgatgaaggtcagttgaccaggagacgttctgatatagtgagtaattcgaatttgtatgagttatcaattagaagaaatttgcagacatccaatgtgcttgtccttgtgctattgacatggttggttgaacggttgaacctcaagcacaagatggcaaaagtttaaattatgatttttgtcacgactatttataaacagacccacgttgtggcttgggacttagtgttgcattttttttaacatgcaggagtacaatatcaaatatcccatgcaaaataagttaaggcatcgagaaaaaaaagttaaggcatatgcctcagtggttgagaaagaaaacaaacaaaaaaaggtcttaaagccctttgtgtgtcataatagccatcttgcagctccttttttctctcgaaccacacaggagaactgcgtgtcatttcattaagaaaaaagaaaggaattcaaatccctgagaggttagcaaccccttagggctagtttggaaactcaaatcccttcgggattgaaggggattggagaggaaattagttcatttcaacctcaatcccctccaatcccgaaagggatttgaggttcccaaagtagcccttaggggaaatccctcgctattcaaatcccccctcccccatggatcccttccaattcccttgtcaccaaaccagcccttaggggatagaaaaccaacaccgttctttttttctcgaacgtgcaggagaactgcgccccattatatattaagcagaaaaaaggggtggtcttaaaagaccaatacaaaaatcccagcttggtcacggcccttaggatggttagggaagaggcggtgctctggtccatgactggtgccaaggccttgtccttcctccaagtcgatgagttgctggcttaaaacagcggtgtgggtcgtgtttcctccatgttttagtcggtgatccgtagttagtctctagtggtgtgtgtgctgtattggggttctctcccccctttcttttcttctattaatacaaagatgtgcagctctcctgcgtattctagaaaaaaaggtctccttacggaggccagtagcaagcatacataaataacg

SEQ ID NO: 200647 - DNA, 3102 bp, Zea Mays
gcacacgaaaaccaggcgagacagtttgggtatcctgtgaacccggcctccccggccatcagcagtgccccccgggccccggtctattcagctattcttctcgtgctcccacctctctctctctctctctctctctgcttacctcaacttggggaacgcgcacggccgttccacatacgccgagactccgacagactcagctcccagggttctgttcctttcccccacaatcgtacgcttccgctcgaagcttccgccatgagcgaggacgaggctgagagctcgagctccggcgcggccgcgagcgaacccaaggatccgagaacgatcgctcgcaaatatcagctggatctttgcaagagggcagtcgatgagaacatcatagtgtatcttggaacgggatgtgggaagacacacattgccgtgttactcatgtatgagcttggtcacctcatccgcaaacccagccgcgaggtctgcgtcttcctcgcaccgaccataccccttgtccgtcagcaagcaatggtgattgcagattccacaaattttaaagttcaacgttactatggaagtggtaaacactctagagatcaccaggcatgggagaaagagatgggagaatatgaggtccttgtaatgacccctcaaatattattgcacaatttgcggcattgtttcatcaggatggacttaattgcactattgatatttgatgaatgtcatcatgcacaagcacaaaaaaggcatccatatgcacaaattatgaaggaattctacaataatgctgataaacatcctcgtgtttttggcatgactgcttcaccaattattggaaaaggtggttctaacaagcttacctacactaaatgtatcaacagtctcgaggaattacttaatgcaaaggtttgttcagttgataatgtagaacttgaaagtgtgattgcttctcctaaggttgaagtgtacttttatggtccagttggtcactctaacttgactacagcttatatcaaagagcttggtggctataagtttcagtctgaatgcatgttaagagagagtgtatgcaatttcaatgagtcactgaagaaactgaagtccttatggaggttgcatgaaaatttgattttctgtttgcaagaagttggtctctttggagctctccaagctgcaaggacttttctctcttccagtagtgttagtctagatggaaagggggctgacattaatgattatgcaaacaaagcaatgtctcttctcagccgggacatcttagaaggtccggatgctgattcatttgacttagagacaatagaagaacctttcttctcaaaaaaatttgcagttcttattaacgttctatcgagatacaggttggaggaaaacatgaagtgcattgtttttgtgaaaagaatcattgtcgcaagagtagtagttcaaattctccaaaatctgaagtgccttgatttttggagatgtgagtttcttgtgggatgccactcggggttaaggaatatgtcaagggataagatgagttctatcattgaaaagttctcttcgggtgaggtaaaccttttggttgctactagtgtaggtgaggagggacttgatattcagacttgctgccttgttgtgcggtttgatctccctgaaactgttaatagctttatccaatcaagggggcgtgcccggatgagtaaatcgaaatatgtttttctcttggagaggggaaatcattctcaggagaagttacttgatgattatattactggtgaaatcattatggataaagagattaacttgagaacatcaaatgatatgttcaattgccttgaggagaacatctatcgagtcaatgatactggtgcttccattagcactgcttgcagtgtatctctattacatcgctactgtgataaccttcctagagatattttttttgttccttccccatcattcttctttgttgatgacgtcgatggaatagtatgcaaattaattcttccaccaaatgctgctttccgtcaagtgaatggtcaaccctgtccatcgaaagatgaagctaagagagatgcatgcttgaaagcatgcatcaaacttcatgaactcggtgctttgacagattttcttctacctggccaaggctctagaaagattaaggtatcaacaacaaataattcagaaagcaacaaagacgatgatgaaagttttagggaagagctttatgagatgttaatccctgcagttctgagaccttcaagatgcaaactagactcctcgtttaagttgcatttctattacatagaatttattcccataccagcagatagacgatatcagatgtttggtctttttgtgatcaatcgccttccagaggaatctgaaaagttggatgttgaattgcatcttgctcgtgcgaggattgtgaaagcaggaattaaatatttgggaaagattgagtttaacaaagaagagatgatactcgcacacaattttcaagaaatgtttttgaaagttctcctggatagatctgagttcacaccatcttatattttgttggggaatgatggtgcattggacatggattcaacattttaccttttacttcccatcaagcagaaattctatggtgataatatgattgattggccagcagtaaagcggtgtttatcatcacctgcatttcaagatccaatgggtttgtctctgcatgattcatatttaccaaatgagtctttgaagcttcttggtggaacatacaacaaagctgatgtgattggcagtttggtctatactccccacaccgacctgtttttcttcgttgatgccattctggatggaacaaatgctaaaagtgagttgaacggtgcaacgtatgcagaacattttaaacaaaggcacggtgtacggacatttttctgacactcttcttaatacaaagatacacaaccctcctgcgtgtagagaaaaaaaaccatgttgagcctccagcaaggcaaatatagttttttttaacaaatgcagaagagttgcgtgtcatttcattaagaaaaaaaaatacaaataggggcaggacaagacttgctggccccaattacagac

SEQ ID NO: 200648 - DNA, 1182 bp, Zea Mays
cggagaggaaggagatatagagggtggaatcttttagaggagactgtaaaggacggatatagaggatgaatatagaggacgttgctggagacagcctaaggctgcctccaacaagagccgctaaaggctcatgtccgctaaatgtgagggactgtcaggtcccctacgtctccaacaaggtcctctaaagcgtcccctaaattatagaggatgtgccagagaccctaactgtggaggccgcccaccgtgcgctatccgcgcgacggatccaccagccgccgcgaggaaacttccgcctcctcctaccgcgcgctggcgactacatctcccggggccgagccctcaatccggcgtgcttcgtcgccggcatcgaggcaggtgggagacaagagggcttgcgagagcggacgcggagcatggcggaggagcagatcgaagaggcgtccatggccatcgccggacgcggagcatcgtggaggagcagatcgaagaggcgtccatggccacggcggcggccacgccgttccagctccagttcgacaagcccatcccgttccagagagggagtcaggaaagaaggcgctcaaaagtcgggacaaaaatatctgagtgaatcggacctgcagaatgcggacggtcacccagagattgatcttgcgttcgtgctgctgctgccccgccggtcactgataaaaatggcagaatggaatccagagaaggatctgcttgctatggttactgatgactccaaggttctcctccatcgcttcaattggcaaaggctttggacaatctctctagggaagtgcatcacatcaatttgttggagccctgatggtaaaataatagcacttggcacataagctggtttgattcttttgcatgatgtggaggtgtgtatctggatgatgataaaaattgtcggtgtctattgtatctttgtatgaacattcgtttgtacttcatagacacctgatccagtgcctatcttctcttaatatttttctaattgcttattctcatttttatatcatgcttaaaccttatgagcgaactattaggagacatttaggggatacaggcctcaaggacttcttgcccaattatgttttcgatagaggcattttaatacttcttgaagattaatgcgtgtcagctatacaattgtcaattgtgtttgac

SEQ ID NO: 200649 - DNA, 1269 bp, Zea Mays
tagaggacgttgtcggagaggaaggagatatagagggtggaatcttttagaggagactgtaaaggacggatatagaggatgaatatagaggacgttgctggagacagcctaaggctgcctccaacaagagccgctaaaggctcatgtccgctaaatgtgagggactgtcaggtcccctacgtctccaacaaggtcctctaaagcgtcccctaaattatagaggatgtgccagagaccctaactgtggaggccgcccaccgtgcgctatccgcgcgacggatccaccagccgccgcgaggaaacttccgcctcctcctaccgcgcgctggcgactacatctcccggggccgagccctcaatccggcgtgcttcgtcgccggcatcgaggcaggtgggagacaagagggcttgcgagagcggacgcggagcatggcggaggagcagatcgaagaggcgtccatggccatcgccggacgcggagcatcgtggaggagcagatcgaagaggcgtccatggccacggcggcggccacgccgttccagctccagttcgacaagcccatcccgttccagggcaacggctggttcacggatgggcaagctaggccattgccccatctcaaattttacgatctacacaggatcagagagggagtcaggaaagaaggcgctcaaaagtcgggacaaaaatatctgagtgaatcggacctgcagaatgcggacggtcacccagagattgatcttgcgttcgtgctgctgctgccccgccggtcactgataaaaatggcagaatggaatccagagaaggatctgcttgctatggttactgatgactccaaggttctcctccatcgcttcaattggcaaaggctttggacaatctctctagggaagtgcatcacatcaatttgttggagccctgatggtaaaataatagcacttggcacataagctggtttgattcttttgcatgatgtggaggtgtgtatctggatgatgataaaaattgtcggtgtctattgtatctttgtatgaacattcgtttgtacttcatagacacctgatccagtgcctatcttctcttaatatttttctaattgcttattctcatttttatatcatgcttaaaccttatgagcgaactattaggagacatttaggggatacaggcctcaaggacttcttgcccaattatgttttcgatagaggcattttaatacttcttgaagattaatgcgtgtcagctatacaattgtcaattgtgtttgac

SEQ ID NO: 200650 - DNA, 1481 bp, Zea Mays
tagaggacgttgtcggagaggaaggagatatagagggtggaatcttttagaggagactgtaaaggacggatatagaggatgaatatagaggacgttgctggagacagcctaaggctgcctccaacaagagccgctaaaggctcatgtccgctaaatgtgagggactgtcaggtcccctacgtctccaacaaggtcctctaaagcgtcccctaaattatagaggatgtgccagagaccctaactgtggaggccgcccaccgtgcgctatccgcgcgacggatccaccagccgccgcgaggaaacttccgcctcctcctaccgcgcgctggcgactacatctcccggggccgagccctcaatccggcgtgcttcgtcgccggcatcgaggcaggtgggagacaagagggcttgcgagagcggacgcggagcatggcggaggagcagatcgaagaggcgtccatggccatcgccggacgcggagcatcgtggaggagcagatcgaagaggcgtccatggccacggcggcggccacgccgttccagctccagttcgacaagcccatcccgttccagggcaacggctggttcacggatgggcaagctaggccattgccccatctcaaattttacgatctacacaggatcagagagggagtcaggaaagaaggcgctcaaaagtcgggacaaaaatatctgagtgaatcggacctgcagaatgcggacggtcacccagagattgatcttgcgttcgtgctgctgctgccccgccggtcactgataaaaatggcagaatggaatccagagaaggatctgcttgctatggttactgatgactccaaggttctcctccatcgcttcaattggcaaaggctttggacaatctctctaggttgatacacccctactccattaccctcagttgcctgttgtttttgcccactttgaatattccttgtcattacaatcaatatgtacaatctgtcaattccagtgtgcccttcagttataccttttagttatagtgatttataagatcatgtctgctttgaacttataaaaaatagtgagaaattgagaactaaagtatttataattgttcagggaagtgcatcacatcaatttgttggagccctgatggtaaaataatagcacttggcacataagctggtttgattcttttgcatgatgtggaggtgtgtatctggatgatgataaaaattgtcggtgtctattgtatctttgtatgaacattcgtttgtacttcatagacacctgatccagtgcctatcttctcttaatatttttctaattgcttattctcatttttatatcatgcttaaaccttatgagcgaactattaggagacatttaggggatacaggcctcaaggacttcttgcccaattatgttttcgatagaggcattttaatacttcttgaagattaatgcgtgtcagctatacaattgtcaattgtgtttgac

SEQ ID NO: 200651 - DNA, 2215 bp, Zea Mays
tagaggacgttgtcggagaggaaggagatatagagggtggaatcttttagaggagactgtaaaggacggatatagaggatgaatatagaggacgttgctggagacagcctaaggctgcctccaacaagagccgctaaaggctcatgtccgctaaatgtgagggactgtcaggtcccctacgtctccaacaaggtcctctaaagcgtcccctaaattatagaggatgtgccagagaccctaactgtggaggccgcccaccgtgcgctatccgcgcgacggatccaccagccgccgcgaggaaacttccgcctcctcctaccgcgcgctggcgactacatctcccggggccgagccctcaatccggcgtgcttcgtcgccggcatcgaggcaggtgggagacaagagggcttgcgagagcggacgcggagcatggcggaggagcagatcgaagaggcgtccatggccatcgccggacgcggagcatcgtggaggagcagatcgaagaggcgtccatggccacggcggcggccacgccgttccagctccagttcgacaagcccatcccgttccagggcaacggctggttcacggatgggcaagctaggccattgccccatctcaaattttacgatctacacaggatcagagagggagtcaggaaagaaggcgctcaaaagtcgggacaaaaatatctgagtgaatcggacctgcagaatgcggacggtcacccagagattgatcttgcgttcgtgctgctgctgccccgccggtcactggtaagctccctgcctcgaccttctcttctcaaactcagttcatcgacacaagaaccaagggaatacgacagtggtgagggacggggagagaaggggtatagcgtggctgtcgcggtccttcgaatctggccatgggtcatggccgcacccgcacattgttcgttaacctaccaaccaccagaaactcgagattggaattggatggataaggcacaagctaacaggatgcctctcattttttagatcagcaatcaattcgttacatctagccacttgtgaaaaagcttacaaaaaatcattttatctttcgatcacatatatgatgtgtaaagtactttattgtttaggggaaaaatttgttcccacatattacaacttagctgtatattcactatgctacttttatcaatacacttttcttatattgttgttatctaatatataaattttcttattgtagatttgattttattggtgaatcggtgcagccaaaaggttttcagtatgcatgtcattttgaaacattcatagtgttatcacttaatgatttgtgaattggtgtagccaaaaactacttttgtctagtaatctagtctaatgatttgccttcgccggcagacactgatatagagcactgatttcagctttgaatgctattttttgttttgcaaatgcacattagtaattacaccgtttgcctcttgttcatgcttaatcagtctcattcaccttgtatcatgtttacaattcgctaccaaacaatctttaagtaatagagagttaatagcaagcacatatatcatacggttgctgatactgaatttcaccttttgtcgctttatatcttttctgtaattcagaatcgattgagcacagtgagattcaatttcctatgtatgctaaatggggcatcgggtactgacgtgcctgtgtttcatacttgtagataaaaatggcagaatggaatccagagaaggatctgcttgctatggttactgatgactccaaggttctcctccatcgcttcaattggcaaaggctttggacaatctctctagggaagtgcatcacatcaatttgttggagccctgatggtaaaataatagcacttggcacataagctggtttgattcttttgcatgatgtggaggtgtgtatctggatgatgataaaaattgtcggtgtctattgtatctttgtatgaacattcgtttgtacttcatagacacctgatccagtgcctatcttctcttaatatttttctaattgcttattctcatttttatatcatgcttaaaccttatgagcgaactattaggagacatttaggggatacaggcctcaaggacttcttgcccaattatgttttcgatagaggcattttaatacttcttgaagattaatgcgtgtcagctatacaattgtcaattgtgtttgac

SEQ ID NO: 200652 - DNA, 1333 bp, Zea Mays
ttctatccatttgaatactttaaataaccggtttagcaaaactaaaatatgtacaatacatttgagagtatgacaaatacgtatgtacaaaaaataaaaataaaaaatatttctaatatagatatttgagtatagaggacgttgtcggagaggaaggagatatagagggtggaatcttttagaggagactgtaaaggacggatatagaggatgaatatagaggacgttgctggagacagcctaaggctgcctccaacaagagccgctaaaggctcatgtccgctaaatgtgagggactgtcaggtcccctacgtctccaacaaggtcctctaaagcgtcccctaaattatagaggatgtgccagagaccctaactgtggaggccgcccaccgtgcgctatccgcgcgacggatccaccagccgccgcgaggaaacttccgcctcctcctaccgcgcgctggcgactacatctcccggggccgagccctcaatccggcgtgcttcgtcgccggcatcgaggcaggtgggagacaagagggcttgcgagagcggacgcggagcatggcggaggagcagatcgaagaggcgtccatggccatcgccggacgcggagcatcgtggaggagcagatcgaagaggcgtccatggccacggcggcggccacgccgttccagctccagttcgacaagcccatcccgttccaggatcagagagggagtcaggaaagaaggcgctcaaaagtcgggacaaaaatatctgagtgaatcggacctgcagaatgcggacggtcacccagagattgatcttgcgttcgtgctgctgctgccccgccggtcactgataaaaatggcagaatggaatccagagaaggatctgcttgctatggttactgatgactccaaggttctcctccatcgcttcaattggcaaaggctttggacaatctctctagggaagtgcatcacatcaatttgttggagccctgatggtaaaataatagcacttggcacataagctggtttgattcttttgcatgatgtggaggtgtgtatctggatgatgataaaaattgtcggtgtctattgtatctttgtatgaacattcgtttgtacttcatagacacctgatccagtgcctatcttctcttaatatttttctaattgcttattctcatttttatatcatgcttaaaccttatgagcgaactattaggagacatttaggggatacaggcctcaaggacttcttgcccaattatgttttcgatagaggcattttaatacttcttgaagattaatgcgtgtcagctatacaattgtcaattgtgtttgac

SEQ ID NO: 200653 - DNA, 455 bp, Zea Mays
ggggcattccgatgcgaccgcactgagaattcttctcgagggagcaggcgaggaaggatcctgacaacttcttcaatttgagaatgctcacatgtcctgcaaccgagatggtggatggttcaagggtgctttactttgagcaggcattttggagatctccagaaaagccttttagacaaagattctacatggtaaagccctgtccgaaggagatgaaatgcgatgttgagttgagttcatatgcaattagggatgctgaagagtacaagaatttctgtgaccgtcaaaaggatcagaggccacaggcagaagaagtaattgcagtatgtcatttcgaacacaatcttacttttcagactgtttgtttctgaagtttcccccttcatttacttatgcctgttaatggctaaactctggagggacagctgcaaatgaaatgaaggaaatatttacaa

SEQ ID NO: 200654 - DNA, 4392 bp, Zea Mays
ctgggagcgagcgagaggagtgactcggaagcaagcggaggcggctggagggacggcagcggatgcggtgaccatctcgcgcacgcctttccccgtgagcgctggtcctggctttccttatctccccgagcaaccccaccgcacccttctcggtggatccgagggctggagtctcggcggcggcatgaagcggcagaggtcgtacggcgacggtctggacgacgaccggcggaggttctacgaccgcggccccccgccgcgggactacgacggcgataggttcgatcgcaggaaggggttcggtggcggcggcgggttccacgacagccggtaccgagactacccctccccaagggggtatggtggggatcgggccttgcaccggtccgagagtttctctggcttccgtcgggagttccccaagggtttccggtcggagcgtgacaggtcgcggcgggatggtgacggcagctcgacgtggcgtcggccgggaagcgggtggacggacgccgagtgttttgaggagtacagggcacccgccaggctgggagcgtcatcgctgcctgggcagccgcggcggtcacggtcacggtcgcccagtgagccgaggaggaggtttgaggttgccaaggcagagaagccgaggaagcacagtgccggcatcaatgaggtggaggaaggtgagctctcaccagttgctgagcccaaggccaggcctgctgccgtggagcatcggaagcaggttgagtcaagtcgtgtaaaggagaagggactggagcaaggtaaggcgaagaaactgaattctggggtccaagcaaatttgggagctcgagctaatggatcctctagtgcatctgatcctaacaatgcagcgagggaggaaggcaagaaaagggatgacatactggtagctgaagcaatggatgaagtgcgtgagaagtcttcaacaatggttacagaggaagtcgtcagtggaggacatcaggtacaagcactacatgcggctaccactgattctagtgagtttgggctaaccacttcacccatgcagcaaggagtgctgcaggaggaagtgaagccacaagaggagactaccaattcggttgacatggttggggagaacacttcctctaccatgctgaaggagggtattcaggaagaagcaacaacaagagataaaactaacaatgataccgatgaagtcagagagagtgcttcatccaattttagtcaagcagtgcaggaagaagtgacggcattacacaagactggcaatgctgctattgaggttggaaagaacatttcacctctcatgcagcaagaagtgctacaggatgcggtggtggagttagacgatactgcacatgcagttgatgaggttgtgaagagtgcttcctctgatatgctgaaggaagttattcaggaagaagtggtgcaacataatggaagtgccgatgttgttgatatggttgacactgacacttctgatctgccatgggaggcaatgcaggaaaaaacagtaatactggatggaaatgaccataattttgatactgtggaacctgtcagttattctggtatgctgaaggaagcgatgcacgaaggagagttgacaagggatgaaactgccattaacactattgtagcaggacaaggtaattcaactgatatggtggatgaagtgatgctcggtaaagcagctgtgcgggaagtaatctccagtgctgttaattcagttggcgagagcaatatgtctaccgggctgcagggagaggtgatggtttctcaaaaccaacaggctcctgaaagtaaagaatttgaaaaaataactgtaatggcagagatggatgagccagcagaagatatcacacctcagcctgtagaagtggaactcgagatacatcattgcaaagaaagaggtacatcagaggaaactcttgtagtagaaaaggatgcatctgctatgcatgacaatgttgagaaagaagtaaaaggatttgatatcgaggccaaagctgaccgtgcctttatgttccataaacccatgaaagaacatgctgggggtagtaaggaaagaagttgccaatccaaatcttatgacaagggatttgactgaaagataaaagaaatggcatagaatttgatgtccttagtaagaaaagttaaaagtagatcattcatgttcactgggaagaggtctttgactcaacattgcagcgtggtgtagaaccaacacaaacatcaaaatctgcttcaaccactgttgtaaagacagaacatgatacaatcaagctagagaagcttgatctgtcattgagcttatcagtttgtttgcagaattctgaatctaagtcttcgattcctaaaactgcttctctagtccatgcagcattctctcagccgttatcatcatcatctttccacaccaactcagatggggttcccaacttcaataccattgaccaattctgaaacacttgatcacaatcctagttgctcactcacccaacaatcattggacaattatgagcattcagtaggcagcaaacctttctttatgggagttgatcagatgagcaatcacacaagaagacaagctcagttgtctagtgaatctacacagaaggggagtgctaccccactccttcagagagtactccaaaatggccatatggcagatactagcacttctgcgataaaaaagcatactagtggaatatccactgacctacagaggcaaatctcaggagttttgttgccaacacatagtcattgttctcacaactctggattggaacataatagacatagaaggcaacttacaagagagagaagtagtaacagccttacaagggatgaacggcaggaggggggacaactagttgttaatggtgctggtgttattgagaggattatttccaaggttgtttcagaacctttgcatcttacaggaaggatgcttcaagaaatgacagaaaattctataacatatttgagggaggccatttctgaaatcatagtcgatccagataaaagaggacagataattgctttgcaggaggcactcaagaaaagatctgacttcaatattgatatgttgcgatcatgtccacgtgtgttgatggagatacttgtttctataaggactggccttccatattttataaagaaaagcagtagtgttgctacatctaatttggtcgacatttttctcaacttgaaatgccgaaatctctcatgccaaagcattcttccagtggacgattgtgattgtaaaatttgtcagaggatgactggtttctgtagttcttgcatgtgcattgtctgctcaaagtttgactcagcatctaatacttgtagttgggttggttgtgatgtatgtcttcattggtgccacacagattgtggtctacgccactctctgattcgaaaggggcaaagtgcttcaagggcatatggaactactgagatgcagtttcactgttctgcctgtggatatccatcggagatgtttggttttgtgaaggaagtatttcgaacatgtgcacaacaatggaggatagacatgctggttagagagttacagtatgtagaaagaattttttctgcaagtgaagatgtaaggggcaagagggtccgggacttcgtgaagcagatgctaattaagtcagaaaacaaggcctatcatgctgaagttgtcagatgtgtcattgcattcttttctgatgatggtgctaaccttggcagtgatccatcagtaccactgaaaggcattccatgcagcatttctgaagctgttgatgggattcctagttcaagtcggaaggcatggataccatttaccttagagggacttccagttttagacaaaacaactcttcctaccacaagcacagggagcccatctgtgcctagaaaatctggtgaagctgagtttcagacaattgataataagcctgccactgatgaactggatagcttgatcaggttaaagcaggctgaagcatatatgtaccaggaacgtgcaaatgatgcacggaatgaggttgacaatctgagacacattgttatggtaaaaaatgcacgaattgaggaagattatggcacccatatcgctgatcttgacataaatgagttacaagagcggcgcaagcgaaggattgaagaactccaagtaattgaaaggacacaccatgaatttctcagcatgaaaactaggatggtagctagcattggggagttattgtcaaaaatggaggcactgaaacaaaaccgaagcacatgaactgaggttactattgcagaaatcgaagttgctcaacttgtttaaggaagcctgcacatattgttggccacctggtaaaccttgatattcacgtacgaatactgctc

SEQ ID NO: 200655 - DNA, 3937 bp, Zea Mays
gaggccattgatagagaccacgagctgttctagaagtcaccgcgctgcagcctgcagctcaggggggcctgttccctggatctcgccatcgccattgccgctgccccccacctactactcctgctcctagtcctacacccctcctactccaatccaagaggtgctttggatcgcattgcttcgtgctagagttcggtggtcagcctgcgtgtgggacagtgttcaactctttgaggatttggcaactgtattttaagcattaagcttcaacgcagaatttgaaattggcggggctgttgttcaaagaattggagatggacaggaagaattgtcctccatcgccatcgccaagatcgaccgagaagtctggaagagaattgagatctggggaggccaatgtcagcacaaataccaatagcaacctcatcgcaaaaggccgttgagtgatgaagaaacaaagtcgaatactcctgtggttatttcgtgcaatgaccgtcgccgggaagttgccgccactcaaattattgccaataagcagattgatcgcacatttgccttcgacaaggtttttggcccatcgtccaagcagaaagatttgtttgaacaatccatctcgccgatagtaaatgaggtccttgaaggttacaattgcactattttcgcttatgggcaaactggtaccgggaagacttacacaatggagggaggtgggactagaaagaccaagaatggtgaactcccaactgatgctggtgttatcccaagggctgtaaggcaaatctttgacattctcgagtctcagtgcgcagagtatagcatgaaagtcacctttcttgagctttacaatgaagaaatcactgatctgttggcacctgaagaaccaaaattccctgttcttgaagacaagacgaaaaaacctattgcccttatggaagatggaaagggatttgtttttgtgagaggtcttgaagaagaagttgtgtactcagctggcgaaatctacaagattcttgacaagggttctgcaaagaggcgtactgcagaaacattgctgaacaagcaaagtagtaggtcacactctatattctcaatcacaattcacattaaggaactcactcatgagggtgaggagatgatcaagattggaaagctcaatcttgtcgatctagctggttcagaaaatatatcacgctcaggtgctagagatggcagagcgagagaggctggagagatcaacaagagtttgctcacgcttggtcgtgttattaatgctctagtagagcactctggacatgtaccatacagagatagtaaactgacaaggttgctgagggattcattgggagggaaaacaaagacttgcattattgctacaatatcaccttcagtatattgtttggaagagacattgagcacacttgattatgcacaccgtgcaaaaaatatcaagaacaaaccagaggtaaatcaaaggatgatgaagtctgctgtgatcaaggacttgtactatgaaattgaccgcctcaaacaagaggtgtttgctgcaagagagaagaacggtatctatattccaagagagcgctacctccaagaagaagctgagaaaaaggccatgacagagaaaattgaacgactaggagctgatatggaggctagggataagcaattggttgaattaaaagagctttatgatgctgaacaacgtctgagtgcagagttgggtgaagaacttggaaagactcggaaagatctggaggacaccaagagagctctgcatgatctagaagaacaatacaaagaagcaaagtctactattaaagaaaaggaatatgtcatatttaatcttctgaaatcagaaaaatcattagtggactgtgcatataaccttcgtgcggagctagaaaatgcagcagcagatgtttctgggctattctccaaaatagagcgcaaagacaggatagaagatgggaacaggtcgatggtgcagagatttaggtctcaactgacccatcagctggatgcattgcataaaactgtatccagttctgtcatgcaacaggaggaccaccttaatgaaatggaacatgatatgcaatcctttgtttcttcaaaagatgaggctgcacaagggctaagagagggtgtgcaaaagctcaaagtcttgcatggttccggtatcactgctctggatgaattagcaggtgaaatcgacatgaactcgcggacaacatttgagagattaaattcacagatacagtcacacacatcagcccttgagaactgtttcggaggaatcgcttcggaagcagataacttgttagatgagcttcagcgcagcctatcgaaacaagaagagaggctagcccatttcgcagtgaagcagagggagggacacctgagagctgtggaagcgtcacgttccatctcaaagatcactgctgggttcttccactcgctagatgtccatgcatctaggctcaccagtattctggaagacacacacagcgtgcaagaccaacaacttcttgaccttgaaaagaaattcgaggagtgcgcagctaatgaagaaaaacagcttctagagaaggtggcggagatgctggcaagttccaacgcacggaagaagaagctggtccaaacagcagtgggcagcctccgggagagcgccgtgaacagaacgagccacctgcagaaagaaatctcgacggcccaggacttgacctcgtccgtgcgcgagaagtggggcttttacatggaagagaccgagaagaattacgctgaggataccaaagcagtcgacagcggaaggtcttgcctggccgaagtgcttgtagaatgcaaggcgaaggccaccgtgggtgcacagcaatggaagaacgcggaggattctctgttcagcctcggcaaaggaaacgtggagtcagtggattctatagtcaggaccgggacagaggccaacgaattgctgcgttccaaactgtcgtctgcggcatcggcaactcttgaagatatcgacgttgcaaacgaggctctcctttcttcaattgacagctcgctgaagcttgaccgcgacgcgtgcgcgaacatcggggcggtcctcacgccgtgccacggggagatgagggagctgaagggggagcatcaccacaaggtcgtggagatcagcgaaagcgccgggaagtgcctggaggaagagtatctggtggacgagccgtcgtgttcgacgcccaggagaaggcggatcgacctgccgggcgtggagtcgatagaggagctgcggaccccgggctacgccgagcttctcaagtcgttccgggaggcgagggggagctggaagctggcgaatggagacgtcacagggcatttgccagaggcggctcaggatccggcatcatcgccgccgccggccgtgggttcaagaacccctctcgtaggaagaaactagatttaccgaaaccatgtagaaagaaaaaggaaaaaaaaaggaggaagaagaggaaggcatgtgtctactagagtacctttttcgtattggtgttgatagtggtgttggttaactactgctgctgcttggttgattgtttgttcgttcttaggtggtctccttgtatagtgattagtgagtcatatatacttgccgtcacacatatgccggtgtacatcaggtgtgctcagcatgtctattctaaagcactagtgtttgtctctctctaggacccatcagttatttatccaactcttagagctcatttggtgacatgagaattagaggggattttaaaatttttaaaaaatcttctctaattttgttgtcaccaaaatagtcttttgggattgtttgtactaaagctaatagttagttggctaaaaattggaataaaattaactagctaatcgctaaaagtaagtaatagttgaactattcggttaattttag

SEQ ID NO: 200656 - DNA, 1451 bp, Zea Mays
tgggacttcattttttcattttaaagtttcacttaaagttgtgcaagtacgacaatcaaatgtcaacagatttaagtgcaatagcatacaaagtaacctctttgatagactaacgagggttgccagggtgagcagtatttattccatcattatgttatttgcaatagccactttttcatatgtaatctaaagttttggcttttgggcacctcggtttgtctagtcctacgcaaatgcagttctaagttcatttgaggaccctgagaagattctcgagcaggcagttctcgagatgaacgatgacttgacaaagatgaggcaggccacagcacaggtcttggcgtctcaaaagcggcttgagaataaatacaaagctgcagaacaagcttctgctgattggtatcgaagggctcaacttgctcttcaaaagggtgacgaggatcttgctcgcgaagcccttaagcggcgtaaatcatatgctgacaatgcaagctccttaaggtcccagcttgatcagcagaagggtgtagttgaaaatctgatttcaaatacccgggttcttgagagcaagatagcagaggccaagcagaaaaaggatacgcttaaagctcgtgctcaatcagcaaagactgccacaaaagtgagcgaaatgttgggcaacgtgaatacaagtagcgccctttctgcatttgagaaaatggaggaaaaagttatggcgatggaatcccaagcggaggcactcggccaattagcaactgacgatctagaaggaaagtttgcactgctcgagaattcatctgtcgatgatgatctttcacagctgaaaaaagaactctcgggaagctctttgaaaggggagctcccatcaggcagaagagcggccagcaactcaggcgccgggcgccctttccccgacctagagattgagagcgagctaaacgagctgcggaggaaggccaaagaatactagagagtagagactctccaccaaccatccttcccgggcctgacagaatctctcatttccaagtacatatagcacagctgcagatttgctccatcgcgccttggaaagttggaacagaggtgcgcctttgactgtcactgtcaaagggtatatggagtcgccgagtttctcggcattttcccgtcgacggacatttgtacagctagccataaattgttgtaaatcactacgctccctagagcccttttttttgcgtactacgtatatagtcaaagtttgaagtttccgcgtcgtggtttttacccccattttttccgtgccataacatgtgttttgtgactggagacttgggatcctcagccaggtcgatcaaatactccctttttttcttcttcttcttgcagcgcctgtcgacgagtccaagtcagtgctcgggtgcgactgcttcgttgtttcgttcattctatcgcctgttggtcagaga

SEQ ID NO: 200657 - DNA, 1030 bp, Zea Mays
gggaatcatccgacccgagatcgctttccattcccatcgcttctcttctccacacgaactcactcttgagagatagagcgaaacacaaagcaggcaaaaaaaaaaaggatagagagaaaaaatcattctcgtttctctcactccgctatacccccgcccgaatcgatggagattagggctccgccaacgagcctcagtctcgcgccgccgcccgcctccgccagcttccgccgaacaccgcttaggaccttcttccttaacggcagcgtttcacttaaagttgtgcaagtacgacaatcaaatgtcaacagatttaagtgcaatagcatacaaagtaacctctttgatagactaacgagggttgccaggtcctacgcaaatgcagttctaagttcatttgaggaccctgagaagattctcgagcaggcagttctcgagatgaacgatgacttgacaaagatgaggcaggccacagcacaggtcttggcgtctcaaaagcggcttgagaataaatacaaagctgcagaacaagcttctgctgattggtatcgaagggctcaacttgctcttcaaaagggtgacgaggatcttgctcgcgaagcccttaagcggcgtaaatcatatgctgacaatgcaagctccttaaggtcccagcttgatcagcagaagggtgtagttgaaaatctgatttcaaatacccgggttcttgagagcaagatagcagaggccaagcagaaaaaggatacgcttaaagctcgtgctcaatcagcaaagactgccacaaaagtgagcgaaatgttgggcaacgtgaatacaagtagcgccctttctgcatttgagaaaatggaggaaaaagttatggcgatggaatcccaagcggaggcactcggccaattagcaactgacgatctagaaggaaagtttgcactgctcgagaattcatctgtcgatgatgatctttcacagctgaaaaaagaactctcgggaagctctttgtatgttgacttgttcacaagatggaaaggcgtga

SEQ ID NO: 200658 - DNA, 9255 bp, Zea Mays
ctcctgtcgattcctccctcttcttcctcctcgtccctcccaaatccccgaacccgagcgcgcgactccctcccgcctcccagatcttccagaacccgctacgattcgggcaatccgccggcccgcgccctagtaggtctccgcgggcgggattggttgatgcctccccgcctcgcgtgaccgctgcccgagggctggaccggagatctccgcatggatcacaggggcggcggcggcggtggcggaaacaagaaccgcaccgatctcctcgctgcagggcggaagaagctgcagcagttccggaagaagaaggggaagcggggtcccggcaataaggccgacgccgatgctgacgcggaggccggggagggggcgcccaaggcggcggaggagtctgtgcccgagccgaaatcgcctgttgggttgaagctcctcgccggggagggcggcggcgggagcactccatttgaggaagcggagaggtctcaggcggagcagtgcaacggtgaggggcctggtaccgcggagtccagctctgtggagagttccaatgcggtgcaagaacaggagacggtgcaagagcaggagacggatgatgtctccgatgcacatcatgtcggtcctagtgagcaggggatttcggagcatcctgaaagccagacagctggtggcagggatctatcacttcaggctaccagtggagacagcattggtgatgataatgtaggacgagctcagctgggtgatgtggatagcatggagctgaatgcttcttctgaaggtaatggagcagatggtgattgcaatcaactaggggaacaccagcaggtggaaatggatgctgttgaaaggccaacaagttccagtttcgaagaattcaccgagttgccaattcattctcaaggcattgaagccgataatatccacggtgaaggggctcaggaaatggtgatggatgtttctgggaggccattagatggagacatacagcatgacatcgagcccacagcttctgctgaaatagatgccgagactgcacttgaagagtcaactgttgcagcttcaattgtgattcctgagagtactgcaagaggtactgagtacgaaagagacactgggtatgaaaccgatggagtagacaaagaggctctcctagaagatccaagcatggtgcatgtaagtgatgaagctgtcactatagatgatttgagtgttcaggccaagccaacagcatcagcggatatgccactttgtgagcagaagggggatccagctttatctagaagtgcggtattgcaaggcattatgccacttcacttcgaggatatacaaaatcatatgttctctgcaactctgtcaagggattttctccagttgcagctagatgaggctgctggcctttattcagattttacacaacagtcttctgacaataccacacagctccgggtactgctaaaagaaactgaagaaagcaaactagcagttgacagagagcttcatcaatgtagacatgagctctccaaggtgaacatagaaaaggggcaacttgaactgaccatggcttccttgaaagaagaaatcaacactagcaacacgaggtgcacatatttggagagtgagctacattcctccaaggagagcacagaacaaatccacagtgaactagctaacagcagattgttactggaagctctgcaaaaagagaacatggagcttactgcaagccttgcttttgagaaagaagccaaaaaagaagttgaagaacagcgggaccatctatcttctgataacaggaagcttttatcggagttgtcaggtcttgagcttagcttagcttctgtgaaagaggaaatggatgctagcagtagcagatgtaatgtttttgagtgtgagctgcgttcctccaatgagaatatgaatcatactttgacagagttggcaaattgccaggctttattggaaacattacagaaagataatttggagctgtctgcaaattctgcctccgaaagagaagcaaaaatgaaactccaagaagacaatttgtatctatgtaatgaaaagggcaagctttcttcaaatttacgtgaactaaatgacaagttggaagtttcgtatgccaagcataagcagcttgagtcacatgtcaaagatacagaaacatactttggacaacttaccgagcagctaattgaggaaaatctgtacacaagtattagcatcgatatttaccaatctacaaccaaagacttagacactaagtacaatattgtgctgggacaattccagaatattatgcgtcaagaacttcatttggactcgtctgaagtcactactgagaatgctgaaagagccattatgacccctagacatgatagccatggtaataatcagtgtttgcttaatctggtaaatgcgaatgactcatgtaactcaactgctttgctgtcgctgaagggccatctagaggtggcaaaaagtgatttgcataaccttgaaaagttgctagagaggatctcctctaggtctgatggacgtgttctggtatcaaaactcattaaatcctttgagtcaaagggaagtgacgatgatactggactgtctgagggggagcatgataatttacaaaagtcaactcgggagatgctatcatgcctaggggagaagtttatagcaatgagctcagatattacaaaaactgaagaatatttggctgaactgtgtaacaaaattgaactttacgtcaagtctactgtgcagcatgatagagatagacaatgtactgttgttcttgaggccaaaatggatgaacttgctggcaagctgagcaactacaaggagacaattgacaatctgcacaatcaggttgctattgtgcagcaggatgcaaacagtaatgctggaaagctcattgatcaagcagaactgttgcagaaggatgcggtagaaaggatttccattcttgagaatgagagaatgtctttatcagatttactcagtgaagtaacaaacaagctcacctctttgggagatgctgtatttcctagtggttccagtgaaattgaaggtctcaatttctgcactttgagctgtgtggaccttgttgctagatcatttcaaagtcttcaggagaaattagaggctgctcaaatagataatgctcagctcaatagttctctggtggagctcaggaaggcaattggtgttgctcaagagaggagtgaacatgcagatggaattgtcaagaaactgtatgattccctacaggaacttctatgtgattcacttggaagttcaaatgaatttggggccagatatagtgttgaggaaccaattgaaagtcaatatggaagactcattgcgcatttaaagaatttgttgcatgaccaccattccgcgctgtcaactaatgctgaacttgagttgagtctgttaagtaaatgtgaagaagttgaggagctcaacatgagatgcagttctctattaaaaaaattggatgaagtttgtattctaaatgaggagcttaagtcagcttcttcaagtaaaaacgtcacactggataaactacacagtagatgccttactgtagcagaaatgttggcttcatgctcagcaaatcattcctcgacagttcagttgatatctgatattggtgaaggatctagcaaggaagatcatattcttaccacccttctcccatgcattgaggcggacgtggcttcatgcatcgagaaatttgaaaatgcagctgaagaaatccgtttgtctaagatatgcttgcaagaaatcagcatatttgaccagatttcatttgaaaaatggtcttaccccttgcccacattgattaaagaggaagttttaccaaagatatgtgatttgcaagacagattcgaccagctcaatgcactaaacattcagctggaaactgaagttgcagtcctcaaggatggcatgaaagagctggatgaagatcttggaacttcgcgatctgagcttcagaaaaaggtttctgaacttgaacagttagatcagaaattttcatctgtgaaggaaaaacttagtattgctgttgcaaaaggtaaaggtttgatagtgcagcgtgacagccttaagcagtctttgctggagaagtctggtgagatcgagaaactcacacaagaactgcagttaaaggaaacattgctgaaagagttggaagccaaactcaaatcctatacagaagcagatcgaattgaagccttggaatcggagctgtcatacataaggaattcagctacagctctaagggattcatttcttctaaaagactctgttcttcagagaattgaagaggtcttagaagaactagatttgccagagcaatttcattctcgagatattgttgaaaaaatagaactgctgtcaaagatggccattggcactcctttcactctacctgatggtgataagggatcctctgttgatgggcattctgagtctggtgtggctatgaatgtcatagacgatgagcagaactcaaattcaaattcagtatctgatgaagtaaagagcaaatatgaggaactgaataggagattctgtgagctggctgaacagaacaatatgctggaacaatctctagtggagaggaacagtcttatacagaaatgggaagaagtccttggccaaattagcatccccccacagttcaggatgttggaagcagaagataagttagcatggttaggaaacagattcttggaggtggaacaggagagagattcattacagttgaagattgagcatcttgaggattcctcagaaatgcttattgctgatctagaagagtcacataaaaggatatctgaactcagtgcagaggtggttgctataaaggctgagaaggatttcttttcacaaagcctagagaaactgagatttgagttccttgggctctctgagaaagttgttcaagatgagtttgttagagataaattgcgaatggatctatctgaactgcgggataagttcgctgaaaaaaccgaggagagcaggcactaccatgaaatggacaccgaggtccacaaactgctgaatttggtgcaaaacacattgcaggatagcactaactctgaaatttcatctggaggcatttctgctgtgttgtgcttgggcaaaatgctgaagaaacttttagatgactatggcactcttctgtacaagtcgactgaaggcaattttgccgagagagacattcagttagaggatatcaagccatctaaggatgcctctaaatcggacactggtgcatacgagaaagagatggaactaaattctttaaataacgagttagatcatgctcacaacaatctggccttagcgcaacaggagtgtgatgaagctgtggagaaggcacaatcactaatgatggaaattgagaccttacatgctcaaataagtaaattgcaggaaagtgatgctgaacaaatgcaaaagaaagagatggaactaaattctttaaataacgagttagatcatgctcgtaacaatctggccttagtggagcaggagcgtgatgaagctgtggagaaggcacaatcactaatgatggaaattgagaccttacatgctcaaataagtaaattgcaggaaagtgatgctgaacagatgcaaaaatatcagtcgcttgtccttgaactagaaagtgtgggtaagcaacgggacaatctacaggagcggttaaatcaggaggagcaaaagtgtgcctcattgagggagaaactaaatgttgctgtcagaaaagggaagggtctagtgcaacacagagacagcttgaagcaaactatggaagagatgaatgtagtgatagagaaacttaaaagtgaaagaaaacagcacatagaatcacttgagaccgagaaatcatcgttaatggatcgattggctgagaatgaaaagagcttgcatgaaacaaaccagtacttgagtggactattaaatgctttaaatagagtggatgttgctcgggaatttgatatggatccaatcaccaaggttgaaaagatggctaaatttttccttgacctacagtcaacagtggcttcatcgcaaaacgaagtgatgaaatcaaaacgagcaacagagctgcttcttgctgagttaaatgaagctcatgaaagggctgacaacctgcaggaggaattggtcaaggcagaagctgcactttctgaatcttctaaacaatacattgttacagaatctgcaagagctgatgctgttcgtcagcttgaacttattatgcatgcacagtcacaaacaaggaggaggcaagcagatcatttgctggagttaaactccaccagcagtcaactaagagaagtctgctttgaactttcacactgtcttgttaatacattcagtaaggatgtggaccttatctgctatgtggtgaacttcatgaggtcttctggtaaattgatggatgacacaaatacgatggacataccgattgcctctaaacatgttttgtccaaccgcacaaacaacaagaaggctcatattccaaatgctcctttggaaattaagacggatgatacggatgacagtcagtttttgcatcatcttgctattgcatgccatgctttatctgattgtgttaaggactgtaatgatctcaaaagaaacattgatgagcatgacttttcagttgaacagaaagcaaccgagctatttgatgttatgtccaccttaaagaataggttcacttctcagcataatgagttggaatctttgagagcaaaatttgttgaactacagtcagagatggaagaaagagacaaggagattatatttgcacaaaggaatatgagcttgctatatgaagcatgcgcaagttcagttgctgagattgaaggaattagtgatatatatcctggtaaacacagctatgctgttgaacattctgcagatgaatgtataaaatcaatcgttgaacagttagttatggctgtaaaaacttctcagaacagtaacgaaggtagcacaaaggagctgaaggctattgttcttgagttgcagcaggagcttcaagctaaagatgtccaaattagcacaatcagttctgatctatcatatcagttaagggtggctgaatcttctgcaaagcagttctcagttgatcttgaagatgcaagaatggagctccaaaatttggagaaacaagttgatgtgttgcagaatcagaagaaggatttagagactcaattaaatgagcttaaaaatatggaatcaatggcaagtgaacaacatggaagaattgagaaattgactgatgaattaagcagaaaagatcaagaaattgaaggtttggtgcaagcactcgatgaagaagaaaaagagcttgaaatcttggagaataaaagccttcagttggagcaaatgctgcaagagaaagaatttgccttgaagacctcagaagtttctaggaccaaagctttggcaaaacttgcaacgactgttgacaaatttgatgagctgcatagcttgtctgagaaccttcttgctgaagtggaaaaccttcagttgcaattgcaagaaagagattctgagatctcatttctgcgaaaagaagttacaaaaagcactaatgaactgctaaccactgaagagagcaacaaaaattattcatctcagctaaatggtttcatgaagtggttagaaagagaactgttgcagttcggcttccattctgagagtgccaatgattatgattacactcaatttcctgtctatatggatatgttggacaaaaaaataggatctctgatagccgaatcagatgatttaagggttacagttcaaagcaaagattctttactacaggttgagagggccaaaattgaggagttgatgcgtaaatcagatggtctagaagcttcattgagccaaaaggattcccagatagggttacttcgccgggacagagcatccaatcagcagagcagatctataaatttgcctggcacttcagagattgagcaaatgaatgacaaagtaagcccagctgcagttgtcactcagattcgaggcgcacgaaaagtcatcaatgaccaagttgctattgatgtagagatggagaaggacaagccttttgatgatgaagatgatgacaaagggtctcaggcgatagattgctcatgaggcaaccgaccttaagactcggcgtcttgatatattggattgcactgcatgctttgcttgctagttttatttgaactctgtaaagatgtagccatctcctggcgagtgactgtacagtactctgtgtctatagcaagttatatctaaacagaagcagtttgcactgataccgtgattcctttcgaaaatgttaccgaatacttgagccgtattggcagctgcagaaatcttcatgatgcattttcacccttcatcctggtgcaaatcctgtctagcttagtttgtgttcaattgatacaaatggatggaagagaactgaaggaagcagcagcaaagaaccccctgtacatacatttttgtttgctctattctttgcttttagaaaaaagatggagggcattctacatgctagcgactacttactacactatatgatacaggattacagggaagtgacatgtagttttggaagttagggttttgggatggtagcaggtcatcccctcccttgagttggccccctcaatcccatcatgccttctaatctttttcgtttacatgtataacacagtgattatatcatttattgtaatccacatagtgtgcaatgggggagcttgcacattttattaacgtcaagtgaagcctgagtgctgaaagttcatgtcaggtctgatttggggagtgcgttgagccctggcgtatgctgtgaggcttcagcggttgttttgctactgttgccgccaaaaatcaaatgacgaaatattcttcaaaatttgttgggttatataatctggacagattataatctccaacaaacaccatcttaataaacacccccttaatggctaacactaaataaacaacagttactgctcacatacaagtcacgaagaaatcctaaacaacagttactgctcacatgcaaagcacgaaataagaaagaaatcagaaatcttattgctgttacattgctattcgtttcggattaaagtcgactgtttgaactgctgcacccacaatttaggctctatttgggaacaaagtttttgaaaaccacagtttttgaaatac

SEQ ID NO: 200659 - DNA, 9386 bp, Zea Mays
cagccacacaccaacccgacacggcgcgggcgcgggcgccggtccaaacccgaatctctcctgtcgattcctccctcttcttcctcctcgtccctcccaaatccccgaacccgagcgcgcgactccctcccgcctcccagatcttccagaacccgctacgattcgggcaatccgccggcccgcgccctagtaggtctccgcgggcgggattggttgatgcctccccgcctcgcgtgaccgctgcccgagggctggaccggagatctccgcatggatcacaggggcggcggcggcggtggcggaaacaagaaccgcaccgatctcctcgctgcagggcggaagaagctgcagcagttccggaagaagaaggggaagcggggtcccggcaataaggccgacgccgatgctgacgcggaggccggggagggggcgcccaaggcggcggaggagtctgtgcccgagccgaaatcgcctgttgggttgaagctcctcgccggggagggcggcggcgggagcactccatttgaggaagcggagaggtctcaggcggagcagtgcaacggtgaggggcctggtaccgcggagtccagctctgtggagagttccaatgcggtgcaagaacaggagacggtgcaagagcaggagacggatgatgtctccgatgcacatcatgtcggtcctagtgagcaggggatttcggagcatcctgaaagccagacagctggtggcagggatctatcacttcaggctaccagtggagacagcattggtgatgataatgtaggacgagctcagctgggtgatgtggatagcatggagctgaatgcttcttctgaaggtaatggagcagatggtgattgcaatcaactaggggaacaccagcaggtggaaatggatgctgttgaaaggccaacaagttccagtttcgaagaattcaccgagttgccaattcattctcaaggcattgaagccgataatatccacggtgaaggggctcaggaaatggtgatggatgtttctgggaggccattagatggagacatacagcatgacatcgagcccacagcttctgctgaaatagatgccgagactgcacttgaagagtcaactgttgcagcttcaattgtgattcctgagagtactgcaagaggtactgagtacgaaagagacactgggtatgaaaccgatggagtagacaaagaggctctcctagaagatccaagcatggtgcatgtaagtgatgaagctgtcactatagatgatttgagtgttcaggccaagccaacagcatcagcggatatgccactttgtgagcagaagggggatccagctttatctagaagtgcggtattgcaaggcattatgccacttcacttcgaggatatacaaaatcatatgttctctgcaactctgtcaagggattttctccagttgcagctagatgaggctgctggcctttattcagattttacacaacagtcttctgacaataccacacagctccgggtactgctaaaagaaactgaagaaagcaaactagcagttgacagagagcttcatcaatgtagacatgagctctccaaggtgaacatagaaaaggggcaacttgaactgaccatggcttccttgaaagaagaaatcaacactagcaacacgaggtgcacatatttggagagtgagctacattcctccaaggagagcacagaacaaatccacagtgaactagctaacagcagattgttactggaagctctgcaaaaagagaacatggagcttactgcaagccttgcttttgagaaagaagccaaaaaagaagttgaagaacagcgggaccatctatcttctgataacaggaagcttttatcggagttgtcaggtcttgagcttagcttagcttctgtgaaagaggaaatggatgctagcagtagcagatgtaatgtttttgagtgtgagctgcgttcctccaatgagaatatgaatcatactttgacagagttggcaaattgccaggctttattggaaacattacagaaagataatttggagctgtctgcaaattctgcctccgaaagagaagcaaaaatgaaactccaagaagacaatttgtatctatgtaatgaaaagggcaagctttcttcaaatttacgtgaactaaatgacaagttggaagtttcgtatgccaagcataagcagcttgagtcacatgtcaaagatacagaaacatactttggacaacttaccgagcagctaattgaggaaaatctgtacacaagtattagcatcgatatttaccaatctacaaccaaagacttagacactaagtacaatattgtgctgggacaattccagaatattatgcgtcaagaacttcatttggactcgtctgaagtcactactgagaatgctgaaagagccattatgacccctagacatgatagccatggtaataatcagtgtttgcttaatctggtaaatgcgaatgactcatgtaactcaactgctttgctgtcgctgaagggccatctagaggtggcaaaaagtgatttgcataaccttgaaaagttgctagagaggatctcctctaggtctgatggacgtgttctggtatcaaaactcattaaatcctttgagtcaaagggaagtgacgatgatactggactgtctgagggggagcatgataatttacaaaagtcaactcgggagatgctatcatgcctaggggagaagtttatagcaatgagctcagatattacaaaaactgaagaatatttggctgaactgtgtaacaaaattgaactttacgtcaagtctactgtgcagcatgatagagatagacaatgtactgttgttcttgaggccaaaatggatgaacttgctggcaagctgagcaactacaaggagacaattgacaatctgcacaatcaggttgctattgtgcagcaggatgcaaacagtaatgctggaaagctcattgatcaagcagaactgttgcagaaggatgcggtagaaaggatttccattcttgagaatgagagaatgtctttatcagatttactcagtgaagtaacaaacaagctcacctctttgggagatgctgtatttcctagtggttccagtgaaattgaaggtctcaatttctgcactttgagctgtgtggaccttgttgctagatcatttcaaagtcttcaggagaaattagaggctgctcaaatagataatgctcagctcaatagttctctggtggagctcaggaaggcaattggtgttgctcaagagaggagtgaacatgcagatggaattgtcaagaaactgtatgattccctacaggaacttctatgtgattcacttggaagttcaaatgaatttggggccagatatagtgttgaggaaccaattgaaagtcaatatggaagactcattgcgcatttaaagaatttgttgcatgaccaccattccgcgctgtcaactaatgctgaacttgagttgagtctgttaagtaaatgtgaagaagttgaggagctcaacatgagatgcagttctctattaaaaaaattggatgaagtttgtattctaaatgaggagcttaagtcagcttcttcaagtaaaaacgtcacactggataaactacacagtagatgccttactgtagcagaaatgttggcttcatgctcagcaaatcattcctcgacagttcagttgatatctgatattggtgaaggatctagcaaggaagatcatattcttaccacccttctcccatgcattgaggcggacgtggcttcatgcatcgagaaatttgaaaatgcagctgaagaaatccgtttgtctaagatatgcttgcaagaaatcagcatatttgaccagatttcatttgaaaaatggtcttaccccttgcccacattgattaaagaggaagttttaccaaagatatgtgatttgcaagacagattcgaccagctcaatgcactaaacattcagctggaaactgaagttgcagtcctcaaggatggcatgaaagagctggatgaagatcttggaacttcgcgatctgagcttcagaaaaaggtttctgaacttgaacagttagatcagaaattttcatctgtgaaggaaaaacttagtattgctgttgcaaaaggtaaaggtttgatagtgcagcgtgacagccttaagcagtctttgctggagaagtctggtgagatcgagaaactcacacaagaactgcagttaaaggaaacattgctgaaagagttggaagccaaactcaaatcctatacagaagcagatcgaattgaagccttggaatcggagctgtcatacataaggaattcagctacagctctaagggattcatttcttctaaaagactctgttcttcagagaattgaagaggtcttagaagaactagatttgccagagcaatttcattctcgagatattgttgaaaaaatagaactgctgtcaaagatggccattggcactcctttcactctacctgatggtgataagggatcctctgttgatgggcattctgagtctggtgtggctatgaatgtcatagacgatgagcagaactcaaattcaaattcagtatctgatgaagtaaagagcaaatatgaggaactgaataggagattctgtgagctggctgaacagaacaatatgctggaacaatctctagtggagaggaacagtcttatacagaaatgggaagaagtccttggccaaattagcatccccccacagttcaggatgttggaagcagaagataagttagcatggttaggaaacagattcttggaggtggaacaggagagagattcattacagttgaagattgagcatcttgaggattcctcagaaatgcttattgctgatctagaagagtcacataaaaggatatctgaactcagtgcagaggtggttgctataaaggctgagaaggatttcttttcacaaagcctagagaaactgagatttgagttccttgggctctctgagaaagttgttcaagatgagtttgttagagataaattgcgaatggatctatctgaactgcgggataagttcgctgaaaaaaccgaggagagcaggcactaccatgaaatggacaccgaggtccacaaactgctgaatttggtgcaaaacacattgcaggatagcactaactctgaaatttcatctggaggcatttctgctgtgttgtgcttgggcaaaatgctgaagaaacttttagatgactatggcactcttctgtacaagtcgactgaaggcaattttgccgagagagacattcagttagaggatatcaagccatctaaggatgcctctaaatcggacactggtgcatacgagaaagagatggaactaaattctttaaataacgagttagatcatgctcacaacaatctggccttagcgcaacaggagtgtgatgaagctgtggagaaggcacaatcactaatgatggaaattgagaccttacatgctcaaataagtaaattgcaggaaagtgatgctgaacaaatgcaaaagaaagagatggaactaaattctttaaataacgagttagatcatgctcgtaacaatctggccttagtggagcaggagcgtgatgaagctgtggagaaggcacaatcactaatgatggaaattgagaccttacatgctcaaataagtaaattgcaggaaagtgatgctgaacagatgcaaaaatatcagtcgcttgtccttgaactagaaagtgtgggtaagcaacgggacaatctacaggagcggttaaatcaggaggagcaaaagtgtgcctcattgagggagaaactaaatgttgctgtcagaaaagggaagggtctagtgcaacacagagacagcttgaagcaaactatggaagagatgaatgtagtgatagagaaacttaaaagtgaaagaaaacagcacatagaatcacttgagaccgagaaatcatcgttaatggatcgattggctgagaatgaaaagagcttgcatgaaacaaaccagtacttgagtggactattaaatgctttaaatagagtggatgttgctcgggaatttgatatggatccaatcaccaaggttgaaaagatggctaaatttttccttgacctacagtcaacagtggcttcatcgcaaaacgaagtgatgaaatcaaaacgagcaacagagctgcttcttgctgagttaaatgaagctcatgaaagggctgacaacctgcaggaggaattggtcaaggcagaagctgcactttctgaatcttctaaacaatacattgttacagaatctgcaagagctgatgctgttcgtcagcttgaacttattatgcatgcacagtcacaaacaaggaggaggcaagcagatcatttgctggagttaaactccaccagcagtcaactaagagaagtctgctttgaactttcacactgtcttgttaatacattcagtaaggatgtggaccttatctgctatgtggtgaacttcatgaggtcttctggtaaattgatggatgacacaaatacgatggacataccgattgcctctaaacatgttttgtccaaccgcacaaacaacaagaaggctcatattccaaatgctcctttggaaattaagacggatgatacggatgacagtcagtttttgcatcatcttgctattgcatgccatgctttatctgattgtgttaaggactgtaatgatctcaaaagaaacattgatgagcatgacttttcagttgaacagaaagcaaccgagctatttgatgttatgtccaccttaaagaataggttcacttctcagcataatgagttggaatctttgagagcaaaatttgttgaactacagtcagagatggaagaaagagacaaggagattatatttgcacaaaggaatatgagcttgctatatgaagcatgcgcaagttcagttgctgagattgaaggaattagtgatatatatcctggtaaacacagctatgctgttgaacattctgcagatgaatgtataaaatcaatcgttgaacagttagttatggctgtaaaaacttctcagaacagtaacgaaggtagcacaaaggagctgaaggctattgttcttgagttgcagcaggagcttcaagctaaagatgtccaaattagcacaatcagttctgatctatcatatcagttaagggtggctgaatcttctgcaaagcagttctcagttgatcttgaagatgcaagaatggagctccaaaatttggagaaacaagttgatgtgttgcagaatcagaagaaggatttagagactcaattaaatgagcttaaaaatatggaatcaatggcaagtgaacaacatggaagaattgagaaattgactgatgaattaagcagaaaagatcaagaaattgaaggtttggtgcaagcactcgatgaagaagaaaaagagcttgaaatcttggagaataaaagccttcagttggagcaaatgctgcaagagaaagaatttgccttgaagacctcagaagtttctaggaccaaagctttggcaaaacttgcaacgactgttgacaaatttgatgagctgcatagcttgtctgagaaccttcttgctgaagtggaaaaccttcagttgcaattgcaagaaagagattctgagatctcatttctgcgaaaagaagttacaaaaagcactaatgaactgctaaccactgaagagagcaacaaaaattattcatctcagctaaatggtttcatgaagtggttagaaagagaactgttgcagttcggcttccattctgagagtgccaatgattatgattacactcaatttcctgtctatatggatatgttggacaaaaaaataggatctctgatagccgaatcagatgatttaagggttacagttcaaagcaaagattctttactacaggttgagagggccaaaattgaggagttgatgcgtaaatcagatggtctagaagcttcattgagccaaaaggattcccagatagggttacttcgccgggacagagcatccaatcagcagagcagatctataaatttgcctggcacttcagagattgagcaaatgaatgacaaagtaagcccagctgcagttgtcactcagattcgaggcgcacgaaaagtcatcaatgaccaagttgctattgatgtagagatggagaaggacaagccttttgatgatgaagatgatgacaaagcccatggtttcaagtcattgactatgtcacgctttgttcctaaattcactcgaccggtatcagacagaattgatgggatgtggcgatagattgctcatgaggcaaccgaccttaagactcggcgtcttgatatattggattgcactgcatgctttgcttgctagttttatttgaactctgtaaagatgtagccatctcctggcgagtgactgtacagtactctgtgtctatagcaagttatatctaaacagaagcagtttgcactgataccgtgattcctttcgaaaatgttaccgaatacttgagccgtattggcagctgcagaaatcttcatgatgcattttcacccttcatcctggtgcaaatcctgtctagcttagtttgtgttcaattgatacaaatggatggaagagaactgaaggaagcagcagcaaagaaccccctgtacatacatttttgtttgctctattctttgcttttagaaaaaagatggagggcattctacatgctagcgactacttactacactatatgatacaggattacagggaagtgacatgtagttttggaagttagggttttgggatggtagcaggtcatcccctcccttgagttggccccctcaatcccatcatgccttctaatctttttcgtttacatgtataacacagtgattatatcatttattgtaatccacatagtgtgcaatgggggagcttgcacattttattaacgtcaagtgaagcctgagtgctgaaagttcatgtcaggtctgatttggggagtgcgttgagccctggcgtatgctgtgaggcttcagcggttgttttgctactgttgccgccaaaaatcaaatgacgaaatattcttcaaaatttgttgggttatataatctggacagattataatctccaacaaacaccatcttaataaacacccccttaatggctaacactaaataaacaacagttactgctcacatacaagtcacgaagaaatcctaaacaacagttactgctcacatgcaaagcacgaaataagaaagaaatcagaaatcttattgctgttacattgctattcgtttcggattaaagtcgactgtttgaactgctgcacccacaatttaggctctatttgggaacaaagtttttgaaaaccacagtttttgaaatac

SEQ ID NO: 200660 - DNA, 9394 bp, Zea Mays
cagccacacaccaacccgacacggcgcgggcgcgggcgccggtccaaacccgaatctctcctgtcgattcctccctcttcttcctcctcgtccctcccaaatccccgaacccgagcgcgcgactccctcccgcctcccagatcttccagaacccgctacgattcgggcaatccgccggcccgcgccctagtaggtctccgcgggcgggattggttgatgcctccccgcctcgcgtgaccgctgcccgagggctggaccggagatctccgcatggatcacaggggcggcggcggcggtggcggaaacaagaaccgcaccgatctcctcgctgcagggcggaagaagctgcagcagttccggaagaagaaggggaagcggggtcccggcaataaggccgacgccgatgctgacgcggaggccggggagggggcgcccaaggcggcggaggagtctgtgcccgagccgaaatcgcctgttgggttgaagctcctcgccggggagggcggcggcgggagcactccatttgaggaagcggagaggtctcaggcggagcagtgcaacggtgaggggcctggtaccgcggagtccagctctgtggagagttccaatgcggtgcaagaacaggagacggtgcaagagcaggagacggatgatgtctccgatgcacatcatgtcggtcctagtgagcaggggatttcggagcatcctgaaagccagacagctggtggcagggatctatcacttcaggctaccagtggagacagcattggtgatgataatgtaggacgagctcagctgggtgatgtggatagcatggagctgaatgcttcttctgaaggtaatggagcagatggtgattgcaatcaactaggggaacaccagcaggtggaaatggatgctgttgaaaggccaacaagttccagtttcgaagaattcaccgagttgccaattcattctcaaggcattgaagccgataatatccacggtgaaggggctcaggaaatggtgatggatgtttctgggaggccattagatggagacatacagcatgacatcgagcccacagcttctgctgaaatagatgccgagactgcacttgaagagtcaactgttgcagcttcaattgtgattcctgagagtactgcaagaggtactgagtacgaaagagacactgggtatgaaaccgatggagtagacaaagaggctctcctagaagatccaagcatggtgcatgtaagtgatgaagctgtcactatagatgatttgagtgttcaggccaagccaacagcatcagcggatatgccactttgtgagcagaagggggatccagctttatctagaagtgcggtattgcaaggcattatgccacttcacttcgaggatatacaaaatcatatgttctctgcaactctgtcaagggattttctccagttgcagctagatgaggctgctggcctttattcagattttacacaacagtcttctgacaataccacacagctccgggtactgctaaaagaaactgaagaaagcaaactagcagttgacagagagcttcatcaatgtagacatgagctctccaaggtgaacatagaaaaggggcaacttgaactgaccatggcttccttgaaagaagaaatcaacactagcaacacgaggtgcacatatttggagagtgagctacattcctccaaggagagcacagaacaaatccacagtgaactagctaacagcagattgttactggaagctctgcaaaaagagaacatggagcttactgcaagccttgcttttgagaaagaagccaaaaaagaagttgaagaacagcgggaccatctatcttctgataacaggaagcttttatcggagttgtcaggtcttgagcttagcttagcttctgtgaaagaggaaatggatgctagcagtagcagatgtaatgtttttgagtgtgagctgcgttcctccaatgagaatatgaatcatactttgacagagttggcaaattgccaggctttattggaaacattacagaaagataatttggagctgtctgcaaattctgcctccgaaagagaagcaaaaatgaaactccaagaagacaatttgtatctatgtaatgaaaagggcaagctttcttcaaatttacgtgaactaaatgacaagttggaagtttcgtatgccaagcataagcagcttgagtcacatgtcaaagatacagaaacatactttggacaacttaccgagcagctaattgaggaaaatctgtacacaagtattagcatcgatatttaccaatctacaaccaaagacttagacactaagtacaatattgtgctgggacaattccagaatattatgcgtcaagaacttcatttggactcgtctgaagtcactactgagaatgctgaaagagccattatgacccctagacatgatagccatggtaataatcagtgtttgcttaatctggtaaatgcgaatgactcatgtaactcaactgctttgctgtcgctgaagggccatctagaggtggcaaaaagtgatttgcataaccttgaaaagttgctagagaggatctcctctaggtctgatggacgtgttctggtatcaaaactcattaaatcctttgagtcaaagggaagtgacgatgatactggactgtctgagggggagcatgataatttacaaaagtcaactcgggagatgctatcatgcctaggggagaagtttatagcaatgagctcagatattacaaaaactgaagaatatttggctgaactgtgtaacaaaattgaactttacgtcaagtctactgtgcagcatgatagagatagacaatgtactgttgttcttgaggccaaaatggatgaacttgctggcaagctgagcaactacaaggagacaattgacaatctgcacaatcaggttgctattgtgcagcaggatgcaaacagtaatgctggaaagctcattgatcaagcagaactgttgcagaaggatgcggtagaaaggatttccattcttgagaatgagagaatgtctttatcagatttactcagtgaagtaacaaacaagctcacctctttgggagatgctgtatttcctagtggttccagtgaaattgaaggtctcaatttctgcactttgagctgtgtggaccttgttgctagatcatttcaaagtcttcaggagaaattagaggctgctcaaatagataatgctcagctcaatagttctctggtggagctcaggaaggcaattggtgttgctcaagagaggagtgaacatgcagatggaattgtcaagaaactgtatgattccctacaggaacttctatgtgattcacttggaagttcaaatgaatttggggccagatatagtgttgaggaaccaattgaaagtcaatatggaagactcattgcgcatttaaagaatttgttgcatgaccaccattccgcgctgtcaactaatgctgaacttgagttgagtctgttaagtaaatgtgaagaagttgaggagctcaacatgagatgcagttctctattaaaaaaattggatgaagtttgtattctaaatgaggagcttaagtcagcttcttcaagtaaaaacgtcacactggataaactacacagtagatgccttactgtagcagaaatgttggcttcatgctcagcaaatcattcctcgacagttcagttgatatctgatattggtgaaggatctagcaaggaagatcatattcttaccacccttctcccatgcattgaggcggacgtggcttcatgcatcgagaaatttgaaaatgcagctgaagaaatccgtttgtctaagatatgcttgcaagaaatcagcatatttgaccagatttcatttgaaaaatggtcttaccccttgcccacattgattaaagaggaagttttaccaaagatatgtgatttgcaagacagattcgaccagctcaatgcactaaacattcagctggaaactgaagttgcagtcctcaaggatggcatgaaagagctggatgaagatcttggaacttcgcgatctgagcttcagaaaaaggtttctgaacttgaacagttagatcagaaattttcatctgtgaaggaaaaacttagtattgctgttgcaaaaggtaaaggtttgatagtgcagcgtgacagccttaagcagtctttgctggagaagtctggtgagatcgagaaactcacacaagaactgcagttaaaggaaacattgctgaaagagttggaagccaaactcaaatcctatacagaagcagatcgaattgaagccttggaatcggagctgtcatacataaggaattcagctacagctctaagggattcatttcttctaaaagactctgttcttcagagaattgaagaggtcttagaagaactagatttgccagagcaatttcattctcgagatattgttgaaaaaatagaactgctgtcaaagatggccattggcactcctttcactctacctgatggtgataagggatcctctgttgatgggcattctgagtctggtgtggctatgaatgtcatagacgatgagcagaactcaaattcaaattcagtatctgatgaagtaaagagcaaatatgaggaactgaataggagattctgtgagctggctgaacagaacaatatgctggaacaatctctagtggagaggaacagtcttatacagaaatgggaagaagtccttggccaaattagcatccccccacagttcaggatgttggaagcagaagataagttagcatggttaggaaacagattcttggaggtggaacaggagagagattcattacagttgaagattgagcatcttgaggattcctcagaaatgcttattgctgatctagaagagtcacataaaaggatatctgaactcagtgcagaggtggttgctataaaggctgagaaggatttcttttcacaaagcctagagaaactgagatttgagttccttgggctctctgagaaagttgttcaagatgagtttgttagagataaattgcgaatggatctatctgaactgcgggataagttcgctgaaaaaaccgaggagagcaggcactaccatgaaatggacaccgaggtccacaaactgctgaatttggtgcaaaacacattgcaggatagcactaactctgaaatttcatctggaggcatttctgctgtgttgtgcttgggcaaaatgctgaagaaacttttagatgactatggcactcttctgtacaagtcgactgaaggcaattttgccgagagagacattcagttagaggatatcaagccatctaaggatgcctctaaatcggacactggtgcatacgagaaagagatggaactaaattctttaaataacgagttagatcatgctcacaacaatctggccttagcgcaacaggagtgtgatgaagctgtggagaaggcacaatcactaatgatggaaattgagaccttacatgctcaaataagtaaattgcaggaaagtgatgctgaacaaatgcaaaagaaagagatggaactaaattctttaaataacgagttagatcatgctcgtaacaatctggccttagtggagcaggagcgtgatgaagctgtggagaaggcacaatcactaatgatggaaattgagaccttacatgctcaaataagtaaattgcaggaaagtgatgctgaacagatgcaaaaatatcagtcgcttgtccttgaactagaaagtgtgggtaagcaacgggacaatctacaggagcggttaaatcaggaggagcaaaagtgtgcctcattgagggagaaactaaatgttgctgtcagaaaagggaagggtctagtgcaacacagagacagcttgaagcaaactatggaagagatgaatgtagtgatagagaaacttaaaagtgaaagaaaacagcacatagaatcacttgagaccgagaaatcatcgttaatggatcgattggctgagaatgaaaagagcttgcatgaaacaaaccagtacttgagtggactattaaatgctttaaatagagtggatgttgctcgggaatttgatatggatccaatcaccaaggttgaaaagatggctaaatttttccttgacctacagtcaacagtggcttcatcgcaaaacgaagtgatgaaatcaaaacgagcaacagagctgcttcttgctgagttaaatgaagctcatgaaagggctgacaacctgcaggaggaattggtcaaggcagaagctgcactttctgaatcttctaaacaatacattgttacagaatctgcaagagctgatgctgttcgtcagcttgaacttattatgcatgcacagtcacaaacaaggaggaggcaagcagatcatttgctggagttaaactccaccagcagtcaactaagagaagtctgctttgaactttcacactgtcttgttaatacattcagtaaggatgtggaccttatctgctatgtggtgaacttcatgaggtcttctggtaaattgatggatgacacaaatacgatggacataccgattgcctctaaacatgttttgtccaaccgcacaaacaacaagaaggctcatattccaaatgctcctttggaaattaagacggatgatacggatgacagtcagtttttgcatcatcttgctattgcatgccatgctttatctgattgtgttaaggactgtaatgatctcaaaagaaacattgatgagcatgacttttcagttgaacagaaagcaaccgagctatttgatgttatgtccaccttaaagaataggttcacttctcagcataatgagttggaatctttgagagcaaaatttgttgaactacagtcagagatggaagaaagagacaaggagattatatttgcacaaaggaatatgagcttgctatatgaagcatgcgcaagttcagttgctgagattgaaggaattagtgatatatatcctggtaaacacagctatgctgttgaacattctgcagatgaatgtataaaatcaatcgttgaacagttagttatggctgtaaaaacttctcagaacagtaacgaaggtagcacaaaggagctgaaggctattgttcttgagttgcagcaggagcttcaagctaaagatgtccaaattagcacaatcagttctgatctatcatatcagttaagggtggctgaatcttctgcaaagcagttctcagttgatcttgaagatgcaagaatggagctccaaaatttggagaaacaagttgatgtgttgcagaatcagaagaaggatttagagactcaattaaatgagcttaaaaatatggaatcaatggcaagtgaacaacatggaagaattgagaaattgactgatgaattaagcagaaaagatcaagaaattgaaggtttggtgcaagcactcgatgaagaagaaaaagagcttgaaatcttggagaataaaagccttcagttggagcaaatgctgcaagagaaagaatttgccttgaagacctcagaagtttctaggaccaaagctttggcaaaacttgcaacgactgttgacaaatttgatgagctgcatagcttgtctgagaaccttcttgctgaagtggaaaaccttcagttgcaattgcaagaaagagattctgagatctcatttctgcgaaaagaagttacaaaaagcactaatgaactgctaaccactgaagagagcaacaaaaattattcatctcagctaaatggtttcatgaagtggttagaaagagaactgttgcagttcggcttccattctgagagtgccaatgattatgattacactcaatttcctgtctatatggatatgttggacaaaaaaataggatctctgatagccgaatcagatgatttaagggttacagttcaaagcaaagattctttactacaggttgagagggccaaaattgaggagttgatgcgtaaatcagatggtctagaagcttcattgagccaaaaggattcccagatagggttacttcgccgggacagagcatccaatcagcagagcagatctataaatttgcctggcacttcagagattgagcaaatgaatgacaaagtaagcccagctgcagttgtcactcagattcgaggcgcacgaaaagtcatcaatgaccaagttgctattgatgtagagatggagaaggacaagccttttgatgatgaagatgatgacaaagcccatggtttcaagtcattgactatgtcacgctttgttcctaaattcactcgaccggtatcagacagaattgatgggatgtgggtctcaggcgatagattgctcatgaggcaaccgaccttaagactcggcgtcttgatatattggattgcactgcatgctttgcttgctagttttatttgaactctgtaaagatgtagccatctcctggcgagtgactgtacagtactctgtgtctatagcaagttatatctaaacagaagcagtttgcactgataccgtgattcctttcgaaaatgttaccgaatacttgagccgtattggcagctgcagaaatcttcatgatgcattttcacccttcatcctggtgcaaatcctgtctagcttagtttgtgttcaattgatacaaatggatggaagagaactgaaggaagcagcagcaaagaaccccctgtacatacatttttgtttgctctattctttgcttttagaaaaaagatggagggcattctacatgctagcgactacttactacactatatgatacaggattacagggaagtgacatgtagttttggaagttagggttttgggatggtagcaggtcatcccctcccttgagttggccccctcaatcccatcatgccttctaatctttttcgtttacatgtataacacagtgattatatcatttattgtaatccacatagtgtgcaatgggggagcttgcacattttattaacgtcaagtgaagcctgagtgctgaaagttcatgtcaggtctgatttggggagtgcgttgagccctggcgtatgctgtgaggcttcagcggttgttttgctactgttgccgccaaaaatcaaatgacgaaatattcttcaaaatttgttgggttatataatctggacagattataatctccaacaaacaccatcttaataaacacccccttaatggctaacactaaataaacaacagttactgctcacatacaagtcacgaagaaatcctaaacaacagttactgctcacatgcaaagcacgaaataagaaagaaatcagaaatcttattgctgttacattgctattcgtttcggattaaagtcgactgtttgaactgctgcacccacaatttaggctctatttgggaacaaagtttttgaaaaccacagtttttgaaatac

SEQ ID NO: 200661 - DNA, 8538 bp, Zea Mays
ctctcctgtcgattcctccctcttcttcctcctcgtccctcccaaatccccgaacccgagcgcgcgactccctcccgcctcccagatcttccagaacccgctacgattcgggcaatccgccggcccgcgccctagtaggtctccgcgggcgggattggttgatgcctccccgcctcgcgtgaccgctgcccgagggctggaccggagatctccgcatggatcacaggggcggcggcggcggtggcggaaacaagaaccgcaccgatctcctcgctgcagggcggaagaagcagttccggaagaagaaggggaagcggggtcccggcaataaggccgacgccgatgctgacgcggaggccggggagggggcgcccaaggcggcggaggagtctgtgcccgagccgaaatcgcctgttgggttgaagctcctcgccggggagggcggcggcgggagcactccatttgaggaagcggagaggtctcaggcggagcagtgcaacggtgaggggcctggtaccgcggagtccagctctgtggagagttccaatgcggtgcaagaacaggagacggtgcaagagcaggagacggatgatgtctccgatgcacatcatgtcggtcctagtgagcaggggatttcggagcatcctgaaagccagacagctggtggcagggatctatcacttcaggctaccagtggagacagcattggtgatgataatgtaggacgagctcagctgggtgatgtggatagcatggagctgaatgcttcttctgaaggtaatggagcagatggtgattgcaatcaactaggggaacaccagcaggtggaaatggatgctgttgaaaggccaacaagttccagtttcgaagaattcaccgagttgccaattcattctcaaggcattgaagccgataatatccacggtgaaggggctcaggaaatggtgatggatgtttctgggaggccattagatggagacatacagcatgacatcgagcccacagcttctgctgaaatagatgccgagactgcacttgaagagtcaactgttgcagcttcaattgtgattcctgagagtactgcaagaggtactgagtacgaaagagacactgggtatgaaaccgatggagtagacaaagaggctctcctagaagatccaagcatggtgcatgtaagtgatgaagctgtcactatagatgatttgagtgttcaggccaagccaacagcatcagcggatatgccactttgtgagcagaagggggatccagctttatctagaagtgcggtattgcaaggcattatgccacttcacttcgaggatatacaaaatcatatgttctctgcaactctgtcaagggattttctccagttgcagctagatgaggctgctggcctttattcagattttacacaacagtcttctgacaataccacacagctccgggtactgctaaaagaaactgaagaaagcaaactagcagttgacagagagcttcatcaatgtagacatgagctctccaaggtgaacatagaaaaggggcaacttgaactgaccatggcttccttgaaagaagaaatcaacactagcaacacgaggtgcacatatttggagagtgagctacattcctccaaggagagcacagaacaaatccacagtgaactagctaacagcagattgttactggaagctctgcaaaaagagaacatggagcttactgcaagccttgcttttgagaaagaagccaaaaaagaagttgaagaacagcgggaccatctatcttctgataacaggaagcttttatcggagttgtcaggtcttgagcttagcttagcttctgtgaaagaggaaatggatgctagcagtagcagatgtaatgtttttgagtgtgagctgcgttcctccaatgagaatatgaatcatactttgacagagttggcaaattgccaggctttattggaaacattacagaaagataatttggagctgtctgcaaattctgcctccgaaagagaagcaaaaatgaaactccaagaagacaatttgtatctatgtaatgaaaagggcaagctttcttcaaatttacgtgaactaaatgacaagttggaagtttcgtatgccaagcataagcagcttgagtcacatgtcaaagatacagaaacatactttggacaacttaccgagcagctaattgaggaaaatctgtacacaagtattagcatcgatatttaccaatctacaaccaaagacttagacactaagtacaatattgtgctgggacaattccagaatattatgcgtcaagaacttcatttggactcgtctgaagtcactactgagaatgctgaaagagccattatgacccctagacatgatagccatggtaataatcagtgtttgcttaatctggtaaatgcgaatgactcatgtaactcaactgctttgctgtcgctgaagggccatctagaggtggcaaaaagtgatttgcataaccttgaaaagttgctagagaggatctcctctaggtctgatggacgtgttctggtatcaaaactcattaaatcctttgagtcaaagggaagtgacgatgatactggactgtctgagggggagcatgataatttacaaaagtcaactcgggagatgctatcatgcctaggggagaagtttatagcaatgagctcagatattacaaaaactgaagaatatttggctgaactgtgtaacaaaattgaactttacgtcaagtctactgtgcagcatgatagagatagacaatgtactgttgttcttgaggccaaaatggatgaacttgctggcaagctgagcaactacaaggagacaattgacaatctgcacaatcaggttgctattgtgcagcaggatgcaaacagtaatgctggaaagctcattgatcaagcagaactgttgcagaaggatgcggtagaaaggatttccattcttgagaatgagagaatgtctttatcagatttactcagtgaagtaacaaacaagctcacctctttgggagatgctgtatttcctagtggttccagtgaaattgaaggtctcaatttctgcactttgagctgtgtggaccttgttgctagatcatttcaaagtcttcaggagaaattagaggctgctcaaatagataatgctcagctcaatagttctctggtggagctcaggaaggcaattggtgttgctcaagagaggagtgaacatgcagatggaattgtcaagaaactgtatgattccctacaggaacttctatgtgattcacttggaagttcaaatgaatttggggccagatatagtgttgaggaaccaattgaaagtcaatatggaagactcattgcgcatttaaagaatttgttgcatgaccaccattccgcgctgtcaactaatgctgaacttgagttgagtctgttaagtaaatgtgaagaagttgaggagctcaacatgagatgcagttctctattaaaaaaattggatgaagtttgtattctaaatgaggagcttaagtcagcttcttcaagtaaaaacgtcacactggataaactacacagtagatgccttactgtagcagaaatgttggcttcatgctcagcaaatcattcctcgacagttcagttgatatctgatattggtgaaggatctagcaaggaagatcatattcttaccacccttctcccatgcattgaggcggacgtggcttcatgcatcgagaaatttgaaaatgcagctgaagaaatccgtttgtctaagatatgcttgcaagaaatcagcatatttgaccagatttcatttgaaaaatggtcttaccccttgcccacattgattaaagaggaagttttaccaaagatatgtgatttgcaagacagattcgaccagctcaatgcactaaacattcagctggaaactgaagttgcagtcctcaaggatggcatgaaagagctggatgaagatcttggaacttcgcgatctgagcttcagaaaaaggtttctgaacttgaacagttagatcagaaattttcatctgtgaaggaaaaacttagtattgctgttgcaaaaggtaaaggtttgatagtgcagcgtgacagccttaagcagtctttgctggagaagtctggtgagatcgagaaactcacacaagaactgcagttaaaggaaacattgctgaaagagttggaagccaaactcaaatcctatacagaagcagatcgaattgaagccttggaatcggagctgtcatacataaggaattcagctacagctctaagggattcatttcttctaaaagactctgttcttcagagaattgaagaggtcttagaagaactagatttgccagagcaatttcattctcgagatattgttgaaaaaatagaactgctgtcaaagatggccattggcactcctttcactctacctgatggtgataagggatcctctgttgatgggcattctgagtctggtgtggctatgaatgtcatagacgatgagcagaactcaaattcaaattcagtatctgatgaagtaaagagcaaatatgaggaactgaataggagattctgtgagctggctgaacagaacaatatgctggaacaatctctagtggagaggaacagtcttatacagaaatgggaagaagtccttggccaaattagcatccccccacagttcaggatgttggaagcagaagataagttagcatggttaggaaacagattcttggaggtggaacaggagagagattcattacagttgaagattgagcatcttgaggattcctcagaaatgcttattgctgatctagaagagtcacataaaaggatatctgaactcagtgcagaggtggttgctataaaggctgagaaggatttcttttcacaaagcctagagaaactgagatttgagttccttgggctctctgagaaagttgttcaagatgagtttgttagagataaattgcgaatggatctatctgaactgcgggataagttcgctgaaaaaaccgaggagagcaggcactaccatgaaatggacaccgaggtccacaaactgctgaatttggtgcaaaacacattgcaggatagcactaactctgaaatttcatctggaggcatttctgctgtgttgtgcttgggcaaaatgctgaagaaacttttagatgactatggcactcttctgtacaagtcgactgaaggcaattttgccgagagagacattcagttagaggatatcaagccatctaaggatgcctctaaatcggacactggtgcatacgagaaagagatggaactaaattctttaaataacgagttagatcatgctcacaacaatctggccttagcgcaacaggagtgtgatgaagctgtggagaaggcacaatcactaatgatggaaattgagaccttacatgctcaaataagtaaattgcaggaaagtgatgctgaacaaatgcaaaagaaagagatggaactaaattctttaaataacgagttagatcatgctcgtaacaatctggccttagtggagcaggagcgtgatgaagctgtggagaaggcacaatcactaatgatggaaattgagaccttacatgctcaaataagtaaattgcaggaaagtgatgctgaacagatgcaaaaatatcagtcgcttgtccttgaactagaaagtgtgggtaagcaacgggacaatctacaggagcggttaaatcaggaggagcaaaagtgtgcctcattgagggagaaactaaatgttgctgtcagaaaagggaagggtctagtgcaacacagagacagcttgaagcaaactatggaagagatgaatgtagtgatagagaaacttaaaagtgaaagaaaacagcacatagaatcacttgagaccgagaaatcatcgttaatggatcgattggctgagaatgaaaagagcttgcatgaaacaaaccagtacttgagtggactattaaatgctttaaatagagtggatgttgctcgggaatttgatatggatccaatcaccaaggttgaaaagatggctaaatttttccttgacctacagtcaacagtggcttcatcgcaaaacgaagtgatgaaatcaaaacgagcaacagagctgcttcttgctgagttaaatgaagctcatgaaagggctgacaacctgcaggaggaattggtcaaggcagaagctgcactttctgaatcttctaaacaatacattgttacagaatctgcaagagctgatgctgttcgtcagcttgaacttattatgcatgcacagtcacaaacaaggaggaggcaagcagatcatttgctggagttaaactccaccagcagtcaactaagagaagtctgctttgaactttcacactgtcttgttaatacattcagtaaggatgtggaccttatctgctatgtggtgaacttcatgaggtcttctggtaaattgatggatgacacaaatacgatggacataccgattgcctctaaacatgttttgtccaaccgcacaaacaacaagaaggctcatattccaaatgctcctttggaaattaagacggatgatacggatgacagtcagtttttgcatcatcttgctattgcatgccatgctttatctgattgtgttaaggactgtaatgatctcaaaagaaacattgatgagcatgacttttcagttgaacagaaagcaaccgagctatttgatgttatgtccaccttaaagaataggttcacttctcagcataatgagttggaatctttgagagcaaaatttgttgaactacagtcagagatggaagaaagagacaaggagattatatttgcacaaaggaatatgagcttgctatatgaagcatgcgcaagttcagttgctgagattgaaggaattagtgatatatatcctggtaaacacagctatgctgttgaacattctgcagatgaatgtataaaatcaatcgttgaacagttagttatggctgtaaaaacttctcagaacagtaacgaaggtagcacaaaggagctgaaggctattgttcttgagttgcagcaggagcttcaagctaaagatgtccaaattagcacaatcagttctgatctatcatatcagttaagggtggctgaatcttctgcaaagcagttctcagttgatcttgaagatgcaagaatggagctccaaaatttggagaaacaagttgatgtgttgcagaatcagaagaaggatttagagactcaattaaatgagcttaaaaatatggaatcaatggcaagtgaacaacatggaagaattgagaaattgactgatgaattaagcagaaaagatcaagaaattgaaggtttggtgcaagcactcgatgaagaagaaaaagagcttgaaatcttggagaataaaagccttcagttggagcaaatgctgcaagagaaagaatttgccttgaagacctcagaagtttctaggaccaaagctttggcaaaacttgcaacgactgttgacaaatttgatgagctgcatagcttgtctgagaaccttcttgctgaagtggaaaaccttcagttgcaattgcaagaaagagattctgagatctcatttctgcgaaaagaagttacaaaaagcactaatgaactgctaaccactgaagagagcaacaaaaattattcatctcagctaaatggtttcatgaagtggttagaaagagaactgttgcagttcggcttccattctgagagtgccaatgattatgattacactcaatttcctgtctatatggatatgttggacaaaaaaataggatctctgatagccgaatcagatgatttaagggttacagttcaaagcaaagattctttactacaggttgagagggccaaaattgaggagttgatgcgtaaatcagatggtctagaagcttcattgagccaaaaggattcccagatagggttacttcgccgggacagagcatccaatcagcagagcagatctataaatttgcctggcacttcagagattgagcaaatgaatgacaaagtaagcccagctgcagttgtcactcagattcgaggcgcacgaaaagtcatcaatgaccaagttgctattgatgtagagatggagaaggacaagccttttgatgatgaagatgatgacaaagcccatggtttcaagtcattgactatgtcacgctttgttcctaaattcactcgaccggtatcagacagaattgatgggatgtgggtctcaggcgatagattgctcatgaggcaaccgaccttaagactcggcgtcttgatatattggattgcactgcatgctttgcttgctagttttatttgaactctgtaaagttgtagcgatgttctgggcgagtgactgtacagtactcttgtgtctatagcaagttatctaaacagaagcagattgcactaataccgtgattccttttgaaaatgttaccgaatactttagccgtattggcagctgcgagacatcttcaggatgcatttcacccatcatcctggtgcttgatcctgtctagctt

SEQ ID NO: 200662 - DNA, 730 bp, Zea Mays
ctcccccgtcccggtcgtcgcttcctctgctctctgaccagcatggcggcgcttcctccctcctcctgcctgacggcaccctcgccaagggcatctgtcaccacttcgtccgcacgggggcttgcaagtatggggattcatgcagatacttccatccgaagccaaatggtgtcaatccagcattagctgcaccagggcttgggtctgggcctgcacccatggtgcagcagtctgatattattgggaaccaacccaattttgttgtataccagggagtagacataaattcttcctcagggaagatactggggggacacgcctcttggggcaacctgccgccatcactgcaacctcctcctgaaggcggctaccctcccctcccgttcatcgactggggctgaaggggcgttgtctccctgaaattcgaaccatttaatatttcataccttgattggttgtgctaaatcgcatatacttggagcgcagtagagttaaggtgatcccagtttattttgatcttaaatttatctctgtaatagatatttacagtcagaggtacacttcgcagattgcgttgatgtttgaatgaactcacatttgcatcaatggtgctcttatggcagttgagtccacgtacaatttgcacgtactacttcactgtcaagcagtacctggctttcacattaaattttcctaccaagtacacaagtgcaattcacatggacgcctt

SEQ ID NO: 200663 - DNA, 820 bp, Zea Mays
aacacccaacacgatgcccttggggaagtactactgcgactactgcgacaagcagttccaggacacccccgccgcccggaagcgccacctccagggcgtgcagcaccaacgcgcccgcgccctctgaccagcatggcggcgcttcctccctcctcctgcctgacggcaccctcgccaagggcatctgtcaccacttcgtccgcacgggggcttgcaagtatggggattcatgcagatacttccatccgaagccaaatggtgtcaatccagcattagctgcaccagggcttgggtctgggcctgcacccatggtgcagcagtctgatattattgggaaccaacccaattttgttgtataccagggagtagacataaattcttcctcagggaagatactggggggacacgcctcttggggcaacctgccgccatcactgcaacctcctcctgaaggcggctaccctcccctcccgttcatcgactggggctgaaggggcgttgtctccctgaaattcgaaccatttaatatttcataccttgattggttgtgctaaatcgcatatacttggagcgcagtagagttaaggtgatcccagtttattttgatcttaaatttatctctgtaatagatatttacagtcagaggtacacttcgcagattgcgttgatgtttgaatgaactcacatttgcatcaatggtgctcttatggcagttgagtccacgtacaatttgcacgtactacttcactgtcaagcagtacctggctttcacattaaattttcctaccaagtacacaagtgcaattcacatggacgcctt

SEQ ID NO: 200664 - DNA, 902 bp, Zea Mays
gtttatttggttgtgcctctatggttttggagggaataattgtagagaccagagctgccaacacccaacacgatgcccttggggaagtactactgcgactactgcgacaagcagttccaggacacccccgccgcccggaagcgccacctccagggcgtgcagcaccaacgcgcccgcgccctctggtacgactccattcgccaccaagaccagcatggcggcgcttcctccctcctcctgcctgacggcaccctcgccaagggcatctgtcaccacttcgtccgcacgggggcttgcaagtatggggattcatgcagatacttccatccgaagccaaatggtgtcaatccagcattagctgcaccagggcttgggtctgggcctgcacccatggtgcagcagtctgatattattgggaaccaacccaattttgttgtataccagggagtagacataaattcttcctcagggaagatactggggggacacgcctcttggggcaacctgccgccatcactgcaacctcctcctgaaggcggctaccctcccctcccgttcatcgactggggctgaaggggcgttgtctccctgaaattcgaaccatttaatatttcataccttgattggttgtgctaaatcgcatatacttggagcgcagtagagttaaggtgatcccagtttattttgatcttaaatttatctctgtaatagatatttacagtcagaggtacacttcgcagattgcgttgatgtttgaatgaactcacatttgcatcaatggtgctcttatggcagttgagtccacgtacaatttgcacgtactacttcactgtcaagcagtacctggctttcacattaaattttcctaccaagtacacaagtgcaattcacatggacgcctt

SEQ ID NO: 200665 - DNA, 946 bp, Zea Mays
aaaaaaacggttcccgtgaaatggcaggcttcggattagcaaaggaaattctcagtttttgtaaaaaatcgtgtggaaattctcagtagagaccagagctgccaacacccaacacgatgcccttggggaagtactactgcgactactgcgacaagcagttccaggacacccccgccgcccggaagcgccacctccagggcgtgcagcaccaacgcgcccgcgccctctggtacgactccattcgccaccaagaccagcatggcggcgcttcctccctcctcctgcctgacggcaccctcgccaagggcatctgtcaccacttcgtccgcacgggggcttgcaagtatggggattcatgcagatacttccatccgaagccaaatggtgtcaatccagcattagctgcaccagggcttgggtctgggcctgcacccatggtgcagcagtctgatattattgggaaccaacccaattttgttgtataccagggagtagacataaattcttcctcagggaagatactggggggacacgcctcttggggcaacctgccgccatcactgcaacctcctcctgaaggcggctaccctcccctcccgttcatcgactggggctgaaggggcgttgtctccctgaaattcgaaccatttaatatttcataccttgattggttgtgctaaatcgcatatacttggagcgcagtagagttaaggtgatcccagtttattttgatcttaaatttatctctgtaatagatatttacagtcagaggtacacttcgcagattgcgttgatgtttgaatgaactcacatttgcatcaatggtgctcttatggcagttgagtccacgtacaatttgcacgtactacttcactgtcaagcagtacctggctttcacattaaattttcctaccaagtacacaagtgcaattcacatggacgcctt

SEQ ID NO: 200666 - DNA, 837 bp, Zea Mays
aacacccaacacgatgcccttggggaagtactactgcgactactgcgacaagcagttccaggacacccccgccgcccggaagcgccacctccagggcgtgcagcaccaacgcgcccgcgccctctggtacgactccattcgccaccaagaccagcatggcggcgcttcctccctcctcctgcctgacggcaccctcgccaagggcatctgtcaccacttcgtccgcacgggggcttgcaagtatggggattcatgcagatacttccatccgaagccaaatggtgtcaatccagcattagctgcaccagggcttgggtctgggcctgcacccatggtgcagcagtctgatattattgggaaccaacccaattttgttgtataccagggagtagacataaattcttcctcagaaagaattgtgatatacgacaagctagatgcttaccatatcctcacttcagtcagctgtcatgccatgatgtgagcccttgcgacacaatcatcctatttggacattccaatttactccatcatgtgccagcgggtccattggttagtgacttggcgcctaccagagactgatcgtgtgctgtttggatgtttcgaggctattcaattgcaagcggtcctgtcggttggtgcctcaggatgactaggaaggagggcgtacagattaaagaccttaaatttgtttggtttggagctgttgtcagcttcctggcctgcaggaaccatgctcctgatcctttctctgaattttgaaatgtcgtgatgctttcaagtgcttaagcttccagggcatcatagggttcaccgtttgcaaatgctccatttccc

SEQ ID NO: 200667 - DNA, 2308 bp, Zea Mays
ccccgtcccctaccctacgtcctaccaatagtagccaccattggtgtctcggactctcggctcggtggaacgcaacgcattgcgaccgacccgcccactctctccacgactcaatcgctagactagagagagaaacccttgtacccgtgttccttttcatcccccattttctccgagtttccggcccatcgccgagcatcgagtccaaggaagcggagccggcggagaaggggagatttgactttcccgtcgggtgcctagggagcaggagggatgcagcggcggcggggccacacgtgggcaggggtggggaagacggcccaggcggcggcggcgcacgccgcgctcttctgcttcactctcctcctcgcgctcagggtcgacggacgcaccgcatactcctggtgtgggcaccatgtcattcgattgttgcggcgcctttactaattgcgttcgagctgcttctttgtatatatcttgaaagcataagagttagaaatcatccatctgttgatctgaagattgtgttccttcccctgttggcctttgaagcaataatccttattgacaattttagaatgtgtagagctttaatgcctggggatgaagaaagcatgagtgatgaagctatttgggagacacttcctcatttttgggtttcaatttcaatggtgtttcttatagctgctacaacattcacccttctcaagctgtctggtgatgttggtgctttgggatggtgggatttgtttataaattatgggattgcagaatgctttgcatttcttgtctgtacaagatggtttaatcccatgattcacaagtctcccactcatggggaggctagctcatcatcagcgattagataccgtgattgggaaagtggtcttgtcctcccatcactagaagatcatgaacaagagaggctttgtggtctacctgatattgggggtcatgtaatgaaaatacctcttgtggctttccaagtattgctttgtatgcggttggagggtacaccaccaagtgctcgcaacattccaatatttgctcttttctcgccactatttattctgcaaggtgctggtgcctttttctctctagcaagattagtggagaaggttgttctgctattgcgcaatggaccagttagtcctaattaccttacagtctcatcaaaagttcgtgattgctttgcttttcttcatcatggttcaaggcttcttggttggtggtctattgatgaagggagcaaggaggaacaagcccggttgttctatactgaatctactgggtacaatacattttgtggctatccaccagaagtggttaggaaaatgcctaaaaaggaccttgcagaagaggtttggaggctgcaggcagcgttgggagaacaatctgaaatcaccaagtgtaccaaacaggaatatgaaaggcttcaaaatgagaaggttctttgtagggtttgctacgagggagagatatgcatggtgcttcttccctgccggcacagaactttatgcaaatcttgtgctgagaaatgcaagaagtgtcctatctgccgtgtcccaattgaagaacgcatgcctgtatatgatgtttaaacctcactaactcagcttaacattcaaatttgtacatatgggttctgtcatgctgtgcatttagtctcgatcacaactttaagctgattgaggtgtgcgtttcagaaaaaaagtctacaatatgtgtatatcatgccatgtctaaccaaaagcatggaaaggtggctgatgagcattttgccatttcggtccagttatctactgtaagtatgtggtcagtgtattccccttttgtgattggtagatgagtcagtcttgtttgcgtagcagcattttctcagggttatgcagttgttgagaagaaagtagaacaaaaacagactgtaaataaaaaaatactgccttttttaaatgtaatcctcaagtgtaaacctccctgttgtgccattttgtagtagaaaaatgtctgccgaaatttgtgaccgcaacgcttcgttgtctggtgtcttttcacaatgtgaggggtcgtcttagcaaaattatttaaagattgtggaagcatgtctggagaagaaaggttgcgtctggtctgtgccaaggaatcattgttggtatgttttttcaaaccgtattgcggtgattggaaccaatttaatcatgatactgtggactgctgtctccttttaaagcagagtataaatctaaatattgttcgtcaaactattttaagtttgactaaatttgtataaaagatattgatgcttatg

SEQ ID NO: 200668 - DNA, 2271 bp, Zea Mays
agtagccaccattggtgtctcggactctcggctcggtggaacgcaacgcattgcgaccgacccgcccactctctccacgactcaatcgctagactagagagagaaacccttgtacccgtgttccttttcatcccccattttctccgagtttccggcccatcgccgagcatcgagtccaaggaagcggagccggcggagaaggggagatttgactttcccgtcgggtgcctagggagcaggagggatgcagcggcggcggggccacacgtgggcaggggtggggaagacggcccaggcggcggcggcgcacgccgcgctcttctgcttcactctcctcctcgcgctcagggtcgacggacgcaccgcatactcctggtgtgggcaccatgtcattcgattgttgcggcgcctttactaattgcgttcgagctgcttctttgtatatatcttgaaagcataagagttagaaatcatccatctgttgatctgaagattgtgttccttcccctgttggcctttgaagcaataatccttattgacaattttagaatgtgtagagctttaatgcctggggatgaagaaagcatgagtgatgaagctatttgggagacacttcctcatttttgggtttcaatttcaatggtgtttcttatagctgctacaacattcacccttctcaagctgtctggtgatgttggtgctttgggatggtgggatttgtttataaattatggaatgctttgcatttcttgtctgtacaagatggtttaatcccatgattcacaagtctcccactcatggggaggctagctcatcatcagcgattagataccgtgattgggaaagtggtcttgtcctcccatcactagaagatcatgaacaagagaggctttgtggtctacctgatattgggggtcatgtaatgaaaatacctcttgtggctttccaagtattgctttgtatgcggttggagggtacaccaccaagtgctcgcaacattccaatatttgctcttttctcgccactatttattctgcaaggtgctggtgcctttttctctctagcaagattagtggagaaggttgttctgctattgcgcaatggaccagttagtcctaattaccttacagtctcatcaaaagttcgtgattgctttgcttttcttcatcatggttcaaggcttcttggttggtggtctattgatgaagggagcaaggaggaacaagcccggttgttctatactgaatctactgggtacaatacattttgtggctatccaccagaagtggttaggaaaatgcctaaaaaggaccttgcagaagaggtttggaggctgcaggcagcgttgggagaacaatctgaaatcaccaagtgtaccaaacaggaatatgaaaggcttcaaaatgagaaggttctttgtagggtttgctacgagggagagatatgcatggtgcttcttccctgccggcacagaactttatgcaaatcttgtgctgagaaatgcaagaagtgtcctatctgccgtgtcccaattgaagaacgcatgcctgtatatgatgtttaaacctcactaactcagcttaacattcaaatttgtacatatgggttctgtcatgctgtgcatttagtctcgatcacaactttaagctgattgaggtgtgcgtttcagaaaaaaagtctacaatatgtgtatatcatgccatgtctaaccaaaagcatggaaaggtggctgatgagcattttgccatttcggtccagttatctactgtaagtatgtggtcagtgtattccccttttgtgattggtagatgagtcagtcttgtttgcgtagcagcattttctcagggttatgcagttgttgagaagaaagtagaacaaaaacagactgtaaataaaaaaatactgccttttttaaatgtaatcctcaagtgtaaacctccctgttgtgccattttgtagtagaaaaatgtctgccgaaatttgtgaccgcaacgcttcgttgtctggtgtcttttcacaatgtgaggggtcgtcttagcaaaattatttaaagattgtggaagcatgtctggagaagaaaggttgcgtctggtctgtgccaaggaatcattgttggtatgttttttcaaaccgtattgcggtgattggaaccaatttaatcatgatactgtggactgctgtctccttttaaagcagagtataaatctaaatattgttcgtcaaactattttaagtttgactaaatttgtataaaagatattgatgcttatg

SEQ ID NO: 200669 - DNA, 1839 bp, Zea Mays
agaaggacctaaacatgattttcattgactcatggaagacttataataaaataccaaggaatgttatgttgtgggctttcgacaaacataaagttcctatgaacatttttgggtttcaatttcaatggtgtttcttatagctgctacaacattcacccttctcaagctgtctggtgatgttggtgctttgggatggtgggatttgtttataaattatgggtgagatttgttgctgtggcgttattcctttttatgagatttcagttagtctaattcggcagcttgcttatccaggattgcagaatgctttgcatttcttgtctgtacaagatggtttaatcccatgattcacaagtctcccactcatggggaggctagctcatcatcagcgattagataccgtgattgggaaagtggtcttgtcctcccatcactagaagatcatgaacaagagaggctttgtggtctacctgatattgggggtcatgtaatgaaaatacctcttgtggctttccaagtattgctttgtatgcggttggagggtacaccaccaagtgctcgcaacattccaatatttgctcttttctcgccactatttattctgcaaggtgctggtgcctttttctctctagcaagattagtggagaaggttgttctgctattgcgcaatggaccagttagtcctaattaccttacagtctcatcaaaagttcgtgattgctttgcttttcttcatcatggttcaaggcttcttggttggtggtctattgatgaagggagcaaggaggaacaagcccggttgttctatactgaatctactgggtacaatacattttgtggctatccaccagaagtggttaggaaaatgcctaaaaaggaccttgcagaagaggtttggaggctgcaggcagcgttgggagaacaatctgaaatcaccaagtgtaccaaacaggaatatgaaaggcttcaaaatgagaaggttctttgtagggtttgctacgagggagagatatgcatggtgcttcttccctgccggcacagaactttatgcaaatcttgtgctgagaaatgcaagaagtgtcctatctgccgtgtcccaattgaagaacgcatgcctgtatatgatgtttaaacctcactaactcagcttaacattcaaatttgtacatatgggttctgtcatgctgtgcatttagtctcgatcacaactttaagctgattgaggtgtgcgtttcagaaaaaaagtctacaatatgtgtatatcatgccatgtctaaccaaaagcatggaaaggtggctgatgagcattttgccatttcggtccagttatctactgtaagtatgtggtcagtgtattccccttttgtgattggtagatgagtcagtcttgtttgcgtagcagcattttctcagggttatgcagttgttgagaagaaagtagaacaaaaacagactgtaaataaaaaaatactgccttttttaaatgtaatcctcaagtgtaaacctccctgttgtgccattttgtagtagaaaaatgtctgccgaaatttgtgaccgcaacgcttcgttgtctggtgtcttttcacaatgtgaggggtcgtcttagcaaaattatttaaagattgtggaagcatgtctggagaagaaaggttgcgtctggtctgtgccaaggaatcattgttggtatgttttttcaaaccgtattgcggtgattggaaccaatttaatcatgatactgtggactgctgtctccttttaaagcagagtataaatctaaatattgttcgtcaaactattttaagtttgactaaatttgtataaaagatattgatgcttatg

SEQ ID NO: 200670 - DNA, 1233 bp, Zea Mays
cgggtagccaaaaaccgcgcgccgtttgggcaaggcccaacccagccagccagagaggcgccccgttggaatcctgattgggagcgctgggacggaaccgaacgcgttgccattagctgtcgctgggacggaaccggaacgtttcgctagccctcgttcccgttcggccttgacaaccccaccccaccccacccccaagttcccaacgcagaggatcgaaccgaatcctccgcaactcgccgccgccgggaccgaccgacccggtcctatcgatcgaggatgtcgtacgcctacctcttcaagtacatcatcatcggcgacacaggcgtggggaagtcgtgcctgctgctgcagttcacggacaagcgcttccagcccgtgcacgacctcaccatcggcgtcgaattcggcgcccgcatgatcaccattgaaaataagcccatcaagctccagatttgggacacggctggccaagaatcattcagatctattactagatcatactacagaggagggagaccttcaatcatctcgcaagttggttagaagatgcaaggcagcatgcaaatgctaacatgactgtgatgctgattggaaacaagtgtgatctttctcatagacgtgctgtcagctatgaggaaggtgaacagtttgccaaggagcatggtctggtctttatggaggcatctgctaaaactgcacaaaacgttgaggaggcattcattaagaccgctggtacaatatacaagaaaatccaagatggcatatttgatgtatcaaatgagtccaacgggatcaaagttggctacgctgttcccaactcatctggaggtggtgctggctcgtcctctcaggctggtggctgctgcagttgagtggtggcagcaagtcatacaaatgcacaaggttctccctgcagtatcttgatgtttgcctatagctggacccggatgatttgttctttcagccatcatgtttcaatccataagcaaatcatcttcagtgtttaactgtccttttgcaattcacgattactgctccctatgtgtcttctgtaaccaaattgaaatcagttttatggtattcatttgttcaacatgtatatatgcttctctggctagtcatgttttctgcaaccctatctcaagttgaaaattggcagtgctggacaatctctccttgactgcattacttgattctgtaaagacaatcttcacgattactgcgcaatgg

SEQ ID NO: 200671 - DNA, 832 bp, Zea Mays
cgggtagccaaaaaccgcgcgccgtttgggcaaggcccaacccagccagccagagaggcgccccgttggaatcctgattgggagcgctgggacggaaccgaacgcgttgccattagctgtcgctgggacggaaccggaacgtttcgctagccctcgttcccgttcggccttgacaaccccaccccaccccacccccaagttcccaacgcagaggatcgaaccgaatcctccgcaactcgccgccgccgggaccgaccgacccggtcctatcgatcgaggatgtcgtacgcctacctcttcaagtacatcatcatcggcgacacaggcgtggggaagtcgtgcctgctgctgcagttcacggacaagcgcttccagcccgtgcacgacctcaccatcggcgtcgaattcggcgcccgcatgatcaccattgaaaataagcccatcaagctccagatttgggacacggctggccaagaatcattcagatctattactagatcatactacagaggtgctgctggtgcccttttggtttatgatattactaggagggagaccttcaatcatctcgcaagttggttagaagatgcaaggcagcatgcaaatgctaacatgactgtgatgctgattggaaacaagtgtgatctttctcatagacgtgctgtcagctatgaggaaggtgaacagtttgccaaggagcatggtctggtctttatggaggcatctgctaaaactgcacaaaacgttgaggaggcattcattaagaccgctggtacaatatacaagaaaatccaagatggcatatttgatgtatcaaatgagatgatgggag

SEQ ID NO: 200672 - DNA, 1045 bp, Zea Mays
cgggtagccaaaaaccgcgcgccgtttgggcaaggcccaacccagccagccagagaggcgccccgttggaatcctgattgggagcgctgggacggaaccgaacgcgttgccattagctgtcgctgggacggaaccggaacgtttcgctagccctcgttcccgttcggccttgacaaccccaccccaccccacccccaagttcccaacgcagaggatcgaaccgaatcctccgcaactcgccgccgccgggaccgaccgacccggtcctatcgatcgaggatgtcgtacgcctacctcttcaagtacatcatcatcggcgacacaggcgtggggaagtcgtgcctgctgctgcagttcacggacaagcgcttccagcccgtgcacgacctcaccatcggcgtcgaattcggcgcccgcatgatcaccattgaaaataagcccatcaagctccagatttgggacacggctggccaagaatcattcagatctattactagatcatactacagaggtgctgctggtgcccttttggtttatgatattactaggagggagaccttcaatcatctcgcaagttggttagaagatgcaaggcagcatgcaaatgctaacatgactgtgatgctgattggaaacaagtgtgatctttctcatagacgtgctgtcagctatgaggaaggtgaacagtttgccaaggagcatggtctggtctttatggaggcatctgctaaaactgcacaaaacgttgaggaggcattcattaagaccgctggtacaatatacaagaaaatccaagatggcatatttgatgtatcaaatgagtccaacgggatcaaagttggctacgctgttcccaactcatctggaggtggtgctggctcgtcctctcaggctggtggctgctgcagttgagtggtggcagcaagtcatacaaatgcacaagatgatgggaggagacaacagatcagttctggtcagaaaatggtaaaatcgatgaaagttttctttagcaactgatggtgtcaaaagattatctggcatgtct

SEQ ID NO: 200673 - DNA, 1105 bp, Zea Mays
ctcgactgcatcttccccccactgcccattcgcctcgctcttgcataagatatcttctgtccagctagaacatcctagagctagctgttgcatgcgttgatcgagccaccaccagctagcattgtgatcgagggaacaagaagagatgaagtttggcaagaggctcaagaagcaggtggaggagagcctcccggactggagagacaagttcctagcgtacaagcgcctcaagaggctcgtccgcctcgtcccggcctcctcgcccagcaggaggggcggccgcgcagccgatgccgccttcctgcgcctcctccacgccgaggtcgaccggttcaacgccttcttcctggagcgggaggaggacttcgtcatacggcacagggcacgtgcacgtcctgacgtccctcctatcatacgagctgaaggagacggccgaggacgcgcgcaaggcgatcgtcgacctgcacggggagatggtgctgctgctcaactatagcgccatcaactacacagggctggccaagatcctcaagaagtacgacaaacgcaccgggcggctgctgcggctgcccttcatcggaaaggtgctccggcagcccttcttcgccacggagctcatctccaggctcgtccgcgactgcgaggccaccatggaggccgtgttcgaggccagcacaggccacgcccgctcgtcggcggggacggcccccgtggcctcagccaggcagggcatcttccggaacaccgtggccgcgctggtgaccatgggcgagctccgcagcgggagttccacgtacggtcacttctcgctgccaccgatggccccgccggagtccgatctcctgcggcgcgtgtgcgtccaggtcgccggtcaagtgtccatctgactatccgagagattttccgctgtgctcttcgacggccagttactactcatgctagattgtcatactataagagacatgtatactttcgcttcctactacaaattcacctatttgtataagcctagaaattctgtcgaattcttctttttttacttttccagcatctacgcagttgaatcgccaaaaaagaagcatgacaggcgtaataccatatacag

SEQ ID NO: 200674 - DNA, 1591 bp, Zea Mays
cttgatcattgctcaaacaagactgtctcgaatatgtgcccgaatatgaagtgtttccgccttttaattggtcagaaaggatgttttgaacacatcatgctgtataagttggatggcctgcaatttttctcatgccaactttggagcaaaaggccgtccagcccaatcaaaatctccacgccatacctcttatcttgatgaattacctagaacacatggcgagaataaccaatttgctgcatcacgagtgcccaatgattggggaattgagaggcatggagcagatgccagttcaagtcttaggtttgacatgccatcccaccaacagaccttggaagaacttgagatggagtttaaaaaagaagctacacaattagctagagctcgtgaccaagaggaggatgaagagaactataggcatcgagagtcgctgagagtgattagagaaaattacatggagagagtgattaccttgaggaatgtgcatgcaaagaagtgggaagaatttcttgacacctttaaaagtcaacaacaagcacagccttcatacatacaaaccggatatctaggttttgagcagagaacggcacatatttcagctacacatcaaccaatggattcgaagagcacatatccgtatgcttctgatagctattcagccccaaaggctcatgcagcatatggtgagtttcaacatgagaggcatgatgatcttgggagggcctataggcgatattagctgtgaatagtggtgagttattgagttaattacccatttcagatttttgatgttaagccctgcagttctaatgtagctagagataatcatttcgttgtttgagcaattggtgtcctgctaggtaagctaattaaagagctgtgactgttaatagctacaggcttgggaagcctccgtcttattagaaaatgttgaccaaatgttcccttcctcttttgagtcctaaaagaggttccaaattttcagggcgattttgtgaggaatcagtgtcaatggtgcgcttagacctacttatcacccattgctgttatgtagcttgaggaggtaagcattcatatataggcagaactgtctcccaattactttctttgcagcgtctacaaccgcaacggactgtggagctgtttcaggcatcgtaacaagctgctttccaacgaactaaactgaaatgctataaaaaaacattgacctgtatgactgttttatctgcttggaaaaaatctccctgagttggcgtttatgtgaacctagtattttttttgtcaaacctggtatatcgctatgctgggtctatccgaatggttgtttgcatcatcccattgttttggaaggtttggcacacgatatgaaagttagaacatgtggaacagtcagctatttcgtgaaatttggtcagaacttgatggcactcgttgctgtagtggtgactaggccagtgccttcggattggtactgttttgtgtcaatctcaacaggcactgcactgtcccatatacattggaatgtttgattggtggatggaggttgtattgtaaatcctggctgagtgaaaatcgaattttagaagaaaaa

SEQ ID NO: 200675 - DNA, 1561 bp, Zea Mays
attatttcacatgtcttgggctccttgcatggatttgtttaaccttgttggctgcttcctcgaacctgctactctgccaactcagatgtacatggcactgctatataccatcacaactctaattcttaccgtacagacgatatactatagccacatctaccatcgtcttgaagcaaaaaaatccagggcagctagcaaggctcaaaagcatcaacgtgcggatgcatcattacgtgaaaggcttttgggtgccaaggacggtgtgttatccagaaacaacgggtcagatgctacagtccttattccaagctcacctattcctgttaatgtgaaattggtcgaccaataccatggaagcagccccaacaccgactactactacatgtcagcaagatctttgtccaggagtccagtgccaactgctggtacatggttgggcagtaatcgtcaatcgttaatgactcctccacaaacgaatgatcaaaggggatctttaattggtgaaatcgctccagcacattctgcaccatctactgttacaaaaaatgccctctcagtggcaccatggatgggtcttctattgggtacgtgtctcttgcacattttgattggaaacacacatagggagatgccaagtggaactgtcataccagttggaagaaggcttttagtgtttgtggagggtcatggaaattcatcgctcagccatggcaatggaagtgaaattggacgctatcttggttgggctatggcaataatttatatgggtgggcgccttccccagattttgttaaacatgcaaagaggccacgctgaggggttgaatccattaatgtttacctttgctttactgggaaattcaacatatgtaggaagcatacttgtaaatagcttggactggtcgaaagttggaccaaatctcccgtggctcgtagacgctggaggatgtgttttgctggattcttttatcattcttcagttcctttatttccattatcggaagcaaagggagctttcagatgagcacgacaaagcagataaagcctgacagaaatggtttcttcttcagtacaaaggtctggttctcctattatgaacatttgttatgctgcactgtagttgtggtctgatgggaacccttgtacagaattcgcaattttgagtataataactgaagctgaaatgagtacctcatacaactggctctgggtagcagcatcattcttacgtgaagagcaccactcatactcaggagtcgggacagatttggagcgtcatttcactggttgctgcttggggagggtagttctcacggcgtcatctcttgtggagaggcttgtgcacttaatttgtcttgtagtatcaaaacgtcttgtataatattatcactgttctcgaatattggttcattatctctgttctcgaatatttgttctcaaatatttgttacctgttagtttatttttgaaacgacggagggaatatttatttatatgagagattagatgtaactggtctgcttttgctttacattcaattttttttccttcccctttttttg

SEQ ID NO: 200676 - DNA, 1361 bp, Zea Mays
accccgaaggcccgaaacaagattagattagagatagcaaaaggcgaagcgacggtaaccgccaccaccaaatcgctaccgccaatccgccatgatgctcccgacggccaccgcgacggccgtcttcctcaccgcggcgccttcctctttctccacccgccgtcggcgcagtcgcgccatcttcgcatccctttcgccgtccttctcctcctcggaggagccgctgctggtgcgcgcggcgcggggcgaggacggcctcccacgcccgcccgcgtggatgatgcggcaggcagggcggtacatggcggagtaccaggcgctggccaagcgccacccctcgttccgggagcgctccgagaacacggacctcatcgtcgagatcacgctgcagccgtggcgtgccttcgcgcccgacggcgtcatcctgttctcggacatactcacgcccctgccggccatcggggtgccgttcgatatctcggactccaaggggcccgtgatccaatcgccagtacggtccaaagagcaggtgagggagctcgtccccatcgaccttgatatgctccagttcgtcggggagtcactaaagattctgcgaaatgaggatttgtgggggccccatggacaattgcaacttacattgttgaaggggggatgaccaatacgtacacaaatataaagagcatgtgccatacagctccagatgtcttgaagggtcttctctctcaccttgcacaagccatatctgactatatcatttaccaagttaactcgggggcccagtgtatacagatatttgattcatggggtggacagcttccacctcatgtgtgggagcagtggtcaaaaccatatatcaaacagggttgtgaaagcagctggtccaaaaggtcatatacttaatctgggctgtacttcagaaaacacccgaagaagctgtagcacatttctttgatgtcacaaggcgcttgagatatgacacccttttccaaggttctgttgctgaagaattgcatcacgttgcttgacaacggcaatgacattcccatttttcatcaagtggtgtatttgatctgtcatatcatcttagagtcgtagtagattcctagtgttgcctgcattctacctttcaagagagactcattttcttaagcctgtatatgtattgcagagataccggcggcaaatctagtgcaattttattcattgtttgttcgttccattattcatctggctgaagaagggatgcatgatgaccctggtttggtttcaatgattaatgacaatataaattattatagttaatgtatgttttacagaaacaatgttacaataatgcaagatgattggattcatatggt

SEQ ID NO: 200677 - DNA, 2697 bp, Zea Mays
accccgaaggcccgaaacaagattagattagagatagcaaaaggcgaagcgacggtaaccgccaccaccaaatcgctaccgccaatccgccatgatgctcccgacggccaccgcgacggccgtcttcctcaccgcggcgccttcctctttctccacccgccgtcggcgcagtcgcgccatcttcgcatccctttcgccgtccttctcctcctcgggtaaacccaattccctttcctttctcaccaccatttcgcttctaatctgaactacacgacgcgtgcccagaggagccgctgctggtgcgcgcggcgcggggcgaggacggcctcccacgcccgcccgcgtggatgatgcggcaggcagggcggtacatggcggagtaccaggcgctggccaagcgccacccctcgttccgggagcgctccgagaacacggacctcatcgtcgagatcacgctgcagccgtggcgtgccttcgcgcccgacggcgtcatcctgttctcggacatactcacgcccctgccggccatcggggtgccgttcgatatctcggactccaaggggcccgtgatccaatcgccagtacggtccaaagagcaggtgagggagctcgtccccatcgaccttgatatgctccagttcgtcggggagtcactaaagattctgcgaaatgagattgatggaaaagctgctttgctaggatttgtgggggccccatggacaattgcaacttacattgttgaaggggggatgaccaatacgtacacaaatataaagagcatgtgccatacagctccagatgtcttgaagggtcttctctctcaccttgcacaagccatatctgactatatcatttaccaagttaactcgggggcccagtgtatacagatatttgattcatggggtggacagcttccacctcatgtgtgggagcagtggtcaaaaccatatatcaaacaggtgactcttccttacttttcttgctttcatgtattaccaacttcatggtgttgctatgtatctgcactgtcttatggtataacactgatgacttccactgaataaagctcagtatctactaagaagtactctcattatgtttacactgaaatgcttctgatataattaatagcatcaatcccctgcagtatctggtaccgcattacaagacttgttatggttacaaattatgactgcaagtcccttataacctagggcgaaagtggaatatagaaaaagctaatctctcaatataaccagtagctggtgtttacatcagcaacatgttctcagttgacatggatttggaattttggatagtgtataattatgtgattttggtttgcatatattcaagactgcaactagcacagtgcatataacttactcggtcctaatggtaatttcaaaagcttggtatatttataaggaaaaattcagaatttcatctcgaccttgaaaaatgtgcaaaatatcatagcttgtagactgttatttagagctcaattagtacaatgcatgtgctttgcgacggcacacaatcatatttgatacccataaaaaataaatttaatatcaaagtgaacatatgatccatatatcagatattaaacatttaaactgataggaacaaatattacaccttatcttagtcaaaaggccgagaaaggtataggccgctcggtcgctcgtcctcctccagctagcgagttggtactatgtgggagcgttgcgctgcgagtgacggcttcttatcatgttggacttgggtggtttctcaaggcccatctgtactgtaacggctcattgttaggtgagaagtaaggaagagtaacagacctacgcgcttcgcacgagacgctcgacgcacgaaactgatgctttaatagagtagagattaaaagatttcatgcaaagttttgatttactgattctgttcaataagcttttctatttttccaacagattgtgagtaggattaagaaagagtgccctaatgtaccccttgtgttgtatataaatggaaatggaggtttacttgagcgcatgaagaacacaggagctgatgttattgggcttgactggacagtggacatgactgatggaaggaggcgccttggtaatggcattagtgtacaagggaatgtggatccagcatttttgttctcaccattaccagtactgactgatgaaattcatagggttgtgaaagcagctggtccaaaaggtcatatacttaatctgggctgtacttcagaaaacacccgaagaagctgtagcacatttctttgatgtcacaaggcgcttgagatatgacacccttttccaaggttctgttgctgaagaattgcatcacgttgcttgacaacggcaatgacattcccatttttcatcaagtggtgtatttgatctgtcatatcatcttagagtcgtagtagattcctagtgttgcctgcattctacctttcaagagagactcattttcttaagcctgtatatgtattgcagagataccggcggcaaatctagtgcaattttattcattgtttgttcgttccattattcatctggctgaagaagggatgcatgatgaccctggtttggtttcaatgattaatgacaatataaattattatagttaatgtatgttttacagaaacaatgttacaataatgcaagatgattggattcatatggt

SEQ ID NO: 200678 - DNA, 1412 bp, Zea Mays
gacagaggctggcctcttcgcctatcaccccgaaggcccgaaacaagattagattagagatagcaaaaggcgaagcgacggtaaccgccaccaccaaatcgctaccgccaatccgccatgatgctcccgacggccaccgcgacggccgtcttcctcaccgcggcgccttcctctttctccacccgccgtcggcgcagtcgcgccatcttcgcatccctttcgccgtccttctcctcctcggaggagccgctgctggtgcgcgcggcgcggggcgaggacggcctcccacgcccgcccgcgtggatgatgcggcaggcagggcggtacatggcggagtaccaggcgctggccaagcgccacccctcgttccgggagcgctccgagaacacggacctcatcgtcgagatcacgctgcagccgtggcgtgccttcgcgcccgacggcgtcatcctgttctcggacatactcacgcccctgccggccatcggggtgccgttcgatatctcggactccaaggggcccgtgatccaatcgccagtacggtccaaagagcaggtgagggagctcgtccccatcgaccttgatatgctccagttcgtcggggagtcactaaagattctgcgaaatgagattgatggaaaagctgctttgctaggatttgtgggggccccatggacaattgcaacttacattgttgaaggggggatgaccaatacgtacacaaatataaagagcatgtgccatacagctccagatgtcttgaagggtcttctctctcaccttgcacaagccatatctgactatatcatttaccaagttaactcgggggcccagtgtatacagatatttgattcatggggtggacagcttccacctcatgtgtgggagcagtggtcaaaaccatatatcaaacagggttgtgaaagcagctggtccaaaaggtcatatacttaatctgggctgtacttcagaaaacacccgaagaagctgtagcacatttctttgatgtcacaaggcgcttgagatatgacacccttttccaaggttctgttgctgaagaattgcatcacgttgcttgacaacggcaatgacattcccatttttcatcaagtggtgtatttgatctgtcatatcatcttagagtcgtagtagattcctagtgttgcctgcattctacctttcaagagagactcattttcttaagcctgtatatgtattgcagagataccggcggcaaatctagtgcaattttattcattgtttgttcgttccattattcatctggctgaagaagggatgcatgatgaccctggtttggtttcaatgattaatgacaatataaattattatagttaatgtatgttttacagaaacaatgttacaataatgcaagatgattggattcatatggt

SEQ ID NO: 200679 - DNA, 2054 bp, Zea Mays
caagagcctcacacttcacacccccccattccccacttgcctccgccggcgcatccctaaaccccagtttagggtttctcgcgcggcgctacgctccgctccctcctccgctccccgcccgatcgcctcttcctctacctcctcgaagcttcgactgttccacacccccacccatatcaacccctttcccctttagctccttcccactgatacgctcgccgcgtgaagcattcgttagccgagccgccgcaaccatgtcgtcgttctggggtgtggaagtgaagcccgggaagccctacactctcacccatggcgacttcgccggccgcctgcgcctcacccaggcgacgctaggggttgaggtcggcaagggggagaaggctaccggcgtgaagaggtgtgtgctacagtgcagtgccgagaacagagatcccgtttttctttgcgtcctcatgccggagcagtcggagacatgccacctggagctagaatttgaggaggaagtcaccttctcagtgattgggccaaggagcatccacctcgctggatactacatgactgatgtgtgtggggaagataggggtgacagtgattctgggagcgattcacttcaaagttcagatgaggatggtttcttggaggaggacgatgatggtaacatggttatgggatattcagacagtgaagatgatgattcagagtctgatgatgaagagatggcatacaatcagggtaggggcaaaagttcagaagggattgaagaagcaaagccgtgaaaatggtgatgagtctcaactccagcttgctgcaagaaatccacctactgaatccttggaaagtgaagatgaagatggttttcctgtatcattttctgaatcaaagaagagttctgagattgtttcaaacaagaatgggggaaaagacaaggagactagcaacaaagacctgaaaagaaaaagtggagccattagcgaccgtggtgattcttcagggggggtaaaagctgagattgatggggcatcaaagaaaaagaaaaagggcaaggacaaaagcactgttatggacacaggaaaagtaaacaacgaagaaaaggaggttaagctacacgattctccagctgatcctgtcagtacaaaacagaagaaaaagaaaaacaagaacaaaagtgcttctgagggtgataccagtgagcaatctgctaagaacaacaatattgataaagacaatgaggaggcaagtgcgcaggaggccaataaaaagatcaagaaaaagaaggcacatgatataagcagaagtgaaagtcaggcaggaactggacttggtgagtcagatagcaaggaaccactccaaacacgaacgtttgccaatggtatgatgattcaggaggtagagatgggcaaacctgatggtaaaaaggccagccgtgggaagaaggtttctgttagatatattggcaagctaaagaatggcactattttcgactccaacgtcagtggaagaccttttgagtttagactaggtgttgggcaggttatcagtggctgggacgttggcgtcaatggtatgcgggttggggacaaaaggagactcaccattccaccttccatggggtatgggagcaaaagagtggggcagataccacagaactcaactctcatcttcgatgtggagctggtgaacgtaaaatgaagtgagaagatccacgagaaactgcggcagtttcacaaattttgctacgcatcattttccttgggcaatgctgtttcgtaggcataggggcatgttaagtggattcatctctgtcgctatcatactttcgaactgagtttcagaaggaaaaaaactgtggactgttgccatctgggataattcctgggctgcagcattcgccatccttctcccggttccttcagggtcattttgacgttcttgtgataccctcagaaccttttgaactgatgaaatggttaaggtggagtacgtgtacgacttcacgccgattggttttttttgtatcgtttgtgatcaagccaatcaaaactgagatcttgtct

SEQ ID NO: 200680 - DNA, 2081 bp, Zea Mays
acacttcacacccccccattccccacttgcctccgccggcgcatccctaaaccccagtttagggtttctcgcgcggcgctacgctccgctccctcctccgctccccgcccgatcgcctcttcctctacctcctcgaagcttcgactgttccacacccccacccatatcaacccctttcccctttagctccttcccactgatacgctcgccgcgtgaagcattcgttagccgagccgccgcaaccatgtcgtcgttctggggtgtggaagtgaagcccgggaagccctacactctcacccatggcgacttcgccggccgcctgcgcctcacccaggcgacgctaggggttgaggtcggcaagggggagaaggctaccggcgtgaagaggtgtgtgctacagtgcagtgccgagaacagagatcccgtttttctttgcgtcctcatgccggagcagtcggagacatgccacctggagctagaatttgaggaggaagtcaccttctcagtgattgggccaaggagcatccacctcgctggatactacatgactgatgtgtgtggggaagataggggtgacagtgattctgggagcgattcacttcaaagttcagatgaggatggtttcttggaggaggacgatgatggtaacatgacagtgaagatgatgattcagagtctgatgatgaagagatggcatacaatcagggtaggggcaaaagttcagttgttattgaggaaattgaagaggatgacaaggctgctgttgctgaagtgcagaagggattgaagaagcaaagccgtgaaaatggtgatgagtctcaactccagcttgctgcaagaaatccacctactgaatccttggaaagtgaagatgaagatggttttcctgtatcattttctgaatcaaagaagagttctgagattgtttcaaacaagaatgggggaaaagacaaggagactagcaacaaagacctgaaaagaaaaagtggagccattagcgaccgtggtgattcttcagggggggtaaaagctgagattgatggggcatcaaagaaaaagaaaaagggcaaggacaaaagcactgttatggacacaggaaaagtaaacaacgaagaaaaggaggttaagctacacgattctccagctgatcctgtcagtacaaaacagaagaaaaagaaaaacaagaacaaaagtgcttctgagggtgataccagtgagcaatctgctaagaacaacaatattgataaagacaatgaggaggcaagtgcgcaggaggccaataaaaagatcaagaaaaagaaggcacatgatataagcagaagtgaaagtcaggcaggaactggacttggtgagtcagatagcaaggaaccactccaaacacgaacgtttgccaatggtatgatgattcaggaggtagagatgggcaaacctgatggtaaaaaggccagccgtgggaagaaggtttctgttagatatattggcaagctaaagaatggcactattttcgactccaacgtcagtggaagaccttttgagtttagactaggtgttgggcaggttatcagtggctgggacgttggcgtcaatggtatgcgggttggggacaaaaggagactcaccattccaccttccatggggtatgggagcaaaagagtggggcagataccacagaactcaactctcatcttcgatgtggagctggtgaacgtaaaatgaagtgagaagatccacgagaaactgcggcagtttcacaaattttgctacgcatcattttccttgggcaatgctgtttcgtaggcataggggcatgttaagtggattcatctctgtcgctatcatactttcgaactgagtttcagaaggaaaaaaactgtggactgttgccatctgggataattcctgggctgcagcattcgccatccttctcccggttccttcagggtcattttgacgttcttgtgataccctcagaaccttttgaactgatgaaatggttaaggtggagtacgtgtacgacttcacgccgattggttttttttgtatcgtttgtgatcaagccaatcaaaactgagatcttgtct

SEQ ID NO: 200681 - DNA, 1965 bp, Zea Mays
acacttcacacccccccattccccacttgcctccgccggcgcatccctaaaccccagtttagggtttctcgcgcggcgctacgctccgctccctcctccgctccccgcccgatcgcctcttcctctacctcctcgaagcttcgactgttccacacccccacccatatcaacccctttcccctttagctccttcccactgatacgctcgccgcgtgaagcattcgttagccgagccgccgcaaccatgtcgtcgttctggggtgtggaagtgaagcccgggaagccctacactctcacccatggcgacttcgccggccgcctgcgcctcacccaggcgacgctaggggttgaggtcggcaagggggagaaggctaccggcgtgaagaggtgtgtgctacagtgcagtgccgagaacagagatcccgtttttctttgcgtcctcatgccggagcagtcggagacatgccacctggagctagaatttgaggaggaagtcaccttctcagtgattgggccaaggagcatccacctcgctggatactacatgactgatgtgtgtggggaagataggggtgacagtgattctgggagcgattcacttcaaagttcagatgaggatggtttcttggaggaggacgatgatggtaacatgacagtgaagatgatgattcagagtctgatgatgaagagatggcatacaatcagggtaggggcaaaagttcagaagggattgaagaagcaaagccgtgaaaatggtgatgagtctcaactccagcttgctgcaagaaatccacctactgaatccttggaaagtgaagatgaagatggttttcctgtatcattttctgaatcaaagaagagttctgagattgtttcaaacaagaatgggggaaaagacaaggagactagcaacaaagacctgaaaagaaaaagtggagccattagcgaccgtggtgattcttcagggggggtaaaagctgagattgatggggcatcaaagaaaaagaaaaagggcaaggacaaaagcactgttatggacacaggaaaagtaaacaacgaagaaaaggaggttaagctacacgattctccagctgatcctgtcagtacaaaacagaagaaaaagaaaaacaagaacaaaagtgcttctgagggtgataccagtgagcaatctgctaagaacaacaatattgataaagacaatgaggaggcaagtgcgcaggaggccaataaaaagatcaagaaaaagaaggcacatgatataagcagaagtgaaagtcaggcaggaactggacttggtgagtcagatagcaaggaaccactccaaacacgaacgtttgccaatggtatgatgattcaggaggtagagatgggcaaacctgatggtaaaaaggccagccgtgggaagaaggtttctgttagatatattggcaagctaaagaatggcactattttcgactccaacgtcagtggaagaccttttgagtttagactaggtgttgggcaggttatcagtggctgggacgttggcgtcaatggtatgcgggttggggacaaaaggagactcaccattccaccttccatggggtatgggagcaaaagagtggggcagataccacagaactcaactctcatcttcgatgtggagctggtgaacgtaaaatgaagtgagaagatccacgagaaactgcggcagtttcacaaattttgctacgcatcattttccttgggcaatgctgtttcgtaggcataggggcatgttaagtggattcatctctgtcgctatcatactttcgaactgagtttcagaaggaaaaaaactgtggactgttgccatctgggataattcctgggctgcagcattcgccatccttctcccggttccttcagggtcattttgacgttcttgtgataccctcagaaccttttgaactgatgaaatggttaaggtggagtacgtgtaaaaac

SEQ ID NO: 200682 - DNA, 1540 bp, Zea Mays
gttgcatcgctggtagttgaagttaacagatgggggacgttgcgaaggacttgacggctgggaccgtgggaggggctgccaacctcatcgtcgggcacccgttcgacaccatcaaggtcaagctccagagccagcccacccctgctcccggacagctccccaagtacgccggcgccatcgatgctgtgaagcagacggtcgcggctgaaggtccgaggggcctatacaaggggatgggggcacctctggccaccgtagcggccttcaacgctgtcttgttcagtgtcagggggcagatggaggcgtttctcaggtcagagcctggtgtgccgctgacagtgaagcagcaggttgttgcgggcgccggtgctggaatcgcagtctccttcttggcttgtccaacagaactgatcaagtgcaggttgcaagcccagagttccttagccgaggcagccaccgcttctggtgtggctcttcccaaaggtccgatcgacgtggcgaagcatgttgtccgggacgccggcgccaaaggtctcttcaagggcctggtcccgacgatgggacgcgaggtccctggcaacgcactgatgttcggcgtgtacgaagccacgaagcagtacctggccggcggcccggacacgtcgggcctcggcaggggctcccaggtcctggcgggcggcctcgccggcgccgccttctggctgtccgtgtacccgacggacgtggtgaagagcgtgatccaggtggacgattacaagaagcccaagtactccgggtccctcgacgcgctgaggaagatcgtggcggctgatggggtgaagggcctgtacaaggggttcggacccgccatggcacgcagcgttccagccaatgccgcgacattcgtggcctacgagatcacgagatcggcgcttggttgatttgattggtgctggcctttgccatggccctttgcagtttattcattctccttgcgcggctggagcaacgcgaacaatgcgagacaattttagggaggaaagagagagagaaacttttcacttcaatgatgagattctttaatgaagcaaagcttactaaaagtttgttcatgtggagccacagagtgagtggttggtgacagataagtaatactggccttgtcgtaatggttggttggcctggactagagtgggcatccgacggtgatccgatggcgcgcgagtccgactggtggtgcttgtgatggtgagctgtgtggcccatggttttgttggcgtctggtggtgggtggccctcgtcagctcgcattcggcattcccttttgcccccacaatcccacgttcgccttgcctcctttttcttcttggcctaaattttattctttttctctctcacacacacaaatatatcagtataccgttctccttttattagtgccagtatgtaatggcatgttcggctgcctttctagcagatttttattttagtcttttttctaaaactgttattgttgttacttgacttcaattatcaaaaatcaaggcaatataagttaaat

SEQ ID NO: 200683 - DNA, 1531 bp, Zea Mays
acaaaatttgctgtgaacctttacttgcatcgagaaaagacttgacggctgggaccgtgggaggggctgccaacctcatcgtcgggcacccgttcgacaccatcaaggtcaagctccagagccagcccacccctgctcccggacagctccccaagtacgccggcgccatcgatgctgtgaagcagacggtcgcggctgaaggtccgaggggcctatacaaggggatgggggcacctctggccaccgtagcggccttcaacgctgtcttgttcagtgtcagggggcagatggaggcgtttctcaggtcagagcctggtgtgccgctgacagtgaagcagcaggttgttgcgggcgccggtgctggaatcgcagtctccttcttggcttgtccaacagaactgatcaagtgcaggttgcaagcccagagttccttagccgaggcagccaccgcttctggtgtggctcttcccaaaggtccgatcgacgtggcgaagcatgttgtccgggacgccggcgccaaaggtctcttcaagggcctggtcccgacgatgggacgcgaggtccctggcaacgcactgatgttcggcgtgtacgaagccacgaagcagtacctggccggcggcccggacacgtcgggcctcggcaggggctcccaggtcctggcgggcggcctcgccggcgccgccttctggctgtccgtgtacccgacggacgtggtgaagagcgtgatccaggtggacgattacaagaagcccaagtactccgggtccctcgacgcgctgaggaagatcgtggcggctgatggggtgaagggcctgtacaaggggttcggacccgccatggcacgcagcgttccagccaatgccgcgacattcgtggcctacgagatcacgagatcggcgcttggttgatttgattggtgctggcctttgccatggccctttgcagtttattcattctccttgcgcggctggagcaacgcgaacaatgcgagacaattttagggaggaaagagagagagaaacttttcacttcaatgatgagattctttaatgaagcaaagcttactaaaagtttgttcatgtggagccacagagtgagtggttggtgacagataagtaatactggccttgtcgtaatggttggttggcctggactagagtgggcatccgacggtgatccgatggcgcgcgagtccgactggtggtgcttgtgatggtgagctgtgtggcccatggttttgttggcgtctggtggtgggtggccctcgtcagctcgcattcggcattcccttttgcccccacaatcccacgttcgccttgcctcctttttcttcttggcctaaattttattctttttctctctcacacacacaaatatatcagtataccgttctccttttattagtgccagtatgtaatggcatgttcggctgcctttctagcagatttttattttagtcttttttctaaaactgttattgttgttacttgacttcaattatcaaaaatcaaggcaatataagttaaat

SEQ ID NO: 200684 - DNA, 1834 bp, Zea Mays
ctctccccgtcctctctgtactctctccgtctctctcgtcgtttatccgcctcccatccttgctaccctcctccgtgctctctgctcaccaattcctccaggattcggatttaggattgggattctggcgccggaaccgaagcggcgacgcgctggagccgcggccggatcgtttgggtcaccacgccaacgccatgatggcgaacgggaggttccagaagcaggcgttgcttccgccgcggagcccgttcccggtggcggcgccgcacgccgagctcggcccaatcgcgcggccgcgggagacgccccaccggcacggccaccagcgcacgtcgtccgagagcttcctcgctgacgagcagtcgtccagcgactcgttcgcgctcttcgaaggcggcagcgctgcggggggcatgtacgagtttgacaatgtgcttgatggcatgaggggaggagggcaggtggcttctttggccggtgcgcccgaattcttccctgagccagcctcatttgggcggccttgggagtccaggcagatgtaccggcagggtggtggcatgccaatgccaggcagggagaagaatggagggcgccatggtccgtccagctcatttggtgagcatgagcttggtcatgtgcccaatggggtgaataggaaggcccatggcgatgcggcttatgaccagaggattgtaatagagagaaaggagggcctgaggcactctcagtcggagactgacaccaaacgagccaaacaacaatatgctcagagatctcgtgtccggaagctccagtatattgcagagcttgagagaagagttcagtccttacagacagagggaatagaagtaactgctgaaatggattttctcggtcagcaaaatatcatgttagacttggaaaataaagccttgaagcaacggcttgagagtctatctcaggagcatctcattaaacgttatcagcaggagatgtttgagagggaaattggccgccttagaacattgttccagcagcagcaacagcaacaacatgtgccgcagcagcaggctcctacccatagccgcagtaacagtagagacctggattcgcaatttgcaaacctgtctctgaaacacagtgatcccagttcagggcgcgacgctatctctggcctccgcatttaagatccctttgttccagcttttggatccctgagctttgcagaacctgctgcccctttatgccactctttgtggttgttagtagcatcatgagaggagcagcaccggtgaaccgggaatctcatcccacggtgaataaagctggaaaggttaataactgtggatctggtccttagttctttcagaatgtgcacctggcggtcatcgttagcttctgtccattattgatgcttgaccagtcggaggtgtttaggatctgtttgcagattgatgacttccatggatccttgtatcagtttgaatctagaacactaaggttctaatccattcctttttagtcgattctctgtcgagtttaggcgccatggcccttgtattagtgtggcacacgaatggaatgtgagctggtcctctttaggttatgccacatcctggaaaaccgttgcgtgaggagttgtcgggccatgtccattgtcctaataagatggtgaggttgaagggctggtgcagttcagtttcattttatttgtgatgtgcacagcaagatattggatactttgggttcttacatttatttgagcactgtatttttatcgcattgtgatgacagtatattccaagttcattttagctgccaagatcctgcttgtgttcgtttcaacatgtcgttg

SEQ ID NO: 200685 - DNA, 2266 bp, Zea Mays
ctctccccgtcctctctgtactctctccgtctctctcgtcgtttatccgcctcccatccttgctaccctcctccgtgctctctgctcaccaattcctccaggattcggatttaggattgggattctggcgccggaaccgaagcggcgacgcgctggagccgcggccggatcggtgcgtgcttctcccgtacctattttttgatggccaatttttagcgtctgttgcggttgttgtatggaacgcgatccggttcagttggcgcaattccaaccggatttccgtttttcccaaccgcggatttcttcgagattgctttagcttcgtttgtttcccgccgtttattttttttctcgctttcattctcgggaaatcttgggtcttacttgcgactattcagtgccgttctgtatgcgtccttgattcgaattcgccgcaagttttcggttttctgcacatgcggtggttcctggacgagatctgtggccggagccgcaacaatcccgcctgaatttttaatctttcactgagtttgggtcaccacgccaacgccatgatggcgaacgggaggttccagaagcaggcgttgcttccgccgcggagcccgttcccggtggcggcgccgcacgccgagctcggcccaatcgcgcggccgcgggagacgccccaccggcacggccaccagcgcacgtcgtccgagagcttcctcgctgacgagcagccgtcgtggctggacgacctgctcgacgagcccgagactccggcgcgggcgcacggccggcctggccaccgcaggtcgtccagcgactcgttcgcgctcttcgaaggcggcagcgctgcggggggcatgtacgagtttgacaatgtgcttgatggcatgaggggaggagggcaggtggcttctttggccggtgcgcccgaattcttccctgagccagcctcatttgggcggccttgggagtccaggcagatgtaccggcagggtggtggcatgccaatgccaggcagggagaagaatggagggcgccatggtccgtccagctcatttggtgagcatgagcttggtcatgtgcccaatggggtgaataggaaggcccatggcgatgcggcttatgaccagaggattgtaatagagagaaaggagggcctgaggcactctcagtcggagactgacaccaaacgagccaaacaacaatatgctcagagatctcgtgtccggaagctccagtatattgcagagcttgagagaagagttcagtccttacagacagagggaatagaagtaactgctgaaatggattttctcggtcagcaaaatatcatgttagacttggaaaataaagccttgaagcaacggcttgagagtctatctcaggagcatctcattaaacgttatcagcaggagatgtttgagagggaaattggccgccttagaacattgttccagcagcagcaacagcaacaacatgtgccgcagcagcaggctcctacccatagccgcagtaacagtagagacctggattcgcaatttgcaaacctgtctctgaaacacagtgatcccagttcagggcgcgacgctatctctggcctccgcatttaagatccctttgttccagcttttggatccctgagctttgcagaacctgctgcccctttatgccactctttgtggttgttagtagcatcatgagaggagcagcaccggtgaaccgggaatctcatcccacggtgaataaagctggaaaggttaataactgtggatctggtccttagttctttcagaatgtgcacctggcggtcatcgttagcttctgtccattattgatgcttgaccagtcggaggtgtttaggatctgtttgcagattgatgacttccatggatccttgtatcagtttgaatctagaacactaaggttctaatccattcctttttagtcgattctctgtcgagtttaggcgccatggcccttgtattagtgtggcacacgaatggaatgtgagctggtcctctttaggttatgccacatcctggaaaaccgttgcgtgaggagttgtcgggccatgtccattgtcctaataagatggtgaggttgaagggctggtgcagttcagtttcattttatttgtgatgtgcacagcaagatattggatactttgggttcttacatttatttgagcactgtatttttatcgcattgtgatgacagtatattccaagttcattttagctgccaagatcctgcttgtgttcgtttcaacatgtcgttg

SEQ ID NO: 200686 - DNA, 1795 bp, Zea Mays
ctctccccgtcctctctgtactctctccgtctctctcgtcgtttatccgcctcccatccttgctaccctcctccgtgctctctgctcaccaattcctccaggattcggatttaggattgggattctggcgccggaaccgaagcggcgacgcgctggagccgcggccggatcgtttgggtcaccacgccaacgccatgatggcgaacgggaggttccagaagcaggcgttgcttccgccgcggagcccgttcccggtggcggcgccgcacgccgagctcggcccaatcgcgcggccgcgggagacgccccaccggcacggccaccagcgcacgtcgtccgagagcttcctcgctgacgagcacgctgcggggggcatgtacgagtttgacaatgtgcttgatggcatgaggggaggagggcaggtggcttctttggccggtgcgcccgaattcttccctgagccagcctcatttgggcggccttgggagtccaggcagatgtaccggcagggtggtggcatgccaatgccaggcagggagaagaatggagggcgccatggtccgtccagctcatttggtgagcatgagcttggtcatgtgcccaatggggtgaataggaaggcccatggcgatgcggcttatgaccagaggattgtaatagagagaaaggagggcctgaggcactctcagtcggagactgacaccaaacgagccaaacaacaatatgctcagagatctcgtgtccggaagctccagtatattgcagagcttgagagaagagttcagtccttacagacagagggaatagaagtaactgctgaaatggattttctcggtcagcaaaatatcatgttagacttggaaaataaagccttgaagcaacggcttgagagtctatctcaggagcatctcattaaacgttatcagcaggagatgtttgagagggaaattggccgccttagaacattgttccagcagcagcaacagcaacaacatgtgccgcagcagcaggctcctacccatagccgcagtaacagtagagacctggattcgcaatttgcaaacctgtctctgaaacacagtgatcccagttcagggcgcgacgctatctctggcctccgcatttaagatccctttgttccagcttttggatccctgagctttgcagaacctgctgcccctttatgccactctttgtggttgttagtagcatcatgagaggagcagcaccggtgaaccgggaatctcatcccacggtgaataaagctggaaaggttaataactgtggatctggtccttagttctttcagaatgtgcacctggcggtcatcgttagcttctgtccattattgatgcttgaccagtcggaggtgtttaggatctgtttgcagattgatgacttccatggatccttgtatcagtttgaatctagaacactaaggttctaatccattcctttttagtcgattctctgtcgagtttaggcgccatggcccttgtattagtgtggcacacgaatggaatgtgagctggtcctctttaggttatgccacatcctggaaaaccgttgcgtgaggagttgtcgggccatgtccattgtcctaataagatggtgaggttgaagggctggtgcagttcagtttcattttatttgtgatgtgcacagcaagatattggatactttgggttcttacatttatttgagcactgtatttttatcgcattgtgatgacagtatattccaagttcattttagctgccaagatcctgcttgtgttcgtttcaacatgtcgttg

SEQ ID NO: 200687 - DNA, 780 bp, Zea Mays
cttgcccctctttagagacgagggtacaggagtgtagcaccaattagttcgagtgatgtctctctgcccacatcatcattagatctcccagatgttgcagatctctttgctccccctgcagacaatgcatcaaggaagagggaatcaaatgggtctgctcttcatgactcgcgcaataaatttccaaggatgcaatcacaatcccaaggcataggaagtgctgcagggaacgccctaattccaccgcagcttcgtggaaggagcaatgttgttaccgaagacatgagcaaactctttgtggctaaacgaaaagagtagcatcttaaccttttctggacctgaacctctgtttggactccatagactgataaacgcatgtactgagtgcaatggatgtgccggcatgatccaaggttgttgctgaatcctaaagaaccggacgaaggatgctaacggtaggacgacctggtctcttagcctaccgtgggctgttgtcagatgtcaaaaatgccctcttagaagtttagaacatttctttggtgctcactcgcgtttcatgttcaacggtgctacatgactggtgctggatgcatgtaaactctgcaaccctatcatgtcatggcagctagatgctactacgtctatcttttggtcggtgattacaaccatgtattacgtctagtagtggtaatagatcgcgatccaaatgcttcttaataaaatagtagaactctaaataattttagttaaaaaatgaatagaaataagattctgatttta

SEQ ID NO: 200688 - DNA, 4468 bp, Zea Mays
caacagtcattgccatcctccatccctctgaactccgaaggccgaaccagttccgacgaaacggtacggtgacggctcacctcgggggtctccatgtccatggacggccctgccacctcgccggcaagcgaggtgccgttccgcatcagcttctccggccacagcggccacctccgcctcgaccctaccccgcacacgcccagccccattccggacttcgtcctgccgccggcatacccggccgagagcccgagcagcgtgaaggagtacctcgagaggaactacctcgaccccgagctgcacctccccaccgcggccgatagcgggagggtgtgggatgtcgactggtttgccctggccaggccgccgctggagccctccgccccccgcaccatgctcgcgcccgtctgggtgccgcctttccggcgcgggcaggagaagttgcaatccgcggcagagtcgcgagtgtgggaccctgagtccgtgcaaatggagatggtcgacgtgttcgattcggggaccggggggatagcgccccggatgcctggtccggcgaaggacttcgtcagggggagcatcaacaacagaccttttcgtccaggcggtctgcaggatgacgccgctgaggcggctgcgctggaaaaggcgttcccagagggtgcaaggactggtgattgggtgcgtgagctcatgagcggtggcccggcgcaggttgcgcctccagggttccgtaagggattggagctgggccagttgaaggggtatgaaagccactggaagtgtttccgggatggagaacttgtagaggagcaacctgcatcatcatcgaatgacacaatggagaagtactctgtgcagtttgatgatcttttcaagatagcgtgggaggaagatactgccaacaagttgttgaaggacggtgttgttcaacaatctgctgaaggtgaaggaatcaatgaaattggcgaacaaaaagttgatgcattgcaggatgagttcgagagtataacaacgctagatgacgagaaacaggaagttgatgtcataagaaatgttcctgaaactcaaacagacttggatcagatgttatcttctgaagtacaggatacaggcagggaaccaggtgcatcaggtgataagaagccaacacaagatggcatggtttgggcacttgttggtggggacgaggacatagtgactaacttctccaaactcgttccagatatggcaatcgagtttccatttgaattggataagttccagaaggaggctatatattatctcgagaagggtgaatcagtctttgttgcagcccatacttcagctggaaagacggttgttgctgagtatgcattcgcattagcaacgaaagagatgttagcatcaggccagaggcaacttgcttaattatgactactgagatattgcgttcaatgctctacagaggcgcagacattatacgtgatattgaatgggtaatctttgatgaagtgcattatgtaaatgatgctgaaagaggtgtagtctgggaggaggtcattataatgctcccgaagcacattaacattgttcttctttcggcaacggtcccaaatactgttgaatttgctgactggattggtcggacaaagcagaagaaaattcgtgtcacatcgaccaacaaaaggcctgttccacttgagcattgcctgttctactctggagaagtgtacaaaatatgtgagagggatatgtttcttgctcaaggatttaaagaagcaaaagatgctttcaaaaagaaaaatttgaataagtttggagtgaaacctggttcaaagtcaggaacccctgcagtacgtgctggaactcaaggcaaaaatccagatacatccaacaaggggagagatcaaaagtacccaaagcaccgcaattccaattcaggagtagccacagttcaacagagctcctcagggccaaagagatttgaatctttattttggatgccacttgtgaataaccttctgaagaaatcccttgtgcctgtggtgattttttgtttctcaaagaatcgctgtgataaatcggcagatagtatgtttggcactgatctcaccagtagttcagagaaaagtgaaatacgtgtcttctgtgacaaggcattttcacgtcttaaaggatctgataggaaccttccacaggttgtaggaatacaaagccttctgcgaagaggaattggagtacaccacgctgggcttctccctattgtgaaggaagttgttgagatgctgttttgccgtggtgtaatcaaggtactgttttccactgagacatttgcaatgggtgtcaatgcaccggcaagaacggttgtgtttgattctttaagaaagtttgatggaaaagaacaccggaaattgcttccaggggaatatatacaaatggctgggcgagctggtcggagaggacttgataacattggtactgtgatcattatgtgtcgtgatgaaattcctgaagaaagcgatttgaaaaatttgatcgttggaaaaccaactcgtttggaatctcaatttcgattaacatacaccatgatactacatcttctgcgtgtggaggaactgaaggtcgaggacatgctcaagagaagttttgctgaattccacgcacaaaagaatttgcctgagaaggaaaagcttcttctgcaaatgcttcgtcaacctacaaggacaatagagtgcataaaaggagagccttctattgaggaatactacgagatgactttagatgctgaggcacacagggaatacataacagaagcaattatgcagctgcctaattctcaacagtttcttacgcctgggagattggtggttgttaaatctgattctgatgatgatcacttgcttggtgttatactgaaaaatccatctgcattgctaaagaaatatgttgttctggtattgactggtgattgcagttcatctgcactagcccctgagttcaataaaaatgaaaagggtcctgtggattttcaaggaggacaatttattgtcctgaaaggaaaacgtggcatggacgatgaatatttctcttctgttagttcacgaaaagcttcaggtgtaatcaatatcaatctaccatacaagggggatgcatctggaatgggctttgaagtaagagcaattgagaataaagaaatcattagtatatgcagcagcaaaataaagattgatcaagtcagacttcttgaggagcctaacaaaactgcatactctagaactgtccaacagcttataaaggagcaaccagatggaaccaagtatcctcctgctttagatgcaataaaagatctaaaaatgaaagacatgtatcttgttgaaagttaccgtgcatatcacatactactgcaaaaaatgtctgaaaacaagtgccatggttgtataaaactgaaggagcatatatcattgatgagggagcaaaagatgtacaaggatcagttgaatgaattgaaattccaaatgtccgacgaggcacttcaacaaatgccagagtttcaaggcagaattgatgtactaaaggtaatccactacattgattctgatctagttgtgcaacttaagggtcgggtagcatgtgaaatgaactccggtgaggagttaatatcaacagaatgtctgtttgaaaatcaattggatgacctagaacccgaagaagctgtggctattatgtctgcattcgtcttccaacaacgcaatgcttcagaaccatctcttactccaaaactggctgaagcgaagaagaggctctatgatacagccataaaattagggaagctccaatccgagttcaaggtgcctgtggaccctgaagagtatgcacgtgataatctcaagtttggccttgttgaggtcgtctacgagtgggcaaaggggacgcctttcgcagacatatgcgagctgactgatgtatccgaagggatcattgtaagaacaatcgtccgtctggacgaaacatgtagggaattcaggaatgcagcttccatcatggggaactctgcgctgttcaagaagatggaggtcgcgtctaacgctattaagcgtgacattgtgtttgcagcaagtttgtatgtcacaggaatctgatgcatgtaacctcgtagtctcccttgcttcttttgttagagaaatcgttgtgctggtggaatgctactaacctaaccttagctagaacaattgttgtggtatttttttttccagttctggattattgcttttgctagttttgcgaagttttctgaagcggcgaccagcagagtaaaggaaaatcgaaagcgggtgggattctcgtttttttttcactgagaatatgattattgtattattagcggaaacaaaacgttctcgtactcaagacacctggaatccgtctagtaggagctcgatgtctaaagcaaaagtgcttaactggattgggaaacactgagatgcatgcc

SEQ ID NO: 200689 - DNA, 6333 bp, Zea Mays
ggcggctctcctcgagcgcgtgcgcagcggctctcctccccacaggcagtcgtgcggcggcctcatccccgccggcgagcctccactcccctccgccggtacgcctctatcgccggtggcctccccctcggcagacagcctcgcctcgcttgcttctattgctgtgctccaccacggagccctaggtggagctacgaaccccgtgatccccgacagtgtggcaccggagctcggcggcgacagcgggcacatccccctcatgccctaggtggagcaacgaaccccaccgtgctcaacattgccccaagaatgcgactctcctcgccgcactgctctatctcggggacctcgcctagcattgccccctgccccgcgtcgacgaggtggagtccttcctcgcccgcaccttccggatgatccaggtgctactcgaggctgtatgcattgtgtgggggaataagggatatgtagctgcttacattttgaagagatttgattataccttaagcacgattgcaactgaaactttggctgtgggtgatgggttctgctattttggtatgttatcattcatctctatgatagagcagattcagaatggtgagtttggcaggggttaattgtttcaatttgttagaatttttcaaacgaaagttgtctcaatttttggatcattcttggttttatgacgaatgcccaaactacagattatctaatggtcaaactgaatatttgttttatagcaaaaaaactatctagaaaattacctctttcatgtttttgttcagcggcggtccacgcggctaccaatagggatgatacaggttttgatattcttttatttattaattggttcaattggagaattacctcaacttattgggattaatgttctttgttctttgatgaccccttgctgagtgaaaaatacctgtgtatgttacaaaataaactacttgtatgttaaaaaaagtttctccctgccattacattgacatctcaaactcctcgcacctgttgccttttggaacatatacgttataacccacattttgcattgtgatttctctactaccaacaccaattttcttagaaggctatttagcagtaatttttgtactagctacaagaaacccattctatgcaataaatatccatattacgtaggtctgcagattacggcatatgctgcaatagcaaatgacacatttgtggcatattgctttcctttcaaagctttgagaatcatgtagtcatgcattagattcacatgcaccaaatttaagctaactggaaagtgggatcatatttttttatctcgtgcaaataactattaaactgctcaagtttctttatttggtaattaattaaaattttcaaccatgtcatattgcatatcaattgccaactttttctacacagatgcacatgctcaattatgataatgtcatatggtctgtcaaccatatgtggtcaatgcaaactaaattgttttcttctttatatgttttgatttgattttttgtatttgtcactgggattatatttttctctcaacggttttgctggttgctgtttcaattcaagtctgcactgctaaggtgaatttgagtgacgagattgatttggaagattatgtttgcagaccgggtaagatcagtgttgctgatgttgagttggtttcatggcgcagaccaagatttttatgcatttgttgttttctaactattgtattgtcagggtacttttgtcctgccctagccaaagcattctccattcatttccataatactaatgctcttattcattcttacaagtaatttgtctcgcggaatacattaagatttgcatgacgtctaatagaatatgtttattgtattagtatgttggaaggggtgaaaatgaatcttggtatcttagatctgggttgcttcctgtcatagaatttggttacaatgtatcttttggtggaaatcatttttttgctatttgtgttccaaattctgcatgttgggtgagttagccaagtttgtttcatctatttatgagttctgacattgaaatgtttaccatgaacctcctcgctgacacgtcgcctcgcccccgagctgacttcctgacgccaccctcgcacaagatcccgatgtggcaatggcgaccagcgacgggcgctcaacgccaccgcgccgcctgcgaacccatggtgagaagtgtggtatcgatctagagccgaaggacttccccaacaccccttcctccatcggcgtgacatcggccagctcatctgcgacgacgaggcatcttcgaccgacttctcgacaccccatcctccatcaacgcggctccagtaccccttcctccatcggcgcagcagcatccaattcatctacgacgacaaggcatcttcgagcaaccacgccctactacaagtggtgttagtccatctcagataagtggagtaatttgtttgtatctgtatcttctattttatttcttccctaatcctgattaatagcctaatcacgcgacaactaatacatgtcgatttctttccttagccggtgtcatgcgcatgtgagatctagggagaggaagaggaggaagggttgtggggaccgggggtgcaagatggcggattcacctgcaactacaagaaaagaaagagcgagagatttacagaaaccttcagagccacggaggaggaggaggagattaggaggatctctacggcgctgacggattagttaaggaacgaaatatcacatcgtgtccggtaaccagattcagatgtgggcaccatgtgtgggtgcaaggccaggccgaggcgaaagagattcgacgattgagaatacatcaaagaataaaaatgtggaactcggattttcagatgaagagcgtgaccaagaatttcctgattttccatcatttattccattcttacctcctctgagtgcagctaacctaaaggtctactatgccacacgtttcaccatcatagttgggataatggtgttcggtggttttcttgcaccaatcttaaacttggtctaggggcacatcttatgaagactccatccgcagcgttcatctgtcgacgtagttgagaagtgcactcaggttatacatccagtaaagagcaagacatttgaaagcttatgggccaactgtgttgctattgatgcaagcgaaagttggctgatgaattctctatgcctacttctagagtgatgttcaaagaggttgacgctccttcaccatccccagctttgtggaatgggccacaggtagccatttaggatgacaaagccacaagggtgtccttcatcaaggctatgctagaagcctcagacttgtgtatgaggaaaattcataaaaatggtacacagaagctgggaagaaagtggaagaggaatttagcacttgccctctgtcagtcctaatgatgagcgttaagaacaacaccaagtcgggcagcggcaacagaggggatggggccaatgacggaggcggagaggagaacccatcgatttggtggcgtaagtgggagctcatcgaggccggtgcgtttgggcaggtctaccgcatgacttatttgcccttctagggatcagcagatcccacacctattacatgatatgtccttctagaatagaatctgctctctatcttctaaaccggtactgccttcttcaatatcagccaccggccggtccacctcttcaataatcgtccttcatcgcccttcagttgtgagttgtgacatactatttatattcggatatgatctattacaaatatacatgcatattatagggtgtgcatctgtatacccatgttctttacaaggtccgtccttaggtgatatgagtagtaagtctaaacttgcttcttaccaagagttaggctgtatgtgtgtatgtatttttttagtacaatagtattcaaaatgtatgaggactctttctttttgattgttttgaacaatgggcgtatgaaccggtggaagaacaattcatttgatagttgtttgtgtccaaaatggaactaaatctaaaatttgtggagcaaaccactcaatccagatctctatttaatcaaacattttttttgttatgatgcagttccacacgtgaaatagccatatggatatgtaacaacataaatttgttcagtgggaaataagtttctataatacatttatgcacccaggtgacaagaaaaaaatattttgtcatttctataaaacatgatgcattttttctcaattcatagtgtgatgttattcctcttttgcctttagagaagcccataatacaaatggataagaagtcaccaaacatttctaaatcactggtcttcatccagtgacaacctttagtgtcgagctggtgtttgtgcttgagctttagtatgtctgcaacaagcctttaggaatgtcgatatgctcatatgcttagttgtgcatgagtatttttgttgcaaggtttagatgcagtgttctggtctttagtgcatgtattttatagaatataacacttctatattgtagaatgcaatctgatagtttacatagaaactgataaacttgattgatccttggcattatagtacaaaaagtgcaataccttgtgaattaattttgtacctcattgtcatttacgggttaactgtccatacattgtattacatgttttctacaacctgttcttatttctcaacgaacagtagcaatcattggtcaggacatgtagcttcatttgttaggacatgtagcttaatgctatcttgttgttttctactgttcataaacgcaggacctgagatctagaaggacacaacaggcaaggtggatgtattcgtagttgattatatgttaaaagcaaatttcggatgacattggtggagattgcttatctctaagacacatctactcattctttgaatggaaatcacatccacgttctagaaagtctatttttacttcaaaagtactccttctgttccaaataaattagtgttagcatctctgcactctattgcccacttcccccctcatcggtgttttttattgttgcatatcaattttgtggctcaaatgcccctttgaaacatatagcaccaaaattatcctaattaattaattggtttctaactggctactctatttgcaacaatggggatatataaccttaccatgtctgtttatcacagtgcatcttagattgcatcgtattgtaattgttttagttccttgacatactgtttgtgcaacaggaactgcttgatgtacttacggttgggtatctgtgtagatgtagctgccaagttgtctaaagaaaagttcctgacctttcacatgctgccacattgccacaataccttaagagcttttctatacttctatgatttgtgttttcgagatctgagttatttaaatgttgtctgctattttgaatttttatatgaagatcaaagttctcaagtgataaagtaattaatataacaagcggacaacacatagacaaactaattaatgtagcatatagacgaataaggaatcctgaaacattgaccgtgaagaaaattattgtgcacatatgcactctttctccaaaatttggcatttaatcttattgcaacatacttgtacagaggggcgagggttgttcagtgctttgacatgtgtgcaactattcaagcacaatggttagatgatatccccattcattttagattattacattgtggtgttcgacttcttcagtcaagcagcaatcatgcaacatgccttactgtagttttttatcactgcacatgttgctggataaatttatagactggaggattatagaggactaacaagtgctactgggagattctcgagcaccattgaactaagagattccaaatagttctttggagtctattgttgatgttggcggggataatctagcagagatttgtcagattttttgtgcaacacggaggctacatgaggcagcaacgatcccattcttctcgcatgccactttacacaagctaaggatagcttctggtctcactcatggttgtggcagggaaagccgagtcagtagggtttgtcatgtagctggagttatctcagaccgcatattagatgcagtgatgatgtttacatttaccgtgcaagcaagatgacttatattatgccttaggacaataagtattgttttcactctaatgaaatacttggtaaaaagttgtctctgtagttgtatatttgactgtgaatatttgaacccactattataattgttgctaattgaggtcagatttcagaggccaaataattct

SEQ ID NO: 200690 - DNA, 2617 bp, Zea Mays
gaatatgtttattgtattagtatgttggaaggggtgaaaatgaatcttggtatcttagatctgggttgcttcctgtcatagaatttggttacaatgtatcttttggtggaaatcatttttttgctatttgtgttccaaattctgcatgttgggtgagttagccaagtttgtttcatctatttatgagttctgacattgaaatgtttaccatgaacctcctcgctgacacgtcgcctcgcccccgagctgacttcctgacgccaccctcgcacaagatcccgatgtggcaatggcgaccagcgacgggcgctcaacgccaccgcgccgcctgcgaacccatggtgagaagtgtggtatcgatctagagccgaaggacttccccaacaccccttcctccatcggcgtgacatcggccagctcatctgcgacgacgaggcatcttcgaccgacttctcgacaccccatcctccatcaacgcggctccagtaccccttcctccatcggcgcagcagcatccaattcatctacgacgacaaggcatcttcgagcaaccacgccctactacaagtggtgttagtccatctcagataagtggagtaatttgtttgtatctgtatcttctattttatttcttccctaatcctgattaatagcctaatcacgcgacaactaatacatgtcgatttctttccttagccggtgtcatgcgcatgtgagatctagggagaggaagaggaggaagggttgtggggaccgggggtgcaagatggcggattcacctgcaactacaagaaaagaaagagcgagagatttacagaaaccttcagagccacggaggaggaggaggagattaggaggatctctacggcgctgacggattagttaaggaacgaaatatcacatcgtgtccggtaaccagattcagatgtgggcaccatgtgtgggtgcaaggccaggccgaggcgaaagagattcgacgattgagaatacatcaaagaataaaaatgtggaactcggattttcagatgaagagcgtgaccaagaatttcctgattttccatcatttattccattcttacctcctctgagtgcagctaacctaaaggtctactatgccacacgtttcaccatcatagttgggataatggtgttcggtggttttcttgcaccaatcttaaacttggtctaggggcacatcttatgaagactccatccgcagcgttcatctgtcgacgtagttgagaagtgcactcaggttatacatccagtaaagagcaagacatttgaaagcttatgggccaactgtgttgctattgatgcaagcgaaagttggctgatgaattctctatgcctacttctagagtgatgttcaaagaggttgacgctccttcaccatccccagctttgtggaatgggccacaggtagccatttaggatgacaaagccacaagggtgtccttcatcaaggctatgctagaagcctcagacttgtgtatgaggaaaattcataaaaatggtacacagaagctgggaagaaagtggaagaggaatttagcacttgccctctgtcagtcctaatgatgagcgttaagaacaacaccaagtcgggcagcggcaacagaggggatggggccaatgacggaggcggagaggagaacccatcgatttggtggcgtaagtgggagctcatcgaggccggtgcgtttgggcagccaccggccggtccacctcttcaataatcgtccttcatcgcccttcagttgacctgagatctagaaggacacaacaggcaaggtggatgtattcgtagttgattatatgttaaaagcaaatttcggatgacattggtggagattgcttatctctaagacacatctactcattctttgaatggaaatcacatccacgttctagaaagtctatttttacttcaaaaaggggcgagggttgttcagtgctttgacatgtgtgcaactattcaagcacaatggttagatgatatccccattcattttagattattacattgtggtgttcgacttcttcagtcaagcagcaatcatgcaacatgccttactgtagttttttatcactgcacatgttgctggataaatttatagactggaggattatagaggactaacaagtgctactgggagattctcgagcaccattgaactaagagattccaaatagttctttggagtctattgttgatgttggcggggataatctagcagagatttgtcagattttttgtgcaacacggaggctacatgaggcagcaacgatcccattcttctcgcatgccactttacacaagctaaggatagcttctggtctcactcatggttgtggcagggaaagccgagtcagtagggtttgtcatgtagctggagttatctcagaccgcatattagatgcagtgatgatgtttacatttaccgtgcaagcaagatgacttatattatgccttaggacaataagtattgttttcactctaatgaaatacttggtaaaaagttgtctctgtagttgtatatttgactgtgaatatttgaacccactattataattgttgctaattgaggtcagatttcagaggccaaataattct

SEQ ID NO: 200691 - DNA, 2347 bp, Zea Mays
aaatcatttttttgctatttgtgttccaaattctgcatgttgggtgagttagccaagtttgtttcatctatttatgagttctgacattgaaatgtttaccatgaacctcctcgctgacacgtcgcctcgcccccgagctgacttcctgacgccaccctcgcacaagatcccgatgtggcaatggcgaccagcgacgggcgctcaacgccaccgcgccgcctgcgaacccatggtgagaagtgtggtatcgatctagagccgaaggacttccccaacaccccttcctccatcggcgtgacatcggccagctcatctgcgacgacgaggcatcttcgaccgacttctcgacaccccatcctccatcaacgcggctccagtaccccttcctccatcggcgcagcagcatccaattcatctacgacgacaaggcatcttcgagcaaccacgccctactacaagtggtgttagtccatctcagataagtggagtaatttgtttgtatctgtatcttctattttatttcttccctaatcctgattaatagcctaatcacgcgacaactaatacatgtcgatttctttccttagccggtgtcatgcgcatgtgagatctagggagaggaagaggaggaagggttgtggggaccgggggtgcaagatggcggattcacctgcaactacaagaaaagaaagagcgagagatttacagaaaccttcagagccacggaggaggaggaggagattaggaggatctctacggcgctgacggattagttaaggaacgaaatatcacatcgtgtccggtaaccagattcagatgtgggcaccatgtgtgggtgcaaggccaggccgaggcgaaagagattcgacgattgagaatacatcaaagaataaaaatgtggaactcggattttcagatgaagagcgtgaccaagaatttcctgattttccatcatttattccattcttacctcctctgagtgcagctaacctaaaggtctactatgccacacgtttcaccatcatagttgggataatggtgttcggtggttttcttgcaccaatcttaaacttggtctaggggcacatcttatgaagactccatccgcagcgttcatctgtcgacgtagttgagaagtgcactcaggttatacatccagtaaagagcaagacatttgaaagcttatgggccaactgtgttgctattgatgcaagcgaaagttggctgatgaattctctatgcctacttctagagtgatgttcaaagaggttgacgctccttcaccatccccagctttgtggaatgggccacaggtagccatttaggatgacaaagccacaagggtgtccttcatcaaggctatgctagaagcctcagacttgtgtatgaggaaaattcataaaaatggtacacagaagctgggaagaaagtggaagaggaatttagcacttgccctctgtcagtcctaatgatgagcgttaagaacaacaccaagtcgggcagcggcaacagaggggatggggccaatgacggaggcggagaggagaacccatcgatttggtggcgtaagtgggagctcatcgaggccgccaccggccggtccacctcttcaataatcgtccttcatcgcccttcagttgacctgagatctagaaggacacaacagaggggcgagggttgttcagtgctttgacatgtgtgcaactattcaagcacaatggttagatgatatccccattcattttagattattacattgtggtgttcgacttcttcagtcaagcagcaatcatgcaacatgccttactgtagttttttatcactgcacatgttgctggataaatttatagactggaggattatagaggactaacaagtgctactgggagattctcgagcaccattgaactaagagattccaaatagttctttggagtctattgttgatgttggcggggataatctagcagagatttgtcagattttttgtgcaacacggaggctacatgaggcagcaacgatcccattcttctcgcatgccactttacacaagctaaggatagcttctggtctcactcatggttgtggcagggaaagccgagtcagtagggtttgtcatgtagctggagttatctcagaccgcatattagatgcagtgatgatgtttacatttaccgtgcaagcaagatgacttatattatgccttaggacaataagtattgttttcactctaatgaaatacttggtaaaaagttgtctctgtagttgtatatttgactgtgaatatttgaacccactattataattgttgctaattgaggtcagatttcagaggccaaataattct

SEQ ID NO: 200692 - DNA, 2220 bp, Zea Mays
gccaagtttgtttcatctatttatgagttctgacattgaaatgtttaccatgaacctcctcgctgacacgtcgcctcgcccccgagctgacttcctgacgccaccctcgcacaagatcccgatgtggcaatggcgaccagcgacgggcgctcaacgccaccgcgccgcctgcgaacccatggtgagaagtgtggtatcgatctagagccgaaggacttccccaacaccccttcctccatcggcgtgacatcggccagctcatctgcgacgacgaggcatcttcgaccgacttctcgacaccccatcctccatcaacgcggctccagtaccccttcctccatcggcgcagcagcatccaattcatctacgacgacaaggcatcttcgagcaaccacgccctactacaagtggtgttagtccatctcagataagtggagtaatttgtttgtatctgtatcttctattttatttcttccctaatcctgattaatagcctaatcacgcgacaactaatacatgtcgatttctttccttagccggtgtcatgcgcatgtgagatctagggagaggaagaggaggaagggttgtggggaccgggggtgcaagatggcggattcacctgcaactacaagaaaagaaagagcgagagatttacagaaaccttcagagccacggaggaggaggaggagattaggaggatctctacggcgctgacggattagttaaggaacgaaatatcacatcgtgtccggtaaccagattcagatgtgggcaccatgtgtgggtgcaaggccaggccgaggcgaaagagattcgacgattgagaatacatcaaagaataaaaatgtggaactcggattttcagatgaagagcgtgaccaagaatttcctgattttccatcatttattccattcttacctcctctgagtgcagctaacctaaaggtctactatgccacacgtttcaccatcatagttgggataatggtgttcggtggttttcttgcaccaatcttaaacttggtctaggggcacatcttatgaagactccatccgcagcgttcatctgtcgacgtagttgagaagtgcactcaggttatacatccagtaaagagcaagacatttgaaagcttatgggccaactgtgttgctattgatgcaagcgaaagttggctgatgaattctctatgcctacttctagagtgatgttcaaagaggttgacgctccttcaccatccccagctttgtggaatgggccacaggtagccatttaggatgacaaagccacaagggtgtccttcatcaaggctatgctagaagcctcagacttgtgtatgaggaaaattcataaaaatggtacacagaagctgggaagaaagtggaagaggaatttagcacttgccctctgtcagtcctaatgatgagcgttaagaacaacaccaagtcgggcagcggcaacagaggggatggggccaatgacggaggcggagaggagaacccatcgatttggtggcgtaagtgggagctcatcgaggccgccaccggccggtccacctcttcaataatcgtccttcatcgcccttcagttgacctgagatctagaaggacacaacaggcaagattattacattgtggtgttcgacttcttcagtcaagcagcaatcatgcaacatgccttactgtagttttttatcactgcacatgttgctggataaatttatagactggaggattatagaggactaacaagtgctactgggagattctcgagcaccattgaactaagagattccaaatagttctttggagtctattgttgatgttggcggggataatctagcagagatttgtcagattttttgtgcaacacggaggctacatgaggcagcaacgatcccattcttctcgcatgccactttacacaagctaaggatagcttctggtctcactcatggttgtggcagggaaagccgagtcagtagggtttgtcatgtagctggagttatctcagaccgcatattagatgcagtgatgatgtttacatttaccgtgcaagcaagatgacttatattatgccttaggacaataagtattgttttcactctaatgaaatacttggtaaaaagttgtctctgtagttgtatatttgactgtgaatatttgaacccactattataattgttgctaattgaggtcagatttcagaggccaaataattct

SEQ ID NO: 200693 - DNA, 2983 bp, Zea Mays
taccatgaacctcctcgctgacacgtcgcctcgcccccgagctgacttcctgacgccaccctcgcacaagatcccgatgtggcaatggcgaccagcgacgggcgctcaacgccaccgcgccgcctgcgaacccatggtgagaagtgtggtatcgatctagagccgaaggacttccccaacaccccttcctccatcggcgtgacatcggccagctcatctgcgacgacgaggcatcttcgaccgacttctcgacaccccatcctccatcaacgcggctccagtaccccttcctccatcggcgcagcagcatccaattcatctacgacgacaaggcatcttcgagcaaccacgccctactacaagtggtgttagtccatctcagataagtggagtaatttgtttgtatctgtatcttctattttatttcttccctaatcctgattaatagcctaatcacgcgacaactaatacatgtcgatttctttccttagccggtgtcatgcgcatgtgagatctagggagaggaagaggaggaagggttgtggggaccgggggtgcaagatggcggattcacctgcaactacaagaaaagaaagagcgagagatttacagaaaccttcagagccacggaggaggaggaggagattaggaggatctctacggcgctgacggattagttaaggaacgaaatatcacatcgtgtccggtaaccagattcagatgtgggcaccatgtgtgggtgcaaggccaggccgaggcgaaagagattcgacgattgagaatacatcaaagaataaaaatgtggaactcggattttcagatgaagagcgtgaccaagaatttcctgattttccatcatttattccattcttacctcctctgagtgcagctaacctaaaggtctactatgccacacgtttcaccatcatagttgggataatggtgttcggtggttttcttgcaccaatcttaaacttggtctaggggcacatcttatgaagactccatccgcagcgttcatctgtcgacgtagttgagatgaattctctatgcctacttctagagtgatgttcaaagaggttgacgctccttcaccatccccagctttgtggaatgggccacaggtagccatttaggatgacaaagccacaagggtgtccttcatcaaggctatgctagaagcctcagacttgtgtatgaggaaaattcataaaaatggtacacagaagctgggaagaaagtggaagaggaatttagcacttgccctctgtcagtcctaatgatgagcgttaagaacaacaccaagtcgggcagcggcaacagaggggatggggccaatgacggaggcggagaggagaacccatcgatttggtggcgtaagtgggagctcatcgaggccggtgcgtttgggcagccaccggccggtccacctcttcaataatcgtccttcatcgcccttcagttgacctgagatctagaaggacacaacaggcaaggtggatgtattcgtagttgattatatgttaaaagcaaatttcggatgacattggtggagattgcttatctctaagacacatctactcattctttgaatggaaatcacatccacgttctagaaagtctatttttacttcaaaagtactccttctgttccaaataaattagtgttagcatctctgcactctattgcccacttcccccctcatcggtgttttttattgttgcatatcaattttgtggctcaaatgcccctttgaaacatatagcaccaaaattatcctaattaattaattggtttctaactggctactctatttgcaacaatggggatatataaccttaccatgtctgtttatcacagtgcatcttagattgcatcgtattgtaattgttttagttccttgacatactgtttgtgcaacaggaactgcttgatgtacttacggttgggtatctgtgtagatgtagctgccaagttgtctaaagaaaagttcctgacctttcacatgctgccacattgccacaataccttaagagcttttctatacttctatgatttgtgttttcgagatctgagttatttaaatgttgtctgctattttgaatttttatatgaagatcaaagttctcaagtgataaagtaattaatataacaagcggacaacacatagacaaactaattaatgtagcatatagacgaataaggaatcctgaaacattgaccgtgaagaaaattattgtgcacatatgcactctttctccaaaatttggcatttaatcttattgcaacatacttgtacagaggggcgagggttgttcagtgctttgacatgtgtgcaactattcaagcacaatggttagatgatatccccattcattttagattattacattgtggtgttcgacttcttcagtcaagcagcaatcatgcaacatgccttactgtagttttttatcactgcacatgttgctggataaatttatagactggaggattatagaggactaacaagtgctactgggagattctcgagcaccattgaactaagagattccaaatagttctttggagtctattgttgatgttggcggggataatctagcagagatttgtcagattttttgtgcaacacggaggctacatgaggcagcaacgatcccattcttctcgcatgccactttacacaagctaaggatagcttctggtctcactcatggttgtggcagggaaagccgagtcagtagggtttgtcatgtagctggagttatctcagaccgcatattagatgcagtgatgatgtttacatttaccgtgcaagcaagatgacttatattatgccttaggacaataagtattgttttcactctaatgaaatacttggtaaaaagttgtctctgtagttgtatatttgactgtgaatatttgaacccactattataattgttgctaattgaggtcagatttcagaggccaaataattct

SEQ ID NO: 200694 - DNA, 823 bp, Zea Mays
ctctttaactaaaatagcccatgtggcctttgtcatatttagcggacactatttgcaataatgtgttagatacttctgctactgcccaagaaaaaaaagtaatgcaattgacttgttttattctttgtttacaggatgcaataatataatgcttgcctatttcttttttatatttgcgtacttaggttacatcaaaatatggaaagaagtctttcagttttatattaatcttttcgtttatcctgaaaaaaatgacttccacattttaaggtggcacctaaagcatgtggacatactgaaggaaggaaagtcatatcaagggaggaagctgtcatgcacataaaagctgctgtagatgctaggaaagagagtggctctgacattgttattgtagcaaggacagattctcgccaagctatttctcatgatgaagcattatggagggtgaaagcatttgctgatgctggagcagatgttctatttattgatgcccttgcttcagtagaagagatgaaagcattttgtgcggttgcaccagaagttccaaagatggcaaacatgttagaaggtggtggtaaaactcccatattgagccctgctgaacttgaggaaattggtttcaggcttgtagtatatcctttatccttagttggggtatcaatgcgtgcaatgcaggatgctctagttgcgataaaagacggcggtgtacctccacctagcgtcctgccatcttttcaggagatcaaggatacattgggtttcaaccgctattataaagaagagaaacaataccaagtggaggtacttacaatgcaaggaggat

SEQ ID NO: 200695 - DNA, 1459 bp, Zea Mays
ctttactaatatttgttttggggtgaaggcagagaatagatggagagaagtgactgcatcatttattttccctgccactgcgacaaatgcttcttttatgctgaagaaatactatatgtcactcttatatcattttgagcagctatacttctttagagtgcaaggctggcatcaacaagaaatagattccagaatgaattcttccattgaaattaaaaccgaaggccaagcttaccacaaaagaaaaaggggcatcaacacatcttcagatccagcttcgtcttcagataatgttgacgtagatgtgatagttgatggcaaatttgaacatggctacatagtgactgttattatgggatcgaaatccactaaagcaatcctctataattgcactgaagaacctgctttgccaactccggagccacctgttgcaaataacagcactggtttgaagggtgtacgtcgccgaagacgacgtaggaagaagctaagtacaacggatcccaggcaccccaaaccaaacaggagtggctataatttcttcttccaggatcaacatagaattcttaagccacaatatcctgcacaagacagactgatcagtaaaatgattggtgaacgatggaacaatctaagtcctgaagataaagctgtatatcagcaaagaggtgtagaggataaggagcgataccggacccagttggctgcttataaagaactgaggacaggccaacctatcagcaatgctgtgcctatccaacagaggctccctctgacagaagtgacgattgatgaagtagactccaaggtgagccaagatgatatgctgctgtcaaaccaagggtacagcagtagtgatgaaagtgaccattcaggagagaaaaatgtagaagacgagctcaacactgaaacatcccctgaggtgagcatggaaacaactggttctcctggacaccctgatccctctcgagatggggaccactttgagttgcggcggagagaaaaccccaaggcagatgagaaagataatgcaccacctgattcatgacttttcgctttgaatggtatgtattcgaagatccgaaagagaggaatttccaagaggtgacaagctacactacacatacatacctgttgtcgtaggaacataggctatatgctgatgtcaatcagagttctattagcagttggaatacacttcattttggtagttctgaatttgtattgctaaatttctttcgaattaaaagagagagggggggggggggagggggtactgggtaaattttccatccagggatgggtacttggtatattctttcgttcaatatttatcattacgttgatctatatgttgagtatgtgtaatgtcatgtcagcgaaaatccaaatctgcatatctaattgtagctatacatgcttagtttcatatattataaaagggaaaaagctattcttt

SEQ ID NO: 200696 - DNA, 1621 bp, Zea Mays
aatcgctccttttgcccaaaacctaaagggaagccaaagtgggagcaccaaaatactcgccgcgggtgcatagttgtttgtttagaaggagaagacgaggttaagggtgccgatcattggagggaaagatttggatcttcatcagctatataaggaggtcacatcacggggcggtattgacaaggtgaaggcagagaatagatggagagaagtgactgcatcatttattttccctgccactgcgacaaatgcttcttttatgctgaagaaatactatatgtcactcttatatcattttgagcagctatacttctttagagtgcaaggctggcatcaacaagaaatagattccagaatgaattcttccattgaaattaaaaccgaaggccaagcttaccacaaaagaaaaaggggcatcaacacatcttcagatccagcttcgtcttcagataatgttgacgtagatgtgatagttgatggcaaatttgaacatggctacatagtgactgttattatgggatcgaaatccactaaagcaatcctctataattgcactgaagaacctgctttgccaactccggagccacctgttgcaaataacagcactggtttgaagggtgtacgtcgccgaagacgacgtaggaagaagctaagtacaacggatcccaggcaccccaaaccaaacaggagtggctataatttcttcttccaggatcaacatagaattcttaagccacaatatcctgcacaagacagactgatcagtaaaatgattggtgaacgatggaacaatctaagtcctgaagataaagctgtatatcagcaaagaggtgtagaggataaggagcgataccggacccagttggctgcttataaagaactgaggacaggccaacctatcagcaatgctgtgcctatccaacagaggctccctctgacagaagtgacgattgatgaagtagactccaaggtgagccaagatgatatgctgctgtcaaaccaagggtacagcagtagtgatgaaagtgaccattcaggagagaaaaatgtagaagacgagctcaacactgaaacatcccctgaggtgagcatggaaacaactggttctcctggacaccctgatccctctcgagatggggaccactttgagttgcggcggagagaaaaccccaaggcagatgagaaagataatgcaccacctgattcatgacttttcgctttgaatggtatgtattcgaagatccgaaagagaggaatttccaagaggtgacaagctacactacacatacatacctgttgtcgtaggaacataggctatatgctgatgtcaatcagagttctattagcagttggaatacacttcattttggtagttctgaatttgtattgctaaatttctttcgaattaaaagagagagggggggggggggagggggtactgggtaaattttccatccagggatgggtacttggtatattctttcgttcaatatttatcattacgttgatctatatgttgagtatgtgtaatgtcatgtcagcgaaaatccaaatctgcatatctaattgtagctatacatgcttagtttcatatattataaaagggaaaaagctattcttt

SEQ ID NO: 200697 - DNA, 1804 bp, Zea Mays
aatcgctccttttgcccaaaacctaaagggaagccaaagtgggagcaccaaaatactcgccgcgggtgcatagttgtttgtttagaaggagaagacgaggttaaggggagatgagcgagctggtgcgggcggcggctccggcagctgcggaggaggagaagaaggccgtcgcggctgtgactgtggtggcgaaaggaaaagagaaggcggaggtgacgccgaccgtggaggcctcatcggtcggcgacagggggaggttcgtggcctacccgtcgcgggtggcggagcacacggacgtggtggcggacgccgcgcgcttcagggcggcgctcgaggggctgcacacgcacatgggcaccaggctcaagtgaaggcagagaatagatggagagaagtgactgcatcatttattttccctgccactgcgacaaatgcttcttttatgctgaagaaatactatatgtcactcttatatcattttgagcagctatacttctttagagtgcaaggctggcatcaacaagaaatagattccagaatgaattcttccattgaaattaaaaccgaaggccaagcttaccacaaaagaaaaaggggcatcaacacatcttcagatccagcttcgtcttcagataatgttgacgtagatgtgatagttgatggcaaatttgaacatggctacatagtgactgttattatgggatcgaaatccactaaagcaatcctctataattgcactgaagaacctgctttgccaactccggagccacctgttgcaaataacagcactggtttgaagggtgtacgtcgccgaagacgacgtaggaagaagctaagtacaacggatcccaggcaccccaaaccaaacaggagtggctataatttcttcttccaggatcaacatagaattcttaagccacaatatcctgcacaagacagactgatcagtaaaatgattggtgaacgatggaacaatctaagtcctgaagataaagctgtatatcagcaaagaggtgtagaggataaggagcgataccggacccagttggctgcttataaagaactgaggacaggccaacctatcagcaatgctgtgcctatccaacagaggctccctctgacagaagtgacgattgatgaagtagactccaaggtgagccaagatgatatgctgctgtcaaaccaagggtacagcagtagtgatgaaagtgaccattcaggagagaaaaatgtagaagacgagctcaacactgaaacatcccctgaggtgagcatggaaacaactggttctcctggacaccctgatccctctcgagatggggaccactttgagttgcggcggagagaaaaccccaaggcagatgagaaagataatgcaccacctgattcatgacttttcgctttgaatggtatgtattcgaagatccgaaagagaggaatttccaagaggtgacaagctacactacacatacatacctgttgtcgtaggaacataggctatatgctgatgtcaatcagagttctattagcagttggaatacacttcattttggtagttctgaatttgtattgctaaatttctttcgaattaaaagagagagggggggggggggagggggtactgggtaaattttccatccagggatgggtacttggtatattctttcgttcaatatttatcattacgttgatctatatgttgagtatgtgtaatgtcatgtcagcgaaaatccaaatctgcatatctaattgtagctatacatgcttagtttcatatattataaaagggaaaaagctattcttt

SEQ ID NO: 200698 - DNA, 5120 bp, Zea Mays
aacacatatggctctgtatctccaccccagaacaaccttgggttataacgttatctctttcatcctttctcactctgcctatccgtcccaagtatagtatatacgaggagtatattttcttagagatcgttaacctcatagtaatcgctccttttgcccaaaacctaaagggaagccaaagtgggagcaccaaaatactcgccgcgggtgcatagttgtttgtttagaaggagaagacgaggttaaggtaagcaaagcgcatgatggcatcgcatagcatggcaacttcccttcttcctttacagattcataaaaaaacatatatctttgatgaggggtgactggtgagtgagagcgagaggaggtgggcggccagccggccaccaccacggcaccacctcgtctctcctccacgcgtctctgccgcccgggcgcaggcgacgtcgccacgatgacgacggttccatcgcgtttgtgcaggggagatgagcgagctggtgcgggcggcggctccggcagctgcggaggaggagaagaaggccgtcgcggctgtgactgtggtggcgaaaggaaaagagaaggcggaggtgacgccgaccgtggaggcctcatcggtcggcgacagggggaggttcgtggcctacccgtcgcgggtggcggagcacacggacgtggtggcggacgccgcgcgcttcagggcggcgctcgaggggctgcacacgcacatgggcaccaggctcaacctaccccaacttgcttgggacaaaatgctatgttgttgttatttaaatatggaagtgagaacacagaaaagggacaaatggagtattgaacaaccaggatgtcatatgtcagcaaaagaactgtggagtattgaacaatgaggatgtcttttgtcagcaaaagaactgatttgtcctacttggcttgctttgtgagattattgcagattgcaatacaatgtaaagtttatttggcttcaagcttagtgttgttttcattgaaatgtatggccatccgatttttttctctcgaacacgcaggagagctgcacatcatttaatttagagaagaaaaaggtccaaaatggaccaagatacaaagcctaaaaaggcaagataaaacacacccactcacaacctgccttgcaacaacgctgcagcctccactattactgagaaatcagcaggacaacaaaggccacagcgaaaaaactgcaggcagaccccactctccacaaacactacgccctgaccatattaagggcaacctctaggcctaaattctcaagatgtttagctccaaccttactccaacacgccaactcatctaaaaaaacacttcaaactgtgcttaaagtagggttatgtccattgaagactgccttgttacagtgaacccataggcaccaggcccccagaatgatgatgatgttcataccctttcgcttgcttctgtgcaccttcttacatattttctgcaaaggcgatctcatcactagacggagagaaattaccaaaccccaagggcgaaaggatggtatgccaaaattgtcttgcaaaaatgcatgtgcacaggagatgttggacggattcctgcacgtggtcacataatggacaagactccgggtgatccaaacctctcctttccagtctatcagaagtccaacatttattccatattgccagccaaaggaaatatttgcattttggaggagcccaagacttccacagcctcccctatggctcaaaggtaatggatcccatgaaaaaggccttgtaacatgacttggaagtgaactggtcagaggaggtatgcagccacacatgtctatcagcttcatgtgttaacaccactcttcttatagcatcccataaatgcaagaattgttgcaccccaatcaaagaaagaggggtctcgatgtcactgacccactgccggctttcaataagcctgagcacagttctagtgcaaagagcgctcttaccgaccttagaggcaactgcgggggcaatgtccttggcgcaaccaccatctatccgaccaaaataaagtattggtcccatttccaatcacaataataatcgatgatgcaaagaacttcctgacttgtttcggtataggaaagtttagcccatgccaaggtctgttagggtctgttttctccaaccacaaccatttagcttgcagtgcccagctctggaaatataagttaggaaccccaaatccaccaagctttagtggccttgtaatgatatcccaagagactacaatttcctccattcatgtcatttccccctttccataaaaatcctcttcgaatcttgtcaatcaacttaatcacccacttagggatatccatggcaatgaggagataaattaggatggctaacataacaaaccacaccatagtcgtccttccagcaagattaagcagtcgagcctttcaattaggaagtcgatctgcaatctttcaaaccaagccatggggtctatccttcttagttttttgtctgaaatcagaagccccaaataggagcaaggaaaagaagctgagctgcaatgtagaatgttgcagccctcctacacagcctgctcgctacaccttatcggaatggcacaactcttatgcatattagatacccaaccagaaactgagccaaaacaatccaagatcattttaacacaattcagatcttcctcaaaaggctgaataaaaaggaccacatcatcagcatagctggaaagtctgttccgaacattttctccctgcagactctgaagcagccccctattttcagccaacaaaaatagactgctgaggagtgaggacatcataatcaatataaacaacataggagatagaggatccccctgacgaagtcctctccgatgactgataagattaccaggagacccattcaaaagcacttgagtggaagaagaggccaacagatatgaaatcagattacaccaattaggtccaaaaccaaggtgagaaagcacctcaataagaaaagctcaatagatcgagtcaaaagctttcgaaatgtccaacaactttctggacacagaaaataccgcaactaagtttttgtttttttaaaaaatggcttgcatgttaggcaaagttacttaaagttgtctacctgaatagttaatactatgccatctaattttttttctggaatacgcaggagagctgcgcatctttgtattaatagaagaaaagaaaaggggggggggggggagaaccccaatacaacacacacaccactagagactaactacggatcaccgactaaaacatggaagaaacacgacccacaccgctgttttaagccagcaactcatcgacttggaggaaggacaaggccttggcaccagtcatggaccagagcaccgcctcttccctagccatcctaatggccatgaccaagttgggattacaaccatcaaaaacacacctattcctatgcttccaaatggtccaagcacctagaatcactaaagaattgcatctgagttgcattcataattttctttagttttattaattgccatgcttcatctggttcatttataacccttttttgggggtaagggtgccgatcattggagggaaagatttggatcttcatcagctatataaggaggtcacatcacggggcggtattgacaaggtgaaggcagagaatagatggagagaagtgactgcatcatttattttccctgccactgcgacaaatgcttcttttatgctgaagaaatactatatgtcactcttatatcattttgagcagctatacttctttagagtgcaaggctggcatcaacaagaaatagattccagaatgaattcttccattgaaattaaaaccgaaggccaagcttaccacaaaagaaaaaggggcatcaacacatcttcagatccagcttcgtcttcagataatgttgacgtagatgtgatagttgatggcaaatttgaacatggctacatagtgactgttattatgggatcgaaatccactaaagcaatcctctataattgcactgaagaacctgctttgccaactccggagccacctgttgcaaataacagcactggtttgaagggtgtacgtcgccgaagacgacgtaggaagaagctaagtacaacggatcccaggcaccccaaaccaaacaggagtggctataatttcttcttccaggatcaacatagaattcttaagccacaatatcctgcacaagacagactgatcagtaaaatgattggtgaacgatggaacaatctaagtcctgaagataaagctgtatatcagcaaagaggtgtagaggataaggagcgataccggacccagttggctgcttataaagaactgaggacaggccaacctatcagcaatgctgtgcctatccaacagaggctccctctgacagaagtgacgattgatgaagtagactccaaggtgagccaagatgatatgctgctgtcaaaccaagggtacagcagtagtgatgaaagtgaccattcaggagagaaaaatgtagaagacgagctcaacactgaaacatcccctgaggtgagcatggaaacaactggttctcctggacaccctgatccctctcgagatggggaccactttgagttgcggcggagagaaaaccccaaggcagatgagaaagataatgcaccacctgattcatgacttttcgctttgaatggtatgtattcgaagatccgaaagagaggaatttccaagaggtgacaagctacactacacatacatacctgttgtcgtaggaacataggctatatgctgatgtcaatcagagttctattagcagttggaatacacttcattttggtagttctgaatttgtattgctaaatttctttcgaattaaaagagagagggggggggggggagggggtactgggtaaattttccatccagggatgggtacttggtatattctttcgttcaatatttatcattacgttgatctatatgttgagtatgtgtaatgtcatgtcagcgaaaatccaaatctgcatatctaattgtagctatacatgcttagtttcatatattataaaagggaaaaagctattcttt

SEQ ID NO: 200699 - DNA, 2029 bp, Zea Mays
cggtaacacatatggctctgtatctccaccccagaacaaccttgggttataacgttatctctttcatcctttctcactctgcctatccgtcccaagtatagtatatacgaggagtatattttcttagagatcgttaacctcatagtaatcgctccttttgcccaaaacctaaagggaagccaaagtgggagcaccaaaatactcgccgcgggtgcatagttgtttgtttagaaggagaagacgaggttaaggggagatgagcgagctggtgcgggcggcggctccggcagctgcggaggaggagaagaaggccgtcgcggctgtgactgtggtggcgaaaggaaaagagaaggcggaggtgacgccgaccgtggaggcctcatcggtcggcgacagggggaggttcgtggcctacccgtcgcgggtggcggagcacacggacgtggtggcggacgccgcgcgcttcagggcggcgctcgaggggctgcacacgcacatgggcaccaggctcaaggtgccgatcattggagggaaagatttggatcttcatcagctatataaggaggtcacatcacggggcggtattgacaaggtgaaggcagagaatagatggagagaagtgactgcatcatttattttccctgccactgcgacaaatgcttcttttatgctgaagaaatactatatgtcactcttatatcattttgagcagctatacttctttagagtgcaaggctggcatcaacaagaaatagattccagaatgaattcttccattgaaattaaaaccgaaggccaagcttaccacaaaagaaaaaggggcatcaacacatcttcagatccagcttcgtcttcagataatgttgacgtagatgtgatagttgatggcaaatttgaacatggctacatagtgactgttattatgggatcgaaatccactaaagcaatcctctataattgcactgaagaacctgctttgccaactccggagccacctgttgcaaataacagcactggtttgaagggtgtacgtcgccgaagacgacgtaggaagaagctaagtacaacggatcccaggcaccccaaaccaaacaggagtggctataatttcttcttccaggatcaacatagaattcttaagccacaatatcctgcacaagacagactgatcagtaaaatgattggtgaacgatggaacaatctaagtcctgaagataaagctgtatatcagcaaagaggtgtagaggataaggagcgataccggacccagttggctgcttataaagaactgaggacaggccaacctatcagcaatgctgtgcctatccaacagaggctccctctgacagaagtgacgattgatgaagtagactccaaggtgagccaagatgatatgctgctgtcaaaccaagggtacagcagtagtgatgaaagtgaccattcaggagagaaaaatgtagaagacgagctcaacactgaaacatcccctgaggtgagcatggaaacaactggttctcctggacaccctgatccctctcgagatggggaccactttgagttgcggcggagagaaaaccccaaggcagatgagaaagataatgcaccacctgattcatgacttttcgctttgaatggtatgtattcgaagatccgaaagagaggaatttccaagaggtgacaagctacactacacatacatacctgttgtcgtaggaacataggctatatgctgatgtcaatcagagttctattagcagttggaatacacttcattttggtagttctgaatttgtattgctaaatttctttcgaattaaaagagagagggggggggggggagggggtactgggtaaattttccatccagggatgggtacttggtatattctttcgttcaatatttatcattacgttgatctatatgttgagtatgtgtaatgtcatgtcagcgaaaatccaaatctgcatatctaattgtagctatacatgcttagtttcatatattataaaagggaaaaagctattcttt

SEQ ID NO: 200700 - DNA, 2354 bp, Zea Mays
atcgtggggggcgcgggcggaggagagcgtggcgagggccgagagcagcgcgcggccgggtcacgcaacgcgccccacgtactgccctccccctccgcgcgcgctagaaataccgaggcctggaccggggggggccccgtcacatccatccatcgaccgatcgatcgccacagccaacaccacccgccgaggcgacgcgacagccgccaggaggaaggaataaactcactgccagccagtgaagggggagaagtgtactgctccgtccaccagtgcgcgcaccgcccggcagggctgctcatctcgtcgacgaccagtggattaatcggcatggcggctctagccacgtcgcagctcgtcgcaacgcgcgccggcctgggcgtcccggacgcgtccacgttccgccgcggcgccgcgcagggcctgagggggggccggacggcgtcggcggcggacacgctcagcatgcggaccagcgcgcgcgcggcgcccaggctccagcaccagcagcagcagcaggcgcgccgcggggccaggttcccgtcgctcgtcgtgtgcgccagcgccggcatgaacgtcgtcttcgtcggcgccgagatggcgccgtggagcaagaccggcggcctcggcgacgtcctcggcggcctgccgccggccatggccgcgaatgggcaccgtgtcatggtcgtctctccccgctacgaccagtacaaggacgcctggaacggactacagggacaaccagctgcggttcagcctgctatgccaggcagcacttgaagctccaaggatcctgagcctcaacaacaacccatacttctccggaccatacggggaggacgtcgtgttcgtctgcaacgactggcacaccggccctctctcgtgctacctcaagagcaactaccagtcccacggcatctacagggacgcaaagaccgctttctgcatccacaacatctcctaccagggccggttcgccttctccgactacccggagctgaacctcccggagagattcaagtcgtccttcgatttcatcgacggctacgagaagcccgtggaaggccggaagatcaactggatgaaggccgggatcctcgaggccgacagggtcctcaccctcgacaacatcatgcgcctcaccggcatcaccggcatcgtcaacggcatggacgtcagcgagtgggaccccagcagggacaagtacatcgccgtgaagtacgacgtgtcgacggccgtggaggccaaggcgctgaacaaggaggcgctgcaggcggaggtcgggctcccggtggaccggaacatcccgctggtggcgttcatcggcaggctggaagagcagaagggacccgacgtcatggcggccgccatcccgcagctcatggagatggtggaggacgtgcagatcgttctgctgggcacgggcaagaagaagttcgagcgcatgctcatgagcgccgaggagaagttcccaggcaaggtgcgcgccgtggtcaagttcaacgcggcgctggcgcaccacatcatggccggcgccgacgtgctcgccgtcaccagccgcttcgagccctgcggcctcatccagctgcaggggatgcgatacggaacgccctgcgcctgcgcgtccaccggtggactcgtcgacaccatcatcgaaggcaagaccgggttccacatgggccgcctcagcgtcgactgcaacgtcgtggagccggcggacgtcaagaaggtggccaccaccttgcagcgcgccatcaaggtggtcggcacgccggcgtacgaggagatggtgaggaactgcatgatccaggatctctcctggaagggccctgccaagaactgggagaacgtgctgctcagcctcggggtcgccggcggcgagccaggggtcgaaggcgaggagatcgcgccgctcgccaaggagaacgtggccgcgccctgaagagttcggcctgcaggccccctgatctcgcgcgtggtgcaaacatgttgggacatcttcttatatatgctgtttcgtttatgtgatatggacaagtatgtgtagctgcttgcttgtgctagtgtaatatagtgtagtggtggccagtggcacaacctaataagcgcatgaactaatttgcttgcgtgtgtagttaagtaccgatcggtaatttttatattgcgagtaaataaatggacctgtagtggtggagtaaataatccctgctgttcggtgttcttatcgcttctcgtatagatgttatatagagtacattttctttctgaatcctacgtttttcaagtgtttttgaattaattcctgtgaaatttctatatcattcgtgtaaaatttctgggttccaaaaaagatc

SEQ ID NO: 200701 - DNA, 2183 bp, Zea Mays
gtatcgtggggggcgcgggcggaggagagcgtggcgagggccgagagcagcgcgcggccgggtcacgcaacgcgccccacgtactgccctccccctccgcgcgcgctagaaataccgaggcctggaccggggggggccccgtcacatccatccatcgaccgatcgatcgccacagccaacaccacccgccgaggcgacgcgacagccgccaggaggaaggaataaactcactgccagccagtgaagggggagaagtgtactgctccgtccaccagtgcgcgcaccgcccggcagggctgctcatctcgtcgacgaccagtacaaggacgcctgggacaccagcgtcgtgtccgagatcaagatgggagacaggtacgagacggtcaggttcttccactgctacaagcgcggagtggaccgcgtgttcgttgaccacccactgttcctggagagggtttggggaaagaccgaggagaagatctacgggcctgacgctggaacggactacagggacaaccagctgcggttcagcctgctatgccaggcagcacttgaagctccaaggatcctgagcctcaacaacaacccatacttctccggaccatacggggaggacgtcgtgttcgtctgcaacgactggcacaccggccctctctcgtgctacctcaagagcaactaccagtcccacggcatctacagggacgcaaagaccgctttctgcatccacaacatctcctaccagggccggttcgccttctccgactacccggagctgaacctcccggagagattcaagtcgtccttcgatttcatcgacggctacgagaagcccgtggaaggccggaagatcaactggatgaaggccgggatcctcgaggccgacagggtcctcaccgtcagcccctactacgccgaggagctcatctccggcatcgccaggggctgcgagctcgacaacatcatgcgcctcaccggcatcaccggcatcgtcaacggcatggacgtcagcgagtgggaccccagcagggacaagtacatcgccgtgaagtacgacgtgtcgacggccgtggaggccaaggcgctgaacaaggaggcgctgcaggcggaggtcgggctcccggtggaccggaacatcccgctggtggcgttcatcggcaggctggaagagcagaagggacccgacgtcatggcggccgccatcccgcagctcatggagatggtggaggacgtgcagatcgttctgctgggcacgggcaagaagaagttcgagcgcatgctcatgagcgccgaggagaagttcccaggcaaggtgcgcgccgtggtcaagttcaacgcggcgctggcgcaccacatcatggccggcgccgacgtgctcgccgtcaccagccgcttcgagccctgcggcctcatccagctgcaggggatgcgatacggaacgccctgcgcctgcgcgtccaccggtggactcgtcgacaccatcatcgaaggcaagaccgggttccacatgggccgcctcagcgtcgactgcaacgtcgtggagccggcggacgtcaagaaggtggccaccaccttgcagcgcgccatcaaggtggtcggcacgccggcgtacgaggagatggtgaggaactgcatgatccaggatctctcctggaagggccctgccaagaactgggagaacgtgctgctcagcctcggggtcgccggcggcgagccaggggtcgaaggcgaggagatcgcgccgctcgccaaggagaacgtggccgcgccctgaagagttcggcctgcaggccccctgatctcgcgcgtggtgcaaacatgttgggacatcttcttatatatgctgtttcgtttatgtgatatggacaagtatgtgtagctgcttgcttgtgctagtgtaatatagtgtagtggtggccagtggcacaacctaataagcgcatgaactaatttgcttgcgtgtgtagttaagtaccgatcggtaatttttatattgcgagtaaataaatggacctgtagtggtggagtaaataatccctgctgttcggtgttcttatcgcttctcgtatagatgttatatagagtacattttctttctgaatcctacgtttttcaagtgtttttgaattaattcctgtgaaatttctatatcattcgtgtaaaatttctgggttccaaaaaagatc

SEQ ID NO: 200702 - DNA, 783 bp, Zea Mays
ctttgatgcttataaatcttgtttcctctatcctctagattgatggaaaagctgctttgctaggatttgtgggggccccatggacaattgcaacttacattgttgaaggggggatgaccaacacgtacacaaatataaagagcatgtgccatacagctccagatgtcttgaagggtcttctctctcaccttgcacaagccatatctgactatatcatttaccaagttaactcgggggcccagtgtatacagatatttgattcatggggtggacagcttccacctcatgtgtgggagcagtggtcaaaaccatatatcaaacagggttgtgaaagcagctggtccaaaaggtcatatacttaatctgggccatggtgtacttcagaaaacacccgaagaagctgtagcacatttctttgatgtcacaaggcgcttgagatatgacacccttttccaaggttctgttgctgaagaattgcatcacgttgcttgacaacggcaatgacattcccatttttcatcaagtggtgtatttgatctgtcatatcatcttagagtcgtagtagattcctagtgttgcctgcattctacctttcaagagagactcattttcttaagcctgtatatgtattgcagagataccggcggcaaatctagtgcaattttattcattgtttgttcgttccattattcatctggctgaagaagggatgcatgatgaccctggtttggtttcaatgattaatgacaatataaattattatagttaatgtatgttttacag

SEQ ID NO: 200703 - DNA, 767 bp, Zea Mays
tttcctctatcctctagattgatggaaaagctgctttgctaggatttgtgggggccccatggacaattgcaacttacattgttgaaggggggatgaccaacacgtacacaaatataaagagcatgtgccatacagctccagatgtcttgaagggtcttctctctcaccttgcacaagccatatctgactatatcatttaccaagttaactcgggggcccagtgtatacagatatttgattcatggggtggacagcttccacctcatgtgtgggagcagtggtcaaaaccatatatcaaacagattgtgagtaggattaagaaagagtgccctaatgtaccccttgtgttgtatataaatggaaatggaggtttacttgagcgcatgaagaacacaggagttgatgttattgggcttgactggacagtggacatgactgatggaaggaggcgccttggtaatggcattagtgtacaagggaatgtggatccagcatttttgttctcaccattaccagtactgactgatgaaattcatagatacggtgcactgggcaagacactcatagaggcttcaaatacttgtactcggttttcaaagactcggtattcaaagatgatgtaaattatcggatatgtttggtgcaccattggacaggttatcaaacatgttatttagagaggtttgtaattatactacttatcgatgtatttggtatgcacattggatactacgtacagtaatggccagaacttgtcgttgggaagg

SEQ ID NO: 200704 - DNA, 673 bp, Zea Mays
tttcctctatcctctagattgatggaaaagctgctttgctaggatttgtgggggccccatggacaattgcaacttacattgttgaaggggggatgaccaacacgtacacaaatataaagagcatgtgccatacagctccagatgtcttgaagggtcttctctctcaccttgcacaagccatatctgactatatcatttaccaagttaactcgggggcccagtgtatacagatatttgattcatggggtggacagcttccacctcatgtgtgggagcagtggtcaaaaccatatatcaaacaggagttgatgttattgggcttgactggacagtggacatgactgatggaaggaggcgccttggtaatggcattagtgtacaagggaatgtggatccagcatttttgttctcaccattaccagtactgactgatgaaattcatagatacggtgcactgggcaagacactcatagaggcttcaaatacttgtactcggttttcaaagactcggtattcaaagatgatgtaaattatcggatatgtttggtgcaccattggacaggttatcaaacatgttatttagagaggtttgtaattatactacttatcgatgtatttggtatgcacattggatactacgtacagtaatggccagaacttgtcgttgggaagg

SEQ ID NO: 200705 - DNA, 1793 bp, Zea Mays
ataacggctcgtcggccctccacgcaaacgaaatccagcagaccgacgcgaaccgagaaaaatcccacgaaatctcgtggccgcggcgaccggaagaagaggacgacgacggacggagcggcgatggcgtgccgcgcacttgccctccgctccctgctcctccccgacccgctacaccgcctcccggccgcggcgccacctgtttggagagcgtcccgcggtggccgccgtccgcacctccgctgctgctccggcggcgggggcggggagcccgggcagccgccgcaagaagctgtgctcgaggccatatccaagatagcaaggtctaaaggaagggttgcactcacaacaaatatggtcatgggtggtactgtgactgacgatgcaagtgatgaatggcttgttctggatcagaaggtaaattcctaccccacagatagaggatttacagcaattggcactggaggtgatgattttgtccagtcaatggtagttgctgttgaatctgttcttcaagaatcaattcccaagggccgggtatctcagaaattatcttcaagagggaaatatgtttctgtaaacattgggccaattcgtgttgtttctagtgagcaggtccaagctgtgtatcgtgccatgagaagagataacaggatgaaatacttcttatgaagtgcaatttcatgtcctggatgttccctagtccattccatgttgtatcctacgatgcattttcgccatatttatgcaggctggacctccggtgaattccaatgacttttatgtgccattcaagcccaaattgaagcttctctactacaaaacaatatgttgggtccagctacgttatttagtgcagggggcgtatatagctactatgtattccctttcttctataatgaataagattcaaaggtgcttgcaagcaataactgtcaaatccaagagatatcctctacaaaaggaaaggagataaggatacagcttcttttgccaacgttcctaatatatctgaaaatttctaggaacttgtttattatgggacggatggagtatgttaaagatgtatgttagtgtttcatattacatgtgttttactattttataaacagtatgaatagtagtataagtgctcctaaattatcgatgtgtgtcttcaattccaagagactattttttactctctatttgactctttatttacctctctataaagattaaaccctatatatagtatcttattcgaacagactttctaacagacaaattagtttagctagtcagagtgggtagctaagtttggctagagagaggaccaatttggagagccagatagcttagggagttggatggttagactgttggagagttattttattgttaaataaacaatttagcttgacgagtcatttggttagtctcttggagttgctcttcctaccttaaaagcctactaaaaggtaccatctactagttctttaatattatcttcggtggatcgtgtaaaatatgagacattgtactataaatgacactgtttgcagagtgaagtttaaaatatgtgatgagataggtatagataggggatctactggaaatggcataagtaactccctaaaggcttgtttagatcccatgtgcgctaacgtttatcacaccttgaaaagctaaattattattgggtgctaaagtttagaactcatgtttggaccttcaaatgctaaagtttagctaaagtgtagggctaaacataatcactatggattcaaacagactctaaatcttaaatttta

SEQ ID NO: 200706 - DNA, 1756 bp, Zea Mays
gggaaataacggctcgtcggccctccacgcaaacgaaatccagcagaccgacgcgaaccgagaaaaatcccacgaaatctcgtggccgcggcgaccggaagaagaggacgacgacggacggagcggcgatggcgtgccgcgcacttgccctccgctccctgctcctccccgacccgctacaccgcctcccggccgcggcgccacctgtttggagagcgtcccgcggtggccgccgtccgcacctccgctgctgctccggcggcgggggcggggagcccgggcagccgccgcaagaagctgtgctcgaggccatatccaagatagcaaggtctaaaggaagggttgcactcacaacaaatatggtcatgggtggtactgtgactgacgatgcaagtgatgaatggcttgttctggatcagaaggtaaattcctaccccacagatagaggatttacagcaattggcactggaggtgatgattttgtccagtcaatggtagttgctgttgaatctgttcttcaagaatcaattcccaagggccgggtatctcagaaattatcttcaagagggaaatatgtttctgtaaacattgggccaattcgtgttgtttctagtgagcaggtccaagctgtgtatcgtgccatgagaagagataacaggatgaaatacttcttatgaagtgcaatttcatgtcctggatgttccctagtccattccatgttgtatcctacgatgcattttcgccatatttgctggacctccggtgaattccaatgacttttatgtgccattcaagcccaaattgaagcttctctactacaaaacaatatgttgggtccagctacgttatttagtgcagggggcgtatatagctactatgtgcttgcaagcaataactgtcaaatccaagagatatcctctacaaaaggaaaggagataaggatacagcttcttttgccaacgttcctaatatatctgaaaatttctaggaacttgtttattatgggacggatggagtatgttaaagatgtatgttagtgtttcatattacatgtgttttactattttataaacagtatgaatagtagtataagtgctcctaaattatcgatgtgtgtcttcaattccaagagactattttttactctctatttgactctttatttacctctctataaagattaaaccctatatatagtatcttattcgaacagactttctaacagacaaattagtttagctagtcagagtgggtagctaagtttggctagagagaggaccaatttggagagccagatagcttagggagttggatggttagactgttggagagttattttattgttaaataaacaatttagcttgacgagtcatttggttagtctcttggagttgctcttcctaccttaaaagcctactaaaaggtaccatctactagttctttaatattatcttcggtggatcgtgtaaaatatgagacattgtactataaatgacactgtttgcagagtgaagtttaaaatatgtgatgagataggtatagataggggatctactggaaatggcataagtaactccctaaaggcttgtttagatcccatgtgcgctaacgtttatcacaccttgaaaagctaaattattattgggtgctaaagtttagaactcatgtttggaccttcaaatgctaaagtttagctaaagtgtagggctaaacataatcactatggattcaaacagactctaaatcttaaatttta

SEQ ID NO: 200707 - DNA, 1808 bp, Zea Mays
ctgccttggtgtttttcttctcccgttcaagtcgcgtgccactttcttctctcgttcacctcgcgtgcgcgaaccaactagggcgaccgctgccgccctacggcctacgcccagctgctcaggtcttattcgggcctttggcggcgagaaccgaccccgccaggataatggctcaccgtggacacctagatggactgactgcccaagctccagcactgatgcgccatggttccttcgctgcaggcagcctttctagccactcacctttggagtcttcatctacactggagatgctggagaacaagcttgccatgcagactgcagaagtggaaaagcttatcatggagaatcagcggttagcatcaagccatgtggtcttgaggcaggacattgttgatacagagaaagagatgcaaataatccgcacccacctaggtgaagttcagacagagactgatttgcatattagagatttattggagagaattagattaatggaggcagacatacatagtggtgatgcggtgaagaaggagcttcatcaagtgcatatggaggcaaagagacttattactgaaaggcagatgctgacccttgagacagaggatgtgaataaagaattacagaaactctctgcctctggtgacagtaaaagccttcctgaattgctagctgagctagatgggctaaggaaagagcatcttaatttacgatctcaatttgaatttgagaaaaatacaaacatcaagcaagttgagcagatgcggacaatggaaatgaacttgatgaccatgactaaacaagctgagaagttacgaggtgatgtggcaaatgctgaaagacgggcacaggcagctgtggctaaagcaacagggcatgcagctggtgcacaggtgacagcttcacagcctgggacagctcaagctacagcggttccagcagcagctacagacccatatgcaggtgcatatgccagttacccccctgcatatcagcagggagcccaggctggggcatatcagcagggagcccaggctggggcgtaccagcagggagcccaggctggggcgtaccaacagggagcccaagctggggcgtaccaacagggagcccaagctgggacatatcagcaaggaaaccaggctggagcatatccctatgcttatgatgctgccacggcttacacatatgcaggttattctggctatccagttgcaggctatgcgcaaagtgcagtgcccaattattcctatgctgcacctccacagccaataagcagtggtgcagctacagacgccgcaagcctgtatggtgccgttggtagcgccggatatcctactgcgcaagttcagccgagcagtggccctgcaaatgcagcgccaccacctccaccaccaccggcagcaccatatccaagcacatatgaccaaaccagaggagcccagaggtgaaatctgggatgtaaaccagatggctgtttgccatgcacatttgttgagcagacaaatatagactctgtcatgccccatttgtagactgattactggttcagttatgtagatccagttacgggtagattaatttacatcacgacggaagagttgatgtatgcgtaactgtgttggtacttgggttgatcggagcaatgcggcattaaaccacaaaatagtgtagtgtcgttgttctctattcttttataccatttattttcaagtatagtgtaggactgtaggtcatggtttgtgcatatgctgatgtagtcaggtctggctcaatggcttcctagagaattgttttgtgtcacgagg

SEQ ID NO: 200708 - DNA, 1818 bp, Zea Mays
ctgccttggtgtttttcttctcccgttcaagtcgcgtgccactttcttctctcgttcacctcgcgtgcgcgaaccaactagggcgaccgctgccgccctacggcctacgcccagctgctcaggtcttattcgggcctttggcggcgagaaccgaccccgccaggcagcctttctagccactcacctttggagtcttcatctacactggagatgctggagaacaagcttgccatgcagactgcagaagtggaaaagcttatcatggagaatcagcggttagcatcaagccatgtggtcttgaggcaggacattgttgatacagagaaagagatgcaaataatccgcacccacctaggtgaagttcagacagagactgatttgcatattagagatttattggagagaattagattaatggaggcagacatacatagtggtgatgcggtgaagaaggagcttcatcaagtgcatatggaggcaaagagacttattactgaaaggcagatgctgacccttgagacagaggatgtgaataaagaattacagaaactctctgcctctggtgacagtaaaagccttcctgaattgctagctgagctagatgggctaaggaaagagcatcttaatttacgatctcaatttgaatttgagaaaaatacaaacatcaagcaagttgagcagatgcggacaatggaaatgaacttgatgaccatgactaaacaagctgagaagttacgaggtgatgtggcaaatgctgaaagacgggcacaggctgtggctaaagcaacagggcatgcagctggtgcacaggtgacagcttcacagcctgggacagctcaagctacagcggttccagcagcagctacagacccatatgcaggtgcatatgccagttacccccctgcatatcagcagggagcccaggctggggcatatcagcagggagcccaggctgggacgtaccagcagggagcgggaacccaggctggggggtaccagcaaggagcccaggctggggcgtaccagcagggagcgggagcccaggctggggcgtaccagcagggagcccaggctggggcgtaccaacagggagcccaagctggggcgtaccaacagggagcccaagctgggacatatcagcaaggaaaccaggctggagcatatccctatgcttatgatgctgccacggcttacacatatgcaggttattctggctatccagttgcaggctatgcgcaaagtgcagtgcccaattattcctatgctgcacctccacagccaataagcagtggtgcagctacagacgccgcaagcctgtatggtgccgttggtagcgccggatatcctactgcgcaagttcagccgagcagtggccctgcaaatgcagcgccaccacctccaccaccaccggcagcaccatatccaagcacatatgaccaaaccagaggagcccagaggtgaaatctgggatgtaaaccagatggctgtttgccatgcacatttgttgagcagacaaatatagactctgtcatgccccatttgtagactgattactggttcagttatgtagatccagttacgggtagattaatttacatcacgacggaagagttgatgtatgcgtaactgtgttggtacttgggttgatcggagcaatgcggcattaaaccacaaaatagtgtagtgtcgttgttctctattcttttataccatttattttcaagtatagtgtaggactgtaggtcatggtttgtgcatatgctgatgtagtcaggtctggctcaatggcttcctagagaattgttttgtgtcacgagg

SEQ ID NO: 200709 - DNA, 1754 bp, Zea Mays
ctgccttggtgtttttcttctcccgttcaagtcgcgtgccactttcttctctcgttcacctcgcgtgcgcgaaccaactagggcgaccgctgccgccctacggcctacgcccagctgctcaggtcttattcgggcctttggcggcgagaaccgaccccgccaggataatggctcaccgtggacacctagatggactgactgcccaagctccagcactgatgcgccatggttccttcgctgcaggcagcctttctagccactcacctttggagtcttcatctacactggagatgctggagaacaagcttgccatgcagactgcagaagtggaaaagcttatcatggagaatcagcggttagcatcaagccatgtggtcttgaggcaggacattgttgatacagagaaagagatgcaaataatccgcacccacctaggtgaagttcagacagagactgatttgcatattagagatttattggagagaattagattaatggaggcagacatacatagtggtgatgcggtgaagaaggagcttcatcaagtgcatatggaggcaaagagacttattactgaaaggcagatgctgacccttgagacagaggatgtgaataaagaattacagaaactctctgcctctggtgacagtaaaagccttcctgaattgctagctgagctagatgggctaaggaaagagcatcttaatttacgatctcaatttgaatttgagaaaaatacaaacatcaagcaagttgagcagatgcggacaatggaaatgaacttgatgaccatgactaaacaagctgagaagttacgaggtgatgtggcaaatgctgaaagacgggcacaggcagctgtggctaaagcaacagggcatgcagctggtgcacaggtgacagcttcacagcctgggacagctcaagctacagcggttccagcagcagctacagacccatatgcaggtgcatatgccagttacccccctgcatatcagcagggagcccaggctggggcgtaccaacagggagcccaagctggggcgtaccaacagggagcccaagctgggacatatcagcaaggaaaccaggctggagcatatccctatgcttatgatgctgccacggcttacacatatgcaggttattctggctatccagttgcaggctatgcgcaaagtgcagtgcccaattattcctatgctgcacctccacagccaataagcagtggtgcagctacagacgccgcaagcctgtatggtgccgttggtagcgccggatatcctactgcgcaagttcagccgagcagtggccctgcaaatgcagcgccaccacctccaccaccaccggcagcaccatatccaagcacatatgaccaaaccagaggagcccagaggtgaaatctgggatgtaaaccagatggctgtttgccatgcacatttgttgagcagacaaatatagactctgtcatgccccatttgtagactgattactggttcagttatgtagatccagttacgggtagattaatttacatcacgacggaagagttgatgtatgcgtaactgtgttggtacttgggttgatcggagcaatgcggcattaaaccacaaaatagtgtagtgtcgttgttctctattcttttataccatttattttcaagtatagtgtaggactgtaggtcatggtttgtgcatatgctgatgtagtcaggtctggctcaatggcttcctagagaattgttttgtgtcacgagg

SEQ ID NO: 200710 - DNA, 1613 bp, Zea Mays
aaactgtaaacagcccagaaggaaaatgattgcttcctgccttggtgtttttcttctcccgttcaagtcgcgtgccactttcttctctcgttcacctcgcgtgcgcgaaccaactagggcgaccgctgccgccctacggcctacgcccagctgctcaggtcttattcgggcctttggcggcgagaaccgaccccgccaggataatggctcaccgtggacacctagatggactgactgcccaagctccagcactgatgcgccatggttccttcgctgcaggcagcctttctagccactcacctttggagtcttcatctacactggagatgctggagaacaagcttgccatgcagactgcagaagtggaaaagcttatcatggagaatcagcggttagcatcaagccatgtggtcttgaggcaggacattgttgatacagagaaagagatgcaaataatccgcacccacctaggtgaagttcagacagagactgatttgcatattagagatttattggagagaattagattaatggaggcagacatacatagtggtgatgcggtgaagaaggagcttcatcaagtgcatatggaggcaaagagacttattactgaaaggcagatgctgacccttgagacagaggatgtgaataaagaattacagaaactctctgcctctggtgacagtaaaagccttcctgaattgctagctgagctagatgggctaaggaaagagcatcttaatttacgatctcaatttgaatttgagaaaaatacaaacatcaagcaagttgagcagatgcggacaatggaaatgaacttgatgaccatgactaaacaagctgagaagttacgaggtgatgtggcaaatgctgaaagacgggcacaggcagctgtggctaaagcaacagggcatgcagctggtgcacaggtgacagcttcacagcctgggacagctcaagctacagcggttccagcagcagctacagacccatatgcaggttattctggctatccagttgcaggctatgcgcaaagtgcagtgcccaattattcctatgctgcacctccacagccaataagcagtggtgcagctacagacgccgcaagcctgtatggtgccgttggtagcgccggatatcctactgcgcaagttcagccgagcagtggccctgcaaatgcagcgccaccacctccaccaccaccggcagcaccatatccaagcacatatgaccaaaccagaggagcccagaggtgaaatctgggatgtaaaccagatggctgtttgccatgcacatttgttgagcagacaaatatagactctgtcatgccccatttgtagactgattactggttcagttatgtagatccagttacgggtagattaatttacatcacgacggaagagttgatgtatgcgtaactgtgttggtacttgggttgatcggagcaatgcggcattaaaccacaaaatagtgtagtgtcgttgttctctattcttttataccatttattttcaagtatagtgtaggactgtaggtcatggtttgtgcatatgctgatgtagtcaggtctggctcaatggcttcctagagaattgttttgtgtcacgagg

SEQ ID NO: 200711 - DNA, 809 bp, Zea Mays
gatacagtacctccaaagaagcgaatactggacacatcacaggacttctatacagctggttttgtccctggggctaatgttcatttttcttatgatctccctgaaggaccctttctccgtgaagaaattctaagtttggatggattgtcacttctgctgaaacctgctagtcaacctgatgattctagaatgaactcttcttctcttcaatctgatgcatctcaatctgttcctgtaccaacaacaacaaataagaagcctggcagaccaaagtggctgaaaaggtgataccactctaggtgtcaagtgtgtgccatcaacacagaatcactctgttaggcttctaaacactattaatggccgaacaagctcaaatctgaacaggctacactgctgtagtacaataattggatcctctgtttacagaagctgcaggggcattagaaatagaatcccaccttttttctaggtgggagccaagtagcatgtaaaattgaatgtgtcgcgactcatcaagtcatcagaacagtgctccgctgtggctaagcactttgtcatcttacatttcatgtaaaccccataggaagttagaaacggcagagataatagtccagtgttgttaacacttcacggtgcaatgccatgcctgtcttcactattcagtcttgacaacaatacattttagaaaactgaaagtgcccgaggtagctggaatataccaagtgtggggctttcagttctggaggacatgatattgtggcaggttgatttcttgtaattgatggtgatggagcccttaccagcgacca

SEQ ID NO: 200712 - DNA, 2081 bp, Zea Mays
gttgggctgagggctggaggctggagctggttgatcatcgtatactgaaggctatcgcagttgagcaccgtaaagatgttgattccgcggtggttactgtccttgatgaagtcatgccgtccatgactggttcagctggaactttgtttacccataaagaagtgttgccatctatggatgattctgttgggaatttgtttgctaatcgcagcacacatgaagtgggtagttcatcatgtgcaggacatgagatacatatcgatgagattgatgtaagtgttcaccctgcacaacacacttcttctggggaggctaaaactggcaagcaagaaaacataaacaatgaatgtgtgggaagacttgcatcagtcgaaggggtcagtgagcaactaaatctacattctgatcctataccaaatggcagtcagcatgatttgattcccaaccttgatgtgctatcatcaaataccaatccagagaaaatgttggctaacatatataatgaagttggatatagtggattatcaagtgaatgtttttctcaacaactgactgggaaacatggtggtgatatcatagctccacaatcccatgatcaagatcctaataagatgcttccagttggggattacttttcccagaacagttcaatggagttcttcagtggctatgaggacatgcattttgatggtgaccttttgcctcctggttctaatgataaagtatcttctggaattttgggtactgaaaaagattcttctgtgcctgtgctggatgttcctggtcgaaataaagaagaatcccccgctgggacttctggatttatagaacagaaggacaccagcaatgttacgaatatgcttcctgatcttaatttgtatcatttggcttctacggcttcaactcactcaagccattctgttagtattgagtctcttgaggattctgttgctgatgccagaagcaataagaatgatctgttaccttctttggagttggttacaaaaatgatagaggatgttgagcttcttgaagaaaaggctaaagtagccaaacgtgaatcatctgttgctgggacaggcattctaaccaaagttgaggagctcagagaaatgttaactcatgcgaaggaagcaaatgatatgcatgctggcgaggtttttggcgagaaagctattttaaccacagaggcacgtgagcttcaatctcgacttcagaggctttcagatgagaggaataaatatctggtgataattgaagagatacgacaaactcttgatcaaagattggttgctgcacagcaagaaattgcagcagccgagaaagaaaagcttgaaaaggaggttgctgctcagacactactcaatgaacaggaaaatatgatgaattctattgttgaagaatcgagaaaactgcagaaagaagctgaggagaacctgaagttgaaggaattcctggttgagcggagccaaattgttgatatgctgcaaggcgagatgactgggatctgtgaggatgtttcgttgctcaagcgagtggtggatgagcgcctatcattgagcaagttgcagccctcagctatgtcaagcctctcttcttcactgcattcttctcatcacaagagctggacttcctctgataggaccaccgaagccaatgggtctctagataagcacacccttgctgaacctgcaagcccagcgcgcaaagatctgaatggcgacgagtgcactgtgcaggtgtcagatggcaacgacactggtaaaggcgttttgaagcgtgtggattccaaggacggcgatggatgggagctttgctgaaggtgttcaggaatagcgcggttgcgagtggatgctgaagcatagaaattactataaactagtaataatggtgaataaacgtttactagtgcgttgctaatctagtcgtaatgtgggaactgtgtcgtggaactgactcactagctcaccgcagtagtatgtgggatgggtccaactgcagcttgacgtggtatatataaatgtgaagaattcagctgcccctgctcctgtctaaattttatgttgtttttaattttgttc

SEQ ID NO: 200713 - DNA, 2081 bp, Zea Mays
tcctgaatgtatttttattttttatgaaggttgatcatcgtatactgaaggctatcgcagttgagcaccgtaaagatgttgattccgcggtggttactgtccttgatgaagtcatgccgtccatgactggttcagctggaactttgtttacccataaagaagtgttgccatctatggatgattctgttgggaatttgtttgctaatcgcagcacacatgaagtgggtagttcatcatgtgcaggacatgagatacatatcgatgagattgatgtaagtgttcaccctgcacaacacacttcttctggggaggctaaaactggcaagcaagaaaacataaacaatgaatgtgtgggaagacttgcatcagtcgaaggggtcagtgagcaactaaatctacattctgatcctataccaaatggcagtcagcatgatttgattcccaaccttgatgtgctatcatcaaataccaatccagagaaaatgttggctaacatatataatgaagttggatatagtggattatcaagtgaatgtttttctcaacaactgactgggaaacatggtggtgatatcatagctccacaatcccatgatcaagatcctaataagatgcttccagttggggattacttttcccagaacagttcaatggagttcttcagtggctatgaggacatgcattttgatggtgaccttttgcctcctggttctaatgataaagtatcttctggaattttgggtactgaaaaagattcttctgtgcctgtgctggatgttcctggtcgaaataaagaagaatcccccgctgggacttctggatttatagaacagaaggacaccagcaatgttacgaatatgcttcctgatcttaatttgtatcatttggcttctacggcttcaactcactcaagccattctgttagtattgagtctcttgaggattctgttgctgatgccagaagcaataagaatgatctgttaccttctttggagttggttacaaaaatgatagaggatgttgagcttcttgaagaaaaggctaaagtagccaaacgtgaatcatctgttgctgggacaggcattctaaccaaagttgaggagctcagagaaatgttaactcatgcgaaggaagcaaatgatatgcatgctggcgaggtttttggcgagaaagctattttaaccacagaggcacgtgagcttcaatctcgacttcagaggctttcagatgagaggaataaatatctggtgataattgaagagatacgacaaactcttgatcaaagattggttgctgcacagcaagaaattgcagcagccgagaaagaaaagcttgaaaaggaggttgctgctcagacactactcaatgaacaggaaaatatgatgaattctattgttgaagaatcgagaaaactgcagaaagaagctgaggagaacctgaagttgaaggaattcctggttgagcggagccaaattgttgatatgctgcaaggcgagatgactgggatctgtgaggatgtttcgttgctcaagcgagtggtggatgagcgcctatcattgagcaagttgcagccctcagctatgtcaagcctctcttcttcactgcattcttctcatcacaagagctggacttcctctgataggaccaccgaagccaatgggtctctagataagcacacccttgctgaacctgcaagcccagcgcgcaaagatctgaatggcgacgagtgcactgtgcaggtgtcagatggcaacgacactggtaaaggcgttttgaagcgtgtggattccaaggacggcgatggatgggagctttgctgaaggtgttcaggaatagcgcggttgcgagtggatgctgaagcatagaaattactataaactagtaataatggtgaataaacgtttactagtgcgttgctaatctagtcgtaatgtgggaactgtgtcgtggaactgactcactagctcaccgcagtagtatgtgggatgggtccaactgcagcttgacgtggtatatataaatgtgaagaattcagctgcccctgctcctgtctaaattttatgttgtttttaattttgttc

SEQ ID NO: 200714 - DNA, 1682 bp, Zea Mays
gatcccagtaccgctaaatttcctcagtgttgctagtctacagcaggcagattcaaagtgaatggtgttgcataggccttgtttggcacagctttagctccgaggtttacctcaaatcttgactttgtatgctaaatcatgaatcttgagactcacgtttgtctagaatagaaaggaaacagttcaacttcaaccaaacaattcaggtgtaacctacctccatctccacaaagtttctagggttagaaatacctagctccgggaaatcacatatttattgaaggtggagctccgcgcaactggcctatattaccattctcatgcaatttccatactataggtttcaggttattgtggccttttacttggaagtcctatcattttgtatgagatcattgcatttgttatcccagatggggcagtggaatcgttgtggtcaatagaccagtactttgaattcatacttgtgctgatgtttagcacagggttgtcctttcaggtccctgttatccagcttttgctgggacaacttggattggtttctagtgaccaaatgctttcgatctggagatatgttgttgttggtgctgttgttgctgctgctgtgcttacaccttcgacggacccgttgacacaaatgctcctggctggtcccttgcttggtttatacttgggtggtgcatggatggtcaagataactgggcgctaactgctttgtgcaaggtgatggtgctccggatagcaagagtcccagtgtaacctagtcttgtaaaaatgaattcactctgcttgcttgtaaaaatgaattcactctgcgtgctcattagatgatactagttagttatccgacactatggtttctatatatgatatatgttttctttatacaacaaaaaacaacataagctgcactggttagtgacaagtactcctagtagttgcacgttatatgcgtgcgcagggagtaagacgacacaagacgaaactcccgctttatattataattagtaaggattgttaccatttcactttataaggctagctttagcagatcttctatctcatcctctattttaaatttttctctgtaaacaatgtcatctacaattcaatgtcctctattttatacactccacttctctattttacatactccagctgaagacagtctaaatttcatgagcagcagaaagttgagcagacggttaaatagtttcatctaatcgatgttgaacgttgaagtggtgctcaatcgcaaaaggcagaaggcttccatccactacaacatcgctcgctgtgtttgccgctggactttcttggttgccggcttggcacagctgcgtcggagggcaggtatgccatcatacatacatatggttatatatcatatatggttttcttgtacaacacaaaccaacataagttgtagtggttagcagtgagtactctcttcctagataccatagttcgaattctagcaattgcacctcatttcttatagttcgctgacgagtggggagcaggacgacatcgaagaaactcccactttaagggtgactaatatgaatgtatgagttgaaaaggagcttaatttaattttatagcccgcggtcgctcgtgtgtttggttactggacaaccggagacaactagaacaatcacgtcccccggtgtccctttttg

SEQ ID NO: 200715 - DNA, 1928 bp, Zea Mays
gtctttttcgcgtggcttggctgacatgtgaaaaagctaggcgcccccgataaaaagggcctccccgctccccggacgcggcggctactgtttctgtttcttccttcgaccccggtcgtcccgtcctccgctgggcatcgaaagtcgaacgcctcccccctccctccctcccagttccgtcgtcggctcctgcagcagcagcaagcaatggcggcttcctggagagccgtggcgctggcggtggccgcagtgggctggcttcttgccggtgccgcgcgggcgttcccggccgaggacttggtcgcgcggctgccggggcagcctccggtcacgttcaggcagttcgccgggtacgtggacgtcgacgccaaggccggcaggagcctcttctactacttcgccgaggcgcgggaggacgccgccgccaagccgctcacgctgtggctgaatggaggtcctggctgttcttcggttggaggtggtgctttcaccgagctagggccattttatccgcgaggagacggccgaggcctcagattgaacaagaagtcatggaacagagcgtccaatcttctgttcgtggagtcaccggctggagttggatggtcttattcgaacacttcatcggactacagcactggagacgtgcggactgctcatgacatgtaccaatttttgttgggatggtatgcgaagtttcctgagtacagatcaagagctttgttccttaccggagagagttacgcagggcattacataccacagctcgctgatgtacttatcacccataacgagaaatccaagggtttcaagttcaatattaagggagtcgctatcgggaatccgctcctcaagcttgacagggacgtccctgcgacctacgagtacttctggtctcatggcatgatctccgacgagatattcctggcgatcagccacagctgcgactttgaggactacaccttcaacgaccctcacaacgagagcaagtcatgcaacgacgccatcgcggaagcgaacagcgtagtcggagactacgtcaacaactacgatgtcattctcgacgtctgctacccatcgatcgtgatgcaggagctacggctgcgagaatacgtatgctattgcttgctcctccgactacgctgttcttcctcgtttgattggctcttcttggttgcaggcgacgaagatcagtattggcgtggatgtctgcatgtcctacgagaggtttttctacttcaatctaccggaggtgcagcaggctctgcatgctaacaggacgcatctgaagcatcactggagcatgtgcagcgagttttggttatcttctcaatgccaaactctcacacgggtcatttgcaccatcatgtgccagtatcctgaactacagcaacaccgacggcaacatcaacatactgcctacacttcaaagaatcgtcgagcacaagataccactttgggtgttcaggttggagggtgggtgacggagtatggcaacttcctgaccttcgccacagtgcgaggtgcgtctcacatggtgccctttgcacagccagaccgggctctcgggctgtttcgatccattgtactcggacaaagactaccgaacacgacgaatccacacattgactagaagtgtatctacaaaagaaggtggagacagacagaaaaatagcttagattttgctttttcagttttgctgcaatgaatggatctacaaaagaaggtagttcataaagacgtgtgatgtgttggatgctcaactagtactttaactatttataaagagcagaaataatatttttattgctgtggttataactatcatcaatctgcatccctcgaagtttggaacacacatagatttgtgcaagtgacgacaggctcaacagcatttcactagatgtcaagcaataatgtcacctta

SEQ ID NO: 200716 - DNA, 1979 bp, Zea Mays
gtctttttcgcgtggcttggctgacatgtgaaaaagctaggcgcccccgataaaaagggcctccccgctccccggacgcggcggctactgtttctgtttcttccttcgaccccggtcgtcccgtcctccgctgggcatcgaaagtcgaacgcctcccccctccctccctcccagttccgtcgtcggctcctgcagcagcagcaagcaatggcggcttcctggagagccgtggcgctggcggtggccgcagtgggctggcttcttgccggtgccgcgcgggcgttcccggccgaggacttggtcgcgcggctgccggggcagcctccggtcacgttcaggcagttcgccgggtacgtggacgtcgacgccaaggccggcaggagcctcttctactacttcgccgaggcgcgggaggacgccgccgccaagccgctcacgctgtggctgaatggaggtcctggctgttcttcggttggaggtggtgctttcaccgagctagggccattttatccgcgaggagacggccgaggcctcagattgaacaagaagtcatggaacagagcgtccaatcttctgttcgtggagtcaccggctggagttggatggtcttattcgaacacttcatcggactacagcactggagacgtgcggactgctcatgacatgtaccaatttttgttgggatggtatgcgaagtttcctgagtacagatcaagagctttgttccttaccggagagagttacgcagggcattacataccacagctcgctgatgtacttatcacccataacgagaaatccaagggtttcaagttcaatattaagggagtcgctatcgggaatccgctcctcaagcttgacagggacgtccctgcgacctacgagtacttctggtctcatggcatgatctccgacgagatattcctggcgatcagccacagctgcgactttgaggactacaccttcaacgaccctcacaacgagagcaagtcatgcaacgacgccatcgcggaagcgaacagcgtagtcggagactacgtcaacaactacgatgtcattctcgacgtctgctacccatcgatcgtgatgcaggagctacggctgcgagaatacgcgacgaagatcagtattggcgtggatgtctgcatgtcctacgagaggtttttctacttcaatctaccggaggtgcagcaggctctgcatgctaacaggacgcatctgaagcatcactggagcatgtgcagcgagttttggttatcttctcaatgccaaactctcacacgggtcatttgcaccatcatgtgccagtatcctgaactacagcaacaccgacggcaacatcaacatactgcctacacttcaaagaatcgtcgagcacaagataccactttgggtgttcagcggcgaccaagactccgtcgtgcccttgctgggcacccgaacccttgtgcgagagctcgctcacgccatggggctgcatgtcaccgtcccctacagcacctggttccacaaaggccaggttggagggtgggtgacggagtatggcaacttcctgaccttcgccacagtgcgaggtgcgtctcacatggtgccctttgcacagccagaccgggctctcgggctgtttcgatccattgtactcggacaaagactaccgaacacgacgaatccacacattgactagaagtgtatctacaaaagaaggtggagacagacagaaaaatagcttagattttgctttttcagttttgctgcaatgaatggatctacaaaagaaggtagttcataaagacgtgtgatgtgttggatgctcaactagtactttaactatttataaagagcagaaataatatttttattgctgtggttataactatcatcaatctgcatccctcgaagtttggaacacacatagatttgtgcaagtgacgacaggctcaacagcatttcactagatgtcaagcaataatgtcacctta

SEQ ID NO: 200717 - DNA, 1530 bp, Zea Mays
aaacatatctcatgttccatcacttattatagtggcacctgtactgtttcattaaggaaaataattggtcctggctgttcttcggttggaggtggtgctttcaccgagctagggccattttatccgcgaggagacggccgaggcctcagattgaacaagaagtcatggaacagaggtccaatcttctgttcgtggagtcaccggctggagttggatggtcttattcgaacacttcatcggactacagcactggagacgtgcggactgctcatgacatgtaccaatttttgttgggatggtatgcgaagtttcctgagtacagatcaagagctttgttccttaccggagagagttacgcagggcattacataccacagctcgctgatgtacttatcacccataacgagaaatccaagggtttcaagttcaatattaagggagtcgctatcgggaatccgctcctcaagcttgacagggacgtccctgcgacctacgagtacttctggtctcatggcatgatctccgacgagatattcctggcgatcagccacagctgcgactttgaggactacaccttcaacgaccctcacaacgagagcaagtcatgcaacgacgccatcgcggaagcgaacagcgtagtcggagactacgtcaacaactacgatgtcattctcgacgtctgctacccatcgatcgtgatgcaggagctacggctgcgagaatacgcgacgaagatcagtattggcgtggatgtctgcatgtcctacgagaggtttttctacttcaatctaccggaggtgcagcaggctctgcatgctaacaggacgcatctgaagcatcactggagcatgtgcagcgatatcctgaactacagcaacaccgacggcaacatcaacatactgcctacacttcaaagaatcgtcgagcacaagataccactttgggtgttcagcggcgaccaagactccgtcgtgcccttgctgggcacccgaacccttgtgcgagagctcgctcacgccatggggctgcatgtcaccgtcccctacagcacctggttccacaaaggccaggttggagggtgggtgacggagtatggcaacttcctgaccttcgccacagtgcgaggtgcgtctcacatggtgccctttgcacagccagaccgggctctcgggctgtttcgatccattgtactcggacaaagactaccgaacacgacgaatccacacattgactagaagtgtatctacaaaagaaggtggagacagacagaaaaatagcttagattttgctttttcagttttgctgcaatgaatggatctacaaaagaaggtagttcataaagacgtgtgatgtgttggatgctcaactagtactttaactatttataaagagcagaaataatatttttattgctgtggttataactatcatcaatctgcatccctcgaagtttggaacacacatagatttgtgcaagtgacgacaggctcaacagcatttcactagatgtcaagcaataatgtcacctta

SEQ ID NO: 200718 - DNA, 500 bp, Zea Mays
acttgccgctggtgcttgcgcgggtaacttacccactggatgttctccggctcaggctagcagttcaatctggacacatcactttatctcaggttgctcttaacatgctgagagaagaagggctggcctccttctatggaggcttgggtccatctcttgtagcaattgcaccttacattgctgtgaacttctgtgtttttgacctgatgaagaaatctgtaccagagaagtacaagaatagaccagaaacatctctagcaaccgctcttctttcagcaacatttgcaactttgatgtgttatccgctggacactgttaggagacagatgcagatgaaaggcacaccatacaatactgtttttgatgctattccagtcgttgattacgcatttcagcgggcaacacaacgtcagtaaaacaattgttactagaactgtactccactgaactttagctattccaggatctgaccgtgcaaagttcctgctggttggtacaat

SEQ ID NO: 200719 - DNA, 2966 bp, Zea Mays
tttagtttgtccctcggcacaccgcacacccttgcttgtctccaggcgtacttgcgtttagcgtctcttccctgctgccatctctgtccggagggcaagccatggcggcgggcggggacggcgtcgctcgccaggcggagctccgccggatcgagggcaacatctgcttcaagaaggcgcgcctcggcgccgccatcgactgctacaccgaggcaattgcgctctgccccgacgtcgccgtctactggatcaatcgggccctgtgccatttcaagcgcaaggagtgggccaaggtcgaagaggacagcaggagggctcttgcgcttgattacactttagtcaaggggcactatctgctggggtgtgcgctactcgagaaggaagaatctgctcttgctatcaaggaattcgaaaaggctctaactctcttaaagtctgtggattcaacgtatgaaatggctgaggacatttggcaggtccttgcaaaggcaaaatacttagattgggagaagcattccactgaacgactatggaggatggaaagtttgaaggaagcttgtgaaactgctctgcaggagcatcactttctaactggtacacttgaggaagactccaacaggtcagacaacgagtattcagagcaaattaaactactatcagaggtcttcagccaagcgacagtcgccgatacaccaacagatgtgcccgattacctttgctgtcagataacattcgagatcttccgagacccagtgatcacaccgagtggtgtaacatatgagagggctgtacttgttgaacatctccacaaggttggcaatttcgacccggtgacgcgagaacctctgaaggagcatcagctggttccgaatctggccatcaaggaagcagtgcaggcctacctgaaagagcacagctgggcccacaagttgaactaattggatgccgtgtgctttgctgactgcagatgctgataaatcggggatggcctgttattagagttagattttatgttgtgttggaatgagattgattggatagctcgattcatcgttcttagtattgattgggtaacttgacctgtaactgcaattctgcaaacactcattggatggatgtaatgaagcaagtgtacatgaaacattggttggttcagctcactgcatgtatatggttgcagcattatatatggttggtcgtagacccagtgggcctcaaacaagttaggcctagtttggatactctagtaatgagtgggattgaagtggattaagatgtattgagagagtatttgatgtattggggatttacaccctctccaatcccttcaaaacactccaatcctaaagtatccaaactaggccttaggtgggccggcctctatccaaggcccagccttttacttggcgctgacaagacaaaagagaggagacgagaaagaaaacaaaccctagcccgctacccctgccccttctctcttcgtcgcgcctccgcctccgccgtcgtagcatcctcctccgccacctcggccatggcgacatccccagcgctcctcttcccttctccctcctcggcatcctctgcgccttcgtcggcgcgggtggaggcagtggtgcttttcaacgtctgcgacagctacgtgcggcgcccggaccaggcggaccgcgtcatcggcaccctcctcggttccctcctctccgacggcaccgtccacgtccgcaactcctatgtcgtcccccacagcgagtcagccgaccaggtcgccatcgacatcgactaccaccataacatgtacgcctcgcaccagaaggtgaaccccaaggaggtcatcgtcggatggttctcgactggatttggtgtttctggggggagtacgctcatccacgagttctattcaagggaagtacaaaaccccatccatcttacagtcgacactggcttcactaggggggaggcttccatcaaagcctacatctcatccaatctgtccctcagagatagtcaactcgctgcacaatttcaggaaatccctctggatctgaagatgattgaggcggaaaaggctggatttgagatcctgaaatctactatggtagagaagctccccaatgatctggaaggaatggagtcatcgatggggaagctttacattcttatcgatgagatctacaaatacgtcgatgatgttgtggaaggacgcgtggcacccgacaacagaattggaaggttcatctctgattcttttgcttcggtgccgaaattgtccccggctgctttcgataagcttttcaatgacaagattcaggataaccttgcgctggtatacctgtcaagcatcacaaggacacaaatcagcatcgccgagaagttgaacactgctgctcaagtgctgtaggtttggcggtgtggcatctggtttggacgtggatggcttgatgctatctgtgatgcttggcgtaagtgtgattggtgacagaaatgcatttttgtactcattattattattgctaaatgagagacctgatggaaagggttagccaacgatgagatcccataatgttgccagaatgccagtagagtggtggatggcgagatgtttctgtttggatagtattctgtgctccaggttgaatatttgtaatgctcgttggttttgtgtagcgacacatcggcaatgtggagcaatgaagagatttgctccacattttacgtcgtcatttagaggtgtggtggcatgcaatgtgatgctgttgttgcaggaaaatcggttttgctgtcctgttatagcaagctttcctcctgcggccctgcttttcatttccctcttgattcttgcctctgcccttcgaaaccggtctaggccgggaacaatcacgtcatcccatgttatgtgtctagcctgaacgaaccgtccgctactctttttttattataatataagataatgataagaagctattcaaaat

SEQ ID NO: 200720 - DNA, 2985 bp, Zea Mays
acaccgcacacccttgcttgtctccaggcgtacttgcgtttagcgtctcttccctgctgccatctctgtccggagggcaagccatggcggcgggcggggacggcgtcgctcgccaggcggagctccgccggatcgagggcaacatctgcttcaagaaggcgcgcctcggcgccgccatcgactgctacaccgaggcaattgcgctctgccccgacgtcgccgtctactggatcaatcgggccctgtgccatttcaagcgcaaggagtgggccaaggtcgaagaggacagcaggagggctcttgcgcttgattacactttagtcaaggggcactatctgctggggtgtgcgctactcgagaaggaagaatctgctcttgctatcaaggaattcgaaaaggctctaactctcttaaagtctgtggattcaacgtatgaaatggctgaggacatttggcaggtccttgcaaaggcaaaatacttagattgggagaagcattccactgaacgactatggaggatggaaagtttgaaggaagcttgtgaaactgctctgcaggagcatcactttctaactggtacacttgaggaagactccaacaggtcagacaacgagtattcagagcaaattaaactactatcagaggtcttcagccaagcgacagtcgccgatacaccaacagatgtgcccgattacctttgctgtcagataacattcgagatcttccgagacccagtgatcacaccgagtggtgtaacatatgagagggctgtacttgttgaacatctccacaaggtgtgcccttccgctgacgtgaagctgtttactttttgttggcaatttcgacccggtgacgcgagaacctctgaaggagcatcagctggttccgaatctggccatcaaggaagcagtgcaggcctacctgaaagagcacagctgggcccacaagttgaactaattggatgccgtgtgctttgctgactgcagatgctgataaatcggggatggcctgttattagagttagattttatgttgtgttggaatgagattgattggatagctcgattcatcgttcttagtattgattgggtaacttgacctgtaactgcaattctgcaaacactcattggatggatgtaatgaagcaagtgtacatgaaacattggttggttcagctcactgcatgtatatggttgcagcattatatatggttggtcgtagacccagtgggcctcaaacaagttaggcctagtttggatactctagtaatgagtgggattgaagtggattaagatgtattgagagagtatttgatgtattggggatttacaccctctccaatcccttcaaaacactccaatcctaaagtatccaaactaggccttaggtgggccggcctctatccaaggcccagccttttacttggcgctgacaagacaaaagagaggagacgagaaagaaaacaaaccctagcccgctacccctgccccttctctcttcgtcgcgcctccgcctccgccgtcgtagcatcctcctccgccacctcggccatggcgacatccccagcgctcctcttcccttctccctcctcggcatcctctgcgccttcgtcggcgcgggtggaggcagtggtgcttttcaacgtctgcgacagctacgtgcggcgcccggaccaggcggaccgcgtcatcggcaccctcctcggttccctcctctccgacggcaccgtccacgtccgcaactcctatgtcgtcccccacagcgagtcagccgaccaggtcgccatcgacatcgactaccaccataacatgtacgcctcgcaccagaaggtgaaccccaaggaggtcatcgtcggatggttctcgactggatttggtgtttctggggggagtacgctcatccacgagttctattcaagggaagtacaaaaccccatccatcttacagtcgacactggcttcactaggggggaggcttccatcaaagcctacatctcatccaatctgtccctcagagatagtcaactcgctgcacaatttcaggaaatccctctggatctgaagatgattgaggcggaaaaggctggatttgagatcctgaaatctactatggtagagaagctccccaatgatctggaaggaatggagtcatcgatggggaagctttacattcttatcgatgagatctacaaatacgtcgatgatgttgtggaaggacgcgtggcacccgacaacagaattggaaggttcatctctgattcttttgcttcggtgccgaaattgtccccggctgctttcgataagcttttcaatgacaagattcaggataaccttgcgctggtatacctgtcaagcatcacaaggacacaaatcagcatcgccgagaagttgaacactgctgctcaagtgctgtaggtttggcggtgtggcatctggtttggacgtggatggcttgatgctatctgtgatgcttggcgtaagtgtgattggtgacagaaatgcatttttgtactcattattattattgctaaatgagagacctgatggaaagggttagccaacgatgagatcccataatgttgccagaatgccagtagagtggtggatggcgagatgtttctgtttggatagtattctgtgctccaggttgaatatttgtaatgctcgttggttttgtgtagcgacacatcggcaatgtggagcaatgaagagatttgctccacattttacgtcgtcatttagaggtgtggtggcatgcaatgtgatgctgttgttgcaggaaaatcggttttgctgtcctgttatagcaagctttcctcctgcggccctgcttttcatttccctcttgattcttgcctctgcccttcgaaaccggtctaggccgggaacaatcacgtcatcccatgttatgtgtctagcctgaacgaaccgtccgctactctttttttattataatataagataatgataagaagctattcaaaat

SEQ ID NO: 200721 - DNA, 2983 bp, Zea Mays
acaccgcacacccttgcttgtctccaggcgtacttgcgtttagcgtctcttccctgctgccatctctgtccggagggcaagccatggcggcgggcggggacggcgtcgctcgccaggcggagctccgccggatcgagggcaacatctgcttcaagaaggcgcgcctcggcgccgccatcgactgctacaccgaggcaattgcgctctgccccgacgtcgccgtctactggatcaatcgggccctgtgccatttcaagcgcaaggagtgggccaaggtcgaagaggacagcaggagggctcttgcgcttgattacactttagtcaaggggcactatctgctggggtgtgcgctactcgagaaggaagaatctgctcttgctatcaaggaattcgaaaaggctctaactctcttaaagtctgtggattcaacgtatgaaatggctgaggacatttggcaggtccttgcaaaggcaaaatacttagattgggagaagcattccactgaacgactatggaggatggaaagtttgaatctcttaacagaagcgtatccccgtggacatgcagggaagcttgtgaaactgctctgcaggagcatcactttctaactggtacacttgaggaagactccaacaggtcagacaacgagtattcagagcaaattaaactactatcagaggtcttcagccaagcgacagtcgccgatacaccaacagatgtgcccgattacctttgctgtcagataacattcgagatcttccgagacccagtgatcacaccgagtggtgtaacatatgagagggctgtacttgttgaacatctccacaaggttggcaatttcgacccggtgacgcgagaacctctgaaggagcatcagctggttccgaatctggccatcaaggaagcagtgcaggcctacctgaaagagcacagctgggcccacaagttgaactaattggatgccgtgtgctttgctgactgcagatgctgataaatcggggatggcctgttattagagttagattttatgttgtgttggaatgagattgattggatagctcgattcatcgttcttagtattgattgggtaacttgacctgtaactgcaattctgcaaacactcattggatggatgtaatgaagcaagtgtacatgaaacattggttggttcagctcactgcatgtatatggttgcagcattatatatggttggtcgtagacccagtgggcctcaaacaagttaggcctagtttggatactctagtaatgagtgggattgaagtggattaagatgtattgagagagtatttgatgtattggggatttacaccctctccaatcccttcaaaacactccaatcctaaagtatccaaactaggccttaggtgggccggcctctatccaaggcccagccttttacttggcgctgacaagacaaaagagaggagacgagaaagaaaacaaaccctagcccgctacccctgccccttctctcttcgtcgcgcctccgcctccgccgtcgtagcatcctcctccgccacctcggccatggcgacatccccagcgctcctcttcccttctccctcctcggcatcctctgcgccttcgtcggcgcgggtggaggcagtggtgcttttcaacgtctgcgacagctacgtgcggcgcccggaccaggcggaccgcgtcatcggcaccctcctcggttccctcctctccgacggcaccgtccacgtccgcaactcctatgtcgtcccccacagcgagtcagccgaccaggtcgccatcgacatcgactaccaccataacatgtacgcctcgcaccagaaggtgaaccccaaggaggtcatcgtcggatggttctcgactggatttggtgtttctggggggagtacgctcatccacgagttctattcaagggaagtacaaaaccccatccatcttacagtcgacactggcttcactaggggggaggcttccatcaaagcctacatctcatccaatctgtccctcagagatagtcaactcgctgcacaatttcaggaaatccctctggatctgaagatgattgaggcggaaaaggctggatttgagatcctgaaatctactatggtagagaagctccccaatgatctggaaggaatggagtcatcgatggggaagctttacattcttatcgatgagatctacaaatacgtcgatgatgttgtggaaggacgcgtggcacccgacaacagaattggaaggttcatctctgattcttttgcttcggtgccgaaattgtccccggctgctttcgataagcttttcaatgacaagattcaggataaccttgcgctggtatacctgtcaagcatcacaaggacacaaatcagcatcgccgagaagttgaacactgctgctcaagtgctgtaggtttggcggtgtggcatctggtttggacgtggatggcttgatgctatctgtgatgcttggcgtaagtgtgattggtgacagaaatgcatttttgtactcattattattattgctaaatgagagacctgatggaaagggttagccaacgatgagatcccataatgttgccagaatgccagtagagtggtggatggcgagatgtttctgtttggatagtattctgtgctccaggttgaatatttgtaatgctcgttggttttgtgtagcgacacatcggcaatgtggagcaatgaagagatttgctccacattttacgtcgtcatttagaggtgtggtggcatgcaatgtgatgctgttgttgcaggaaaatcggttttgctgtcctgttatagcaagctttcctcctgcggccctgcttttcatttccctcttgattcttgcctctgcccttcgaaaccggtctaggccgggaacaatcacgtcatcccatgttatgtgtctagcctgaacgaaccgtccgctactctttttttattataatataagataatgataagaagctattcaaaat

SEQ ID NO: 200722 - DNA, 2582 bp, Zea Mays
tacctcaaccgtttgtctcttgcacgcttgatgctctaactctcttaaagtctgtggattcaacgtatgaaatggctgaggacatttggcaggtccttgcaaaggcaaaatacttagattgggagaagcattccactgaacgactatggaggatggaaagtttgaaggaagcttgtgaaactgctctgcaggagcatcactttctaactggtacacttgaggaagactccaacaggtcagacaacgagtattcagagcaaattaaactactatcagaggtcttcagccaagcgacagtcgccgatacaccaacagatgtgcccgattacctttgctgtcagataacattcgagatcttccgagacccagtgatcacaccgagtggtgtaacatatgagagggctgtacttgttgaacatctccacaaggttggcaatttcgacccggtgacgcgagaacctctgaaggagcatcagctggttccgaatctggccatcaaggaagcagtgcaggcctacctgaaagagcacagctgggcccacaagttgaactaattggatgccgtgtgctttgctgactgcagatgctgataaatcggggatggcctgttattagagttagattttatgttgtgttggaatgagattgattggatagctcgattcatcgttcttagtattgattgggtaacttgacctgtaactgcaattctgcaaacactcattggatggatgtaatgaagcaagtgtacatgaaacattggttggttcagctcactgcatgtatatggttgcagcattatatatggttggtcgtagacccagtgggcctcaaacaagttaggcctagtttggatactctagtaatgagtgggattgaagtggattaagatgtattgagagagtatttgatgtattggggatttacaccctctccaatcccttcaaaacactccaatcctaaagtatccaaactaggccttaggtgggccggcctctatccaaggcccagccttttacttggcgctgacaagacaaaagagaggagacgagaaagaaaacaaaccctagcccgctacccctgccccttctctcttcgtcgcgcctccgcctccgccgtcgtagcatcctcctccgccacctcggccatggcgacatccccagcgctcctcttcccttctccctcctcggcatcctctgcgccttcgtcggcgcgggtggaggcagtggtgcttttcaacgtctgcgacagctacgtgcggcgcccggaccaggcggaccgcgtcatcggcaccctcctcggttccctcctctccgacggcaccgtccacgtccgcaactcctatgtcgtcccccacagcgagtcagccgaccaggtcgccatcgacatcgactaccaccataacatgtacgcctcgcaccagaaggtgaaccccaaggaggtcatcgtcggatggttctcgactggatttggtgtttctggggggagtacgctcatccacgagttctattcaagggaagtacaaaaccccatccatcttacagtcgacactggcttcactaggggggaggcttccatcaaagcctacatctcatccaatctgtccctcagagatagtcaactcgctgcacaatttcaggaaatccctctggatctgaagatgattgaggcggaaaaggctggatttgagatcctgaaatctactatggtagagaagctccccaatgatctggaaggaatggagtcatcgatggggaagctttacattcttatcgatgagatctacaaatacgtcgatgatgttgtggaaggacgcgtggcacccgacaacagaattggaaggttcatctctgattcttttgcttcggtgccgaaattgtccccggctgctttcgataagcttttcaatgacaagattcaggataaccttgcgctggtatacctgtcaagcatcacaaggacacaaatcagcatcgccgagaagttgaacactgctgctcaagtgctgtaggtttggcggtgtggcatctggtttggacgtggatggcttgatgctatctgtgatgcttggcgtaagtgtgattggtgacagaaatgcatttttgtactcattattattattgctaaatgagagacctgatggaaagggttagccaacgatgagatcccataatgttgccagaatgccagtagagtggtggatggcgagatgtttctgtttggatagtattctgtgctccaggttgaatatttgtaatgctcgttggttttgtgtagcgacacatcggcaatgtggagcaatgaagagatttgctccacattttacgtcgtcatttagaggtgtggtggcatgcaatgtgatgctgttgttgcaggaaaatcggttttgctgtcctgttatagcaagctttcctcctgcggccctgcttttcatttccctcttgattcttgcctctgcccttcgaaaccggtctaggccgggaacaatcacgtcatcccatgttatgtgtctagcctgaacgaaccgtccgctactctttttttattataatataagataatgataagaagctattcaaaat

SEQ ID NO: 200723 - DNA, 2858 bp, Zea Mays
tcaaccgtttgtctcttgcacgcttgatgctctaactctcttaaagtctgtggattcaacgtatgaaatggctgaggacatttggcaggtccttgcaaaggcaaaatacttagattgggagaagcattccactgaacgactatggaggatggaaagtttgaaggaagcttgtgaaactgctctgcaggagcatcactttctaactggtacacttgaggaagactccaacaggtcagacaacgagtattcagagcaaattaaactactatcagaggtcttcagccaagcgacagtcgccgatacaccaacagatgtgcccgattacctttgctgtcagataacattcgagatcttccgagacccagtgatcacaccgagtggtgtaacatatgagagggctgtacttgttgaacatctccacaaggttggcaatttcgacccggtgacgcgagaacctctgaaggagcatcagctggttccgaatctggccatcaaggaagcagtgcaggcctacctgaaagagcacagctgggcccacaagttgaactaattggatgccgtgtgctttgctgactgcagatgctgataaatcggggatggcctgttattagagttagattttatgttgtgttggaatgagattgattggatagctcgattcatcgttcttagtattgattgggtaacttgacctgtaactgcaattctgcaaacactcattggatggatgtaatgaagcaagtgtacatgaaacattggttggttcagctcactgcatgtatatggttgcagcattatatatggttggtcgtagacccagtgggcctcaaacaagttaggcctagtttggatactctagtaatgagtgggattgaagtggattaagatgtattgagagagtatttgatgtattggggatttacaccctctccaatcccttcaaaacactccaatcctaaagtatccaaactaggccttaggtgggccggcctctatccaaggcccagccttttacttggcgctgacaagacaaaagagaggagacgagaaagaaaacaaaccctagcccgctacccctgccccttctctcttcgtcgcgcctccgcctccgccgtcgtagcatcctcctccgccacctcggccatggcgacatccccagcgctcctcttcccttctccctcctcggcatcctctgcgccttcgtcggcgcgggtggaggcagtggtgcttttcaacgtctgcgacagctacgtgcggcgcccggaccaggcggaccgcgtcatcggcaccctcctcggttccctcctctccgacggcaccgtccacgtccgcaactcctatgtcgtcccccacagcgagtcagccgaccaggtcgccatcgacatcgactaccaccataacatgtacgcctcgcaccagaaggtgaaccccaaggaggtcatcgtcggatggttctcgactggatttggtgtttctggggggagtacgctcatccacgagttctattcaagggaagtacaaaaccccatccatcttacagtcgacactggcttcactaggggggaggcttccatcaaagcctacatctcatccaatctgtccctcagagatagtcaactcgctgcacaatttcaggaaatccctctggatctgaagatgattgaggcggaaaaggctggatgtatgttaccggtgaatagcagatatataccttctatctgggggagatctcattttgcacctgtattagttggtccttctgttactgtgttgaacttctcaggaatagtcacatcagtagttggatttagtaataatgtctctgtttctatttctgtttctgtattaatttctcgtagacaactgatgtttgtaagaaccatattttgctctgctacatcctcagttttagtagcagaacattttgaagcttccatcactcttactaccttctgttacagttgagatcctgaaatctactatggtagagaagctccccaatgatctggaaggaatggagtcatcgatggggaagctttacattcttatcgatgagatctacaaatacgtcgatgatgttgtggaaggacgcgtggcacccgacaacagaattggaaggttcatctctgattcttttgcttcggtgccgaaattgtccccggctgctttcgataagcttttcaatgacaagattcaggataaccttgcgctggtatacctgtcaagcatcacaaggacacaaatcagcatcgccgagaagttgaacactgctgctcaagtgctgtaggtttggcggtgtggcatctggtttggacgtggatggcttgatgctatctgtgatgcttggcgtaagtgtgattggtgacagaaatgcatttttgtactcattattattattgctaaatgagagacctgatggaaagggttagccaacgatgagatcccataatgttgccagaatgccagtagagtggtggatggcgagatgtttctgtttggatagtattctgtgctccaggttgaatatttgtaatgctcgttggttttgtgtagcgacacatcggcaatgtggagcaatgaagagatttgctccacattttacgtcgtcatttagaggtgtggtggcatgcaatgtgatgctgttgttgcaggaaaatcggttttgctgtcctgttatagcaagctttcctcctgcggccctgcttttcatttccctcttgattcttgcctctgcccttcgaaaccggtctaggccgggaacaatcacgtcatcccatgttatgtgtctagcctgaacgaaccgtccgctactctttttttattataatataagataatgataagaagctattcaaaat

SEQ ID NO: 200724 - DNA, 2710 bp, Zea Mays
cttgcacgcttgatggaagcttgtgaaactgctctgcaggagcatcactttctaactggtacacttgaggaagactccaacaggtcagacaacgagtattcagagcaaattaaactactatcagaggtcttcagccaagcgacagtcgccgatacaccaacagatgtgcccgattacctttgctgtcagataacattcgagatcttccgagacccagtgatcacaccgagtggtgtaacatatgagagggctgtacttgttgaacatctccacaaggttggcaatttcgacccggtgacgcgagaacctctgaaggagcatcagctggttccgaatctggccatcaaggaagcagtgcaggcctacctgaaagagcacagctgggcccacaagttgaactaattggatgccgtgtgctttgctgactgcagatgctgataaatcggggatggcctgttattagagttagattttatgttgtgttggaatgagattgattggatagctcgattcatcgttcttagtattgattgggtaacttgacctgtaactgcaattctgcaaacactcattggatggatgtaatgaagcaagtgtacatgaaacattggttggttcagctcactgcatgtatatggttgcagcattatatatggttggtcgtagacccagtgggcctcaaacaagttaggcctagtttggatactctagtaatgagtgggattgaagtggattaagatgtattgagagagtatttgatgtattggggatttacaccctctccaatcccttcaaaacactccaatcctaaagtatccaaactaggccttaggtgggccggcctctatccaaggcccagccttttacttggcgctgacaagacaaaagagaggagacgagaaagaaaacaaaccctagcccgctacccctgccccttctctcttcgtcgcgcctccgcctccgccgtcgtagcatcctcctccgccacctcggccatggcgacatccccagcgctcctcttcccttctccctcctcggcatcctctgcgccttcgtcggcgcgggtggaggcagtggtgcttttcaacgtctgcgacagctacgtgcggcgcccggaccaggcggaccgcgtcatcggcaccctcctcggttccctcctctccgacggcaccgtccacgtccgcaactcctatgtcgtcccccacagcgagtcagccgaccaggtcgccatcgacatcgactaccaccataacatgtacgcctcgcaccagaaggtgaaccccaaggaggtcatcgtcggatggttctcgactggatttggtgtttctggggggagtacgctcatccacgagttctattcaagggaagtacaaaaccccatccatcttacagtcgacactggcttcactaggggggaggcttccatcaaagcctacatctcatccaatctgtccctcagagatagtcaactcgctgcacaatttcaggaaatccctctggatctgaagatgattgaggcggaaaaggctggatgtatgttaccggtgaatagcagatatataccttctatctgggggagatctcattttgcacctgtattagttggtccttctgttactgtgttgaacttctcaggaatagtcacatcagtagttggatttagtaataatgtctctgtttctatttctgtttctgtattaatttctcgtagacaactgatgtttgtaagaaccatattttgctctgctacatcctcagttttagtagcagaacattttgaagcttccatcactcttactaccttctgttacagttgagatcctgaaatctactatggtagagaagctccccaatgatctggaaggaatggagtcatcgatggggaagctttacattcttatcgatgagatctacaaatacgtcgatgatgttgtggaaggacgcgtggcacccgacaacagaattggaaggttcatctctgattcttttgcttcggtgccgaaattgtccccggctgctttcgataagcttttcaatgacaagattcaggataaccttgcgctggtatacctgtcaagcatcacaaggacacaaatcagcatcgccgagaagttgaacactgctgctcaagtgctgtaggtttggcggtgtggcatctggtttggacgtggatggcttgatgctatctgtgatgcttggcgtaagtgtgattggtgacagaaatgcatttttgtactcattattattattgctaaatgagagacctgatggaaagggttagccaacgatgagatcccataatgttgccagaatgccagtagagtggtggatggcgagatgtttctgtttggatagtattctgtgctccaggttgaatatttgtaatgctcgttggttttgtgtagcgacacatcggcaatgtggagcaatgaagagatttgctccacattttacgtcgtcatttagaggtgtggtggcatgcaatgtgatgctgttgttgcaggaaaatcggttttgctgtcctgttatagcaagctttcctcctgcggccctgcttttcatttccctcttgattcttgcctctgcccttcgaaaccggtctaggccgggaacaatcacgtcatcccatgttatgtgtctagcctgaacgaaccgtccgctactctttttttattataatataagataatgataagaagctattcaaaat

SEQ ID NO: 200725 - DNA, 1047 bp, Zea Mays
gctgagggagggagggagaaacacagatgccccgcaatgtccgattggagcacaaaacattgaagcttctgaagtattggacctggcaatttgttattgttaggccagtatgttccattctgattattgcactccagcttcttgggctgtaccccagctgggtcagctggacgtttagtattatactgaacttttcagtctccatggccttatatgcattggttctcttctaccacttgtttgctaaagagctggcacctcacaagcctcttgcaaagttcttgtgcatcaaagggattgtcttcttctctttctggcagggttttgcgctcgatgttttaacccaagcaggcgtgatcaaatcccaccatttctggctggacgtggagcacatccaggaggcgatccagaacgtcctggtgatccttgagatggtggtgttctccgtcatccagcagtacgcataccacgtcgccccctacagcggcgctgacagggccaagtttgagaagaagaacgaatgaaccaggtttccaaaaagaatgaaagaaggaaaaaaactctctgctttctggtcgctcggagatggagcaccagtatttcctcacggatggacgacatacacaagttcatcgagtctcgcgagtagcgtatttggtagcgagttgtcgcgctgtaaaattacactgtccttgcgcgctgaataattttgctggctttgtcgttttggttttttgaacgttgtcgccgaggctatatagccaggactgttcgtcttgtacgagcgcgcgctctctctctctctctctctctgcggacttggcgaatccttttatgaataaaagctactgtcctgttctacagaggccgcactgggctgatgccgatgaaggttgcgggttgcctgcaaccacctgctgttggggggatgatattgcaatctgcacgttcgtcctttctccgtggagtaatttttttttcaggaacgtgatctgatactacactagtactagtatgtgtttttgaggtctctggctaccatttttg

SEQ ID NO: 200726 - DNA, 1411 bp, Zea Mays
gcagtagattttggtgtgctgaatccaacaccagctcctcctctctttgttagatttgtcctgaggcaccatgtcattcatgtctccattcccggggatggatctaagtaaaatggatcccgggactctgaccctccttggggcagctggttgtgtaatgctgactatgcatttcactgtgcaattggtgtcacaacatctcttctattggaaaaaccccaaggagcagaaagccatacttattattgtgctgatggctccactatacgctatctcttccttcgtgggtcttcttgatatccagggtagcaagacatttttcacattcttagatgctgttaaagaatgctatgaggcactggtgattgctaagtttatggcattgatgtacagctacttgaatatatctatcagcaagaacatagtccctgatgaaatcaaagggagggtgcttcatcattccttccctgtttctcttttcctgccccgcaatgtccgattggagcacaaaacattgaagcttctgaagtattggacctggcaatttgttattgttaggccatctccatggccttatatgcattggttctcttctaccacttgtttgctaaagagctggcacctcacaagcctcttgcaaagttcttgtgcatcaaagggattgtcttcttctctttctggcagggttttgcgctcgatgttttaacccaagcaggcgtgatcaaatcccaccatttctggctggacgtggagcacatccaggaggcgatccagaacgtcctggtgatccttgagatggtggtgttctccgtcatccagcagtacgcataccacgtcgccccctacagcggcgctgacagggccaagtttgagaagaagaacgaatgaaccaggtttccaaaaagaatgaaagaaggaaaaaaactctctgctttctggtcgctcggagatggagcaccagtatttcctcacggatggacgacatacacaagttcatcgagtctcgcgagtagcgtatttggtagcgagttgtcgcgctgtaaaattacactgtccttgcgcgctgaataattttgctggctttgtcgttttggttttttgaacgttgtcgccgaggctatatagccaggactgttcgtcttgtacgagcgcgcgctctctctctctctctctctctgcggacttggcgaatccttttatgaataaaagctactgtcctgttctacagaggccgcactgggctgatgccgatgaaggttgcgggttgcctgcaaccacctgctgttggggggatgatattgcaatctgcacgttcgtcctttctccgtggagtaatttttttttcaggaacgtgatctgatactacactagtactagtatgtgtttttgaggtctctggctaccatttttg

SEQ ID NO: 200727 - DNA, 1360 bp, Zea Mays
gcagtagattttggtgtgctgaatccaacaccagctcctcctctctttgttagatttgtcctgaggcaccatgtcattcatgtctccattcccggggatggatctaagtaaaatggatcccgggactctgaccctccttggggcagctggttgtgtaatgctgactatgcatttcactgtgcaattggtgtcacaacatctcttctattggaaaaaccccaaggagcagaaagccatacttattattgtgctgatggctccactatacgctatctcttccttcgtgggtcttcttgatatccagggtagcaagacatttttcacattcttagatgctgttaaagaatgctatgaggcactggtgattgctaagtttatggcattgatgtacagctacttgaatatatctatcagcaagaacatagtccctgatgaaatcaaagggagggtgcttcatcattccttccctgtttctcttttcctgccccgcaatgtccgattggagcacaaaacattgaagcttctgaagtattggacctggcaatttgttattgttaggccaagctggcacctcacaagcctcttgcaaagttcttgtgcatcaaagggattgtcttcttctctttctggcagggttttgcgctcgatgttttaacccaagcaggcgtgatcaaatcccaccatttctggctggacgtggagcacatccaggaggcgatccagaacgtcctggtgatccttgagatggtggtgttctccgtcatccagcagtacgcataccacgtcgccccctacagcggcgctgacagggccaagtttgagaagaagaacgaatgaaccaggtttccaaaaagaatgaaagaaggaaaaaaactctctgctttctggtcgctcggagatggagcaccagtatttcctcacggatggacgacatacacaagttcatcgagtctcgcgagtagcgtatttggtagcgagttgtcgcgctgtaaaattacactgtccttgcgcgctgaataattttgctggctttgtcgttttggttttttgaacgttgtcgccgaggctatatagccaggactgttcgtcttgtacgagcgcgcgctctctctctctctctctctctgcggacttggcgaatccttttatgaataaaagctactgtcctgttctacagaggccgcactgggctgatgccgatgaaggttgcgggttgcctgcaaccacctgctgttggggggatgatattgcaatctgcacgttcgtcctttctccgtggagtaatttttttttcaggaacgtgatctgatactacactagtactagtatgtgtttttgaggtctctggctaccatttttg

SEQ ID NO: 200728 - DNA, 1499 bp, Zea Mays
ctccgtggcctggatgccttgctcgctctggggtttctcgacggggttttgatccagcgcgggcaccatgtcattcatgtctccattcccggggatggatctaagtaaaatggatcccgggactctgaccctccttggggcagctggttgtgtaatgctgactatgcatttcactgtgcaattggtgtcacaacatctcttctattggaaaaaccccaaggagcagaaagccatacttattattgtgctgatggctccactatacgctatctcttccttcgtgggtcttcttgatatccagggtagcaagacatttttcacattcttagatgctgttaaagaatgctatgaggcactggtgattgctaagtttatggcattgatgtacagctacttgaatatatctatcagcaagaacatagtccctgatgaaatcaaagggagggtgcttcatcattccttccctgtttctcttttcctgccccgcaatgtccgattggagcacaaaacattgaagcttctgaagtattggacctggcaatttgttattgttaggccagtatgttccattctgattattgcactccagcttcttgggctgtaccccagctgggtcagctggacgtttagtattatactgaacttttcagtctccatggccttatatgcattggttctcttctaccacttgtttgctaaagagctggcacctcacaagcctcttgcaaagttcttgtgcatcaaagggattgtcttcttctctttctggcagggttttgcgctcgatgttttaacccaagcaggcgtgatcaaatcccaccatttctggctggacgtggagcacatccaggaggcgatccagaacgtcctggtgatccttgagatggtggtgttctccgtcatccagcagtacgcataccacgtcgccccctacagcggcgctgacagggccaagtttgagaagaagaacgaatgaaccaggtttccaaaaagaatgaaagaaggaaaaaaactctctgctttctggtcgctcggagatggagcaccagtatttcctcacggatggacgacatacacaagttcatcgagtctcgcgagtagcgtatttggtagcgagttgtcgcgctgtaaaattacactgtccttgcgcgctgaataattttgctggctttgtcgttttggttttttgaacgttgtcgccgaggctatatagccaggactgttcgtcttgtacgagcgcgcgctctctctctctctctctctctgcggacttggcgaatccttttatgaataaaagctactgtcctgttctacagaggccgcactgggctgatgccgatgaaggttgcgggttgcctgcaaccacctgctgttggggggatgatattgcaatctgcacgttcgtcctttctccgtggagtaatttttttttcaggaacgtgatctgatactacactagtactagtatgtgtttttgaggtctctggctaccatttttg

SEQ ID NO: 200729 - DNA, 1717 bp, Zea Mays
actgcaattagtactgactctgccaagtcgccacgtgactaacccgcgaggtcgacgcggattttcttctttataccgcgggtaggcggactgggcggctgacggagccgcggagggaaccgagtggccccggcgacgcgaggccgaggcgagctaatctgacggtggcagtgacgactccaacgaccaggcgcggaggctgcactgctccagcgaagtgctcaggtcgctgtatcggtgcagaaatcttgctttattatcatcccatcggagcatggctgcaccatgtcattcatgtctccattcccggggatggatctaagtaaaatggatcccgggactctgaccctccttggggcagctggttgtgtaatgctgactatgcatttcactgtgcaattggtgtcacaacatctcttctattggaaaaaccccaaggagcagaaagccatacttattattgtgctgatggctccactatacgctatctcttccttcgtgggtcttcttgatatccagggtagcaagacatttttcacattcttagatgctgttaaagaatgctatgaggcactggtgattgctaagtttatggcattgatgtacagctacttgaatatatctatcagcaagaacatagtccctgatgaaatcaaagggagggtgcttcatcattccttccctgtttctcttttcctgccccgcaatgtccgattggagcacaaaacattgaagcttctgaagtattggacctggcaatttgttattgttaggccagtatgttccattctgattattgcactccagcttcttgggctgtaccccagctgggtcagctggacgtttagtattatactgaacttttcagtctccatggccttatatgcattggttctcttctaccacttgtttgctaaagagctggcacctcacaagcctcttgcaaagttcttgtgcatcaaagggattgtcttcttctctttctggcagggttttgcgctcgatgttttaacccaagcaggcgtgatcaaatcccaccatttctggctggacgtggagcacatccaggaggcgatccagaacgtcctggtgatccttgagatggtggtgttctccgtcatccagcagtacgcataccacgtcgccccctacagcggcgctgacagggccaagtttgagaagaagaacgaatgaaccaggtttccaaaaagaatgaaagaaggaaaaaaactctctgctttctggtcgctcggagatggagcaccagtatttcctcacggatggacgacatacacaagttcatcgagtctcgcgagtagcgtatttggtagcgagttgtcgcgctgtaaaattacactgtccttgcgcgctgaataattttgctggctttgtcgttttggttttttgaacgttgtcgccgaggctatatagccaggactgttcgtcttgtacgagcgcgcgctctctctctctctctctctctgcggacttggcgaatccttttatgaataaaagctactgtcctgttctacagaggccgcactgggctgatgccgatgaaggttgcgggttgcctgcaaccacctgctgttggggggatgatattgcaatctgcacgttcgtcctttctccgtggagtaatttttttttcaggaacgtgatctgatactacactagtactagtatgtgtttttgaggtctctggctaccatttttg

SEQ ID NO: 200730 - DNA, 1779 bp, Zea Mays
gctaccagaaaccagatcgcacgcctcagacttaagttaatcagagggtccacctgcagccagatcgtcactgcaattagtactgactctgccaagtcgccacgtgactaacccgcgaggtcgacgcggattttcttctttataccgcgggtaggcggactgggcggctgacggagccgcggagggaaccgagtggccccggcgacgcgaggccgaggcgagctaatctgacggtggcagtgacgactccaacgaccaggcgcggaggctgcactgctccagcgaaggtcgctgtatcggtgcagaaatcttgctttattatcatcccatcggagcatggctgcaccatgtcattcatgtctccattcccggggatggatctaagtaaaatggatcccgggactctgaccctccttggggcagctggttgtgtaatgctgactatgcatttcactgtgcaattggtgtcacaacatctcttctattggaaaaaccccaaggagcagaaagccatacttattattgtgctgatggctccactatacgctatctcttccttcgtgggtcttcttgatatccagggtagcaagacatttttcacattcttagatgctgttaaagaatgctatgaggcactggtgattgctaagtttatggcattgatgtacagctacttgaatatatctatcagcaagaacatagtccctgatgaaatcaaagggagggtgcttcatcattccttccctgtttctcttttcctgccccgcaatgtccgattggagcacaaaacattgaagcttctgaagtattggacctggcaatttgttattgttaggccagtatgttccattctgattattgcactccagcttcttgggctgtaccccagctgggtcagctggacgtttagtattatactgaacttttcagtctccatggccttatatgcattggttctcttctaccacttgtttgctaaagagctggcacctcacaagcctcttgcaaagttcttgtgcatcaaagggattgtcttcttctctttctggcagggttttgcgctcgatgttttaacccaagcaggcgtgatcaaatcccaccatttctggctggacgtggagcacatccaggaggcgatccagaacgtcctggtgatccttgagatggtggtgttctccgtcatccagcagtacgcataccacgtcgccccctacagcggcgctgacagggccaagtttgagaagaagaacgaatgaaccaggtttccaaaaagaatgaaagaaggaaaaaaactctctgctttctggtcgctcggagatggagcaccagtatttcctcacggatggacgacatacacaagttcatcgagtctcgcgagtagcgtatttggtagcgagttgtcgcgctgtaaaattacactgtccttgcgcgctgaataattttgctggctttgtcgttttggttttttgaacgttgtcgccgaggctatatagccaggactgttcgtcttgtacgagcgcgcgctctctctctctctctctctctgcggacttggcgaatccttttatgaataaaagctactgtcctgttctacagaggccgcactgggctgatgccgatgaaggttgcgggttgcctgcaaccacctgctgttggggggatgatattgcaatctgcacgttcgtcctttctccgtggagtaatttttttttcaggaacgtgatctgatactacactagtactagtatgtgtttttgaggtctctggctaccatttttg

SEQ ID NO: 200731 - DNA, 1107 bp, Zea Mays
attcattcttgacattgacactgtgggtacatacacaatgtgttatgaagccctcaagtatctcaaaaagggtggaccagggagaggtccttcctctggtggcctcatcattaacataagcgcaacgctgcaatacactgccgcttggtaccaaattcatgtctctgctgccaaggctggcgttgacggtatcacaagatcattggctctggaatggggaacagattacgacattagagtaaatggaattgcacctggaccaattcaagacactccaggaatgaggaaacttgcacctgaagaaatgggcaataaggggaaacgagaaacgatgccattatttaagcttggggagaaatgggacatagcaatggccgcactctatctagcttctgatgcaggaaaatatgtaaatggggctataattattgttgacggaggtctttggttgagtcgccctcgccatattcccaaggaggaagtgaaggcactctctaaagttgtcgagaagaaggttagggcatctggtgttggggtgccatccagcaaattgtgatgacatctttgactacgtagctcttcgatgtgttctgtacaacatatgtctatattgttgtcccactaatgttgtcagtttggctatgccaccagtccatgcagatgacttgttagggcttgttcgcttatttttaatccatatggattggaggggattgatatggattgggggagattttcacttactagggattaaaaccctctcaatccatatggattggggtagaaccgaacatggccttaagcggctgagcagtccatttagttgaagaaattcaaatatttattactgttgtcgtccaatttgtattagaaatagttgagatcggtatgggatcccaaccaagaggtgcgtattgccaaatatttacatgctgtctattcaggttgtcgattaaaagggtcatattaaagatttaacagtttgcgtctccccactgttgcaactctatgcaaatggttcacctcaacatgtgtgcaaatcatgacaaattggatgccggcagttgcaactagcctgaagttcagagaaataagagaaactgcatg

SEQ ID NO: 200732 - DNA, 2020 bp, Zea Mays
cggctccctaaccataatcgtgaccactaactgccgtaaggggaaaaataacgaaggaagcgaagcggcaacttccgccttctcttcgccagttactccacttccaatcgccgtctcataaatccgggctgccacttccgcctccatcgccgccagccgccgccttctcttcgccagttactccacttgcccgcaggccgcaccgcaccgccaccgctttcatcggacgatccactgagcaagccacgccaggcaggggctcgtacagggcgagagaaacccgcgcgctcgcccctgtcctgccgcgggatcgcagttgccgtccgcttcatccccggacccggaggtaggcaccaggcaggcggcggcaatgctaccgggctcgccggtgaagcgcctgctgcggcgggcggccaaggggcggcgggagaaggccgagctggcggggctggccgcggcggccgccgcgctgctgctgctctgcgccgcctcgctccgctgctcggccaccgcgcgcgggaggctctgggccggtggggtctccatcgcggcggcggggagtggcggcgaggaggagtgcgacctgttcgacggggactgggtctgggctggcggcggcggcgggtacccgctctacgactcccgggactgcccgttcctcgacgtcggcttccgatgcgccgagaacggccgccccgaggcgtcctacaccaagtggcgctggcagccgtcgcgctgccatcttcccagatttgatgccaaaagcatgctggagaagctacgaaacaaaagagtggtttttgttggtgattcaattggaaggaaccaatgggagtctctactttgtatgctctctagcgctgttcataacaagagctctatctacgaagttaatgggagtcccatcacaaagcacatgggtttcttgattttcaattttagagactacaattgcacggtggaatactacagatccccttttatagtccttcaaggccgtgcaccagcaggagcacctgagattgtccggtacagtattcgagtggatgcaatggattggatgtccgaccggggtaaatggaaggatgctgatgtactgatcttcaacactgggcactggtggaacaatgagaaaacaatcagggggggtgcctactttcaagtaggcgatgaggtcaaaatgggcatgagtgttgctgaggcttacagaagatcgatagagacattgtccgattggcttcgcaaagaagtcaacacgagcaagacccatgtcatctaccgcacatatgctcctgtgcatttcagagatggtgactggaagactggtgggagctgccacttggaaactcttccagacgcgatgccagtgaagtccctggacgaatgggccgacttgctccaacccgtggacgaatttctagggagcgatcttggatccgagctggctggtgtagacctgcttcgcgtgacgggaatgacggcccagagaaaagacggccacctctcggtctacctgagcccctcaggacccgtgccccgctacagacaggactgcagccactggtgtcttcctggagtccccgatgcctggaacgagcttctctacgccctcgtcatgaggaggcataagaagatggccggcactaggacaccggacgctgaagagggagatgtcttcagcagtggatcatcatcgtgacaaaacgagcttcgtagccatccatccatcctggctaggcgatgacagctgctgtttcacataggatgccggaatggcgagacacgtttttggaccatgggtgctgtttgcaagaagctgagctagacgtcagtggtagtatagctttgtgtgtggtgatggcaacttgtatggctaatggggaggtatttggaattggcagtgtaactagctagggtcgctacagcgaatgatgtacatatgtattcttttagcactcgttcgatgattcatattccatgtaggttttgatgggattaaaaagaaaattataaatttttt

SEQ ID NO: 200733 - DNA, 990 bp, Zea Mays
actagagtctagactagagccgcccgcccgcccgcccgcccgtgtgccgtttaccggagcacaacacaacgcggccccctcacggcgtggagtggattgggccgacgccgatcgagagcagaggagaggagcgcggtcggatagggtttgtctgggtgaggttttgagcgagagcgcagggcgagggaaggaggaggaggaggactggctcctggaggaggaggccggccggggcttggatggtcgcggagcgctcccgtaggtggtgtccatgggaaggtcgttcagggactcgctcaaggtgctcgaggccgacatccagcacgccaactccatgtgagtagccaagctcgcattccttctcgcgccatgtccagtgctcacttgctcagctcagaggagacctttgaccggtccttgggagttccagtgcttctgaatttaggagggaatatgatggcgcctcccttcagatgaggatggcatattgccctgctgcccactttttcctttttcttgtgcagtggacagactgcaaccttgctggtgcacttgggctgttgaggattctaatttataaggtttacgctgatgggacaaccaccatgtgtactcatgaaagaaaagcaagcattagggaattttatgctgtcatatttccctccttgatgcaattacatgaaagaatcaatgaagtggaggatagaaaacagaaagcaatatgtctagagaggtacagaagacgagatgaggatccgaaaactgtggtatcagagattgatgataatatagaggaggaatgtggcatatgcatggaaataaatgtcaaagttgttcttccaacctgtagccacgctatgtgcattaaatgctatcgtgaatggtacgaatctgcactcccgtttctaaaggttttgataattttagctattatgttgttcagacagttatgcactcctgcctgctcaagatgaaatactacgacatgtg

SEQ ID NO: 200734 - DNA, 802 bp, Zea Mays
actagagtctagactagagccgcccgcccgcccgcccgcccgtgtgccgtttaccggagcacaacacaacgcggccccctcacggcgtggagtggattgggccgacgccgatcgagagcagaggagaggagcgcggtcggatagggtttgtctgggtgaggttttgagcgagagcgcagggcgagggaaggaggaggaggaggactggctcctggaggaggaggccggccggggcttggatggtcgcggagcgctcccgtaggtggtgtccatgggaaggtcgttcagggactcgctcaaggtgctcgaggccgacatccagcacgccaactccattggacagactgcaaccttgctggtgcacttgggctgttgaggattctaatttataaggtttacgctgatgggacaaccaccatgtgtactcatgaaagaaaagcaagcattagggaattttatgctgtcatatttccctccttgatgcaattacatgaaagaatcaatgaagtggaggatagaaaacagaaagcaatatgtctagagaggtacagaagacgagatgaggatccgaaaactgtggtatcagagattgatgataatatagaggaggaatgtggcatatgcatggaaataaatgtcaaagttgttcttccaacctgtagccacgctatgtgcattaaatgctatcgtgaatggtacgaatctgcactcccgtttctaaaggttttgataattttagctattatgttgttcagacagttatgcactcctgcctgctcaagatgaaatactacgacatgtg

SEQ ID NO: 200735 - DNA, 1823 bp, Zea Mays
atcaaaccaaacagacctataatctatgcctcggccaggcaatttcggctccaaaccaaacaaaaaagcaggagtgcctgaccactggctaaaagttcgtatgcaaggggcccacttgtcgcaccgtgccgcgtgcgtgcaagcctagaagactcggcagcttttgcggccccgttctcttccccatcccctcttccctctctagccttccacccttcatccaccagccgctcctcgagcacccccgtcccgcgccgcctccggctccggcgagatgtcacgcttcggtcgatccggcccgccgccgccgatccgcgacacgtactcactcctcgtcctcaacatcaccttccgcacaactgctgatgacctcttccctctcttcgacaagtacggcgagattgtcgacatctacatcccaagggaccgccggactggtgactcgcgcggattcgcgttcgtgaggtacaagtacgaggacgaggcacagaaggcagttgaaaggctcgatgggagattggtagacgggagggagatcatggtgcagtttgccaagtacggcccaaatgctgaacggattaataaagggagaatagtggagccagttccaagaccaggggggcgttccaggagtcacagtccaagacggaggtaccgtgatgattatcgagatgaccatgatagagattatagaaggcgaagtcgtagccggagtagagatagatacacccgtgacaggtacagggatagggattaccgccatcgtagcccgagtcgcagctacagtcctgatgattacaagaagcgtgggagagacagtttgtcacctgagcgaagaagccctcgtcgtagccgcagtcctgatgattacaagaggcgtggcagagacagtgcatcaccagcaagtaagagccctagtcgctccccacctcgcaagatgtcaccttctcctgagagatctcccgtcaggcgcaacaatgaccgatctccacgctctcggagcccatcgacataagcgcaattcacttgcaaagcatcttgagtagctcaggatgaatggacttgctctgatcctatgtgtacgcatttgctcgatggtggcctcttctcagctaaagttgtgtagtgccgtctttcagttgctgcttcaaccttggaatactacttctgtttggcacctgaactgcttatcaaaaactttatttacatgatgcagtgaagatgtgctggctgatatgcggtcaacatgcacgtagcttactgttgaagttgatattatctgtgctgtttgcgttgttgatgatggctgatgagatgattgatgatgatggcactgcagctgcctgcaccatttgctgtctgcacctattatgctgacaaatgtcgaaagcttgtgggcacgtgcacggtgcagtacctgtaccattgtattgtgacagtggtgctggtgcgataaatttctcagtatggacactggagaggctactggtagatgggctcgtggctcgcaatctgcaaattggtatccacatccgtgtacgacgaagacgaggtgtttgttgaacagaattgctggcctatgaacttgtcttggtcatgtgtctgacatttgtgctaatgttttatgccatcttggctaaaaaacccattcgtagcacgaaagggttaattaggggtcctgattagcactcagatacaacaaagcagggcagttcgcttggcaacaagcacatgcaccattttatataagctaaattattcatactgcttcaggagctctagacatcgcttgggtggcacatactacacgttgttgtcttggc

SEQ ID NO: 200736 - DNA, 462 bp, Zea Mays
caagcctagaagactcggcagcttttgcggccccgttctcttccccatcccctcttccctctctagccttccacccttcatccaccagccgctcctcgagcacccccgtcccgcgccgcctccggctccggcgagatgtcacgcttcggtcgatccggcccgccgccgccgatccgcgacacgtactcactcctcgtcctcaacatcaccttccgcacaactgctgatgacctcttccctctcttcgacaagtacggcgagattgtcgacatctacatcccaagggaccgccggactggtgactcgcgcggattcgcgttcgtgaggtacaagtacgaggacgaggcacagaaggcagttgaaaggctcgatgggagattggtagacgggagggagatcatggtgcagtttgccaagtacggcccaaatgctgaacggattttttagggccacatgatgagc

SEQ ID NO: 200737 - DNA, 525 bp, Zea Mays
caagcctagaagactcggcagcttttgcggccccgttctcttccccatcccctcttccctctctagccttccacccttcatccaccagccgctcctcgagcacccccgtcccgcgccgcctccggctccggcgagatgtcacgcttcggtcgatccggcccgccgccgccgatccgcgacacgtactcactcctcgtcctcaacatcaccttccgcacaactgctgatgacctcttccctctcttcgacaagtacggcgagattgtcgacatctacatcccaagggaccgccggactggtgactcgcgcggattcgcgttcgtgaggtacaagtacgaggacgaggcacagaaggcagttgaaaggctcgatgggagattggtagacgggagggagatcatggtgcagtttgccaagtacggcccaaatgctgaacggattaataaagggagaatagtggagccagttccaagaccaggggggcgttccaggagtcacagtccaagacggagagggtgtggacag

SEQ ID NO: 200738 - DNA, 993 bp, Zea Mays
ctttatagtctaaatcttatcactgcctgtgaaaattcaagaagtggtacacaggttgcatttggacaaggaaactcttattatgcaagaaattttcccatgcccaaaaaggattcttcagcaggtggagcttcgaagttaccaaaagaatatgcagaaccatgggactatagccatgattatcctgttactctcccactaaggaagccctactctggaaatcctgaaattctggatgaggaagaatttggagaatcttctgccagcaggacccaagatgatgaattatctgcagcagagcagcttggattaatggatatgtcgtcggaatcacagttcctcttcttccagttgccatcctctcttcctttaccgaggcagccacaatcaggtgctgaccctaacgaagtccgcgatgagaaacgtgaggacatgaggccatcatcgcacaatggctcgaaactcaaagaggttcctgaaggctatatggggaaaatgctcgtatataagagtggtaaagtgaagatgaagataggagacactctctttgatgtttcatttggctcgaattgcatgttttcccaggaggttgcagcaatcaacatcagagaaaaacattgctgtacggtgggagagatcagcaagcgtgctatcatcaccccagatattaactacatgttgggttctgttgacaagatggaagaatagtccattggtttctttcgcgcaaaccatatagaccatattatgccattacaagatagttttgctttcttatagagaacgacctgtgataccctctcagacttcttcaagaaaagatgcctcaaacaaaggaatgtgcctaatttgacactgccgttagtttccacagcaaacgcataacacaactagactagacaggtctgcggacctttctcgatgccaacgtcggtagttcggatatgcctgctaattggttcagtttgcttcactgaaggctgcaggtctgat

SEQ ID NO: 200739 - DNA, 1752 bp, Zea Mays
caactgctgcagcgaaggcacacagccgccaccgtttcttcatctcccagcatcttcttcctcgcagactcgcagtgccggcgctccatcttccgctccctcccttacacgtgctcggcacgcaggcgacggcggctacgttcgggctcgggctctcagcaaccgcgtcagcagctgcccctcccgcttctcgccagtcgcaccgtgccctcgcctccggtcctcagcacaccagccgtgaccctgcgtcataacagcggtacaagggtgaacaaagaacatcgagaggaagacaatatgccgaagaaggggactaaatctaagaaggagaaggtggacgatgtgcccaatgaacaagaaaataagcttccagactacctggagctccagcgcacacgtgtcgtctgcaatgctgatgcccccattcatgtttccaatactcgggtgcatttgctgctatgggaattgataatagcgtgtcagtggataaattttgcaagaatttcaaaattgaaataaatcgtctcactgaagattatatggagttcgatatgattggtattgatgcatcaatagccaatgctttccggagaatcctcatttcagaggttccaactatggcaattgagaaagtcttcatggctgacaacaactcagttatagcagatgaggttctttcacatagactaggacttattccacttgatgcagatccaagactctttgaatatatctcagaaaacgatgtcccaaatgaaaggaatactattgtttataaactgcacgtttcttgtccaaagaattctcaacgaattacagtgaaatctagtgaactagagtggttaccagaaggtagccaattaagcatgtcagcccctgcacagtctggagacaaacagaagactttcacttccttcagtcaaagccaaaaggagatcttagaaaagcctcttggtgtgaagtataaagatattactattgccaggcttgggccaggacaggctatcgagctcgaggcacatgctgttaagggaactgggaacgttcacgccaagtggtctccagttgctacagcctggtacagaatgctccctgaggttgttattcttaaagaagttgaaggccctcaggcagaggagctggtgaataagtgccgggttaatgtttttgacatcgaagacctggctaacggtggaaagagggctgttgttgcgaggccaagggcatgcacgctctgcagagaatgtgtgatgggaccaaatgagaaacaagtggagctacggcgtgtcagagaccatttcatattcaccatcgagtccaccggaagcatgcccccggaggtgctgttcacagaagccgtgaagattttggaagagaagtgcgcgagggtcatatctgagctatcctgagaggccggcggcactgtgcagcactggagttagagtaaaccagctcaggctgcagtatctgctgtttttgatggagactagtgtgcgccattaaacattttttttgtggtgttggatatttgggtcagcaaatgtaagctgtttatatcatgtaacgcagtgtaatgttagattaaactgtggcaggtgatcgaaatggcagctgtatcaaaggtagacgtcggctgttagtccgcaagcactgtatttttgcgtttaggtaggtgactcggcccaggttacatggaaaatgaattatttttttcttgagaaaaatgaaaattgcttgaaaaaacggggttgt

SEQ ID NO: 200740 - DNA, 1743 bp, Zea Mays
caactgctgcagcgaaggcacacagccgccaccgtttcttcatctcccagcatcttcttcctcgcagactcgcagtgccggcgctccatcttccgctccctcccttacacgtgctcggcacgcaggcgacggcggctacgttcgggctcgggctctcagcaaccgcgtcagcagctgcccctcccgcttctcgccagtcgcaccgtgccctcgcctccggtcctcagcacaccagccgtgaccctgcgtcataacagcggtacaagggtgaacaaagaacatcgagaggaagacaatatgccgaagaaggggactaaatctaagaaggagaaggtggacgatgtgcccaatgaacaagaaaataagcttccagactacctggagctccagcgcacacgtgtcgtctgcaatgctgatgcccccattcatactcaaggtttccaatactcgggtgcatttgctgctatgggaattgataatagcgtgtcagtggataaattttgcaagaatttcaaaattgaaataaatcgtctcactgaagattatatggagttcgatatgattggtattgatgcatcaatagccaatgctttccggagaatcctcatttcagaggttccaactatggcaattgagaaagtcttcatggctgacaacaactcagttatagcagatgaggttctttcacatagactaggacttattccacttgatgcagatccaagactctttgaatatatctcagaaaacgatgtcccaaatgaaaggaatactattgtttataaactgcacgtttcttgtccaaagaattctcaacgaattacagtgaaatctagtgaactagagtggttaccagaaggtagccaattaagcatgtcagcccctgcacagtctggagacaaacagaagactttcacttccttcagtcaaagccaaaaggagatcttagaaaagcctcttggtgtgaagtataaagatattactattgccaggcttgggccaggacaggctatcgagctcgaggcacatgctgttaagggaactgggaacgttcacgccaagtggtctccagttgctacagcctggtacagaatgctccctgagaagttgaaggccctcaggcagaggagctggtgaataagtgccgggttaatgtttttgacatcgaagacctggctaacggtggaaagagggctgttgttgcgaggccaagggcatgcacgctctgcagagaatgtgtgatgggaccaaatgagaaacaagtggagctacggcgtgtcagagaccatttcatattcaccatcgagtccaccggaagcatgcccccggaggtgctgttcacagaagccgtgaagattttggaagagaagtgcgcgagggtcatatctgagctatcctgagaggccggcggcactgtgcagcactggagttagagtaaaccagctcaggctgcagtatctgctgtttttgatggagactagtgtgcgccattaaacattttttttgtggtgttggatatttgggtcagcaaatgtaagctgtttatatcatgtaacgcagtgtaatgttagattaaactgtggcaggtgatcgaaatggcagctgtatcaaaggtagacgtcggctgttagtccgcaagcactgtatttttgcgtttaggtaggtgactcggcccaggttacatggaaaatgaattatttttttcttgagaaaaatgaaaattgcttgaaaaaacggggttgt

SEQ ID NO: 200741 - DNA, 1740 bp, Zea Mays
caactgctgcagcgaaggcacacagccgccaccgtttcttcatctcccagcatcttcttcctcgcagactcgcagtgccggcgctccatcttccgctccctcccttacacgtgctcggcacgcaggcgacggcggctacgttcgggctcgggctctcagcaaccgcgtcagcagctgcccctcccgcttctcgccagtcgcaccgtgccctcgcctccggtcctcagcacaccagccgtgaccctgcgtcataacagcggtacaagggtgaacaaagaacatcgagaggaagacaatatgccgaagaaggggactaaatctaagaaggagaaggtggacgatgtgcccaatgaacaagaaaataagcttccagactacctggagctccagcgcacacgtgtcgtctgcaatgctgatgcccccattcatactcaaggtttccaatactcgggtgcatttgctgctatgggaattgataatagcgtgtcagtggataaattttgcaagaatttcaaaattgaaataaatcgtctcactgaagattatatggagttcgatatgattggtattgatgcatcaatagccaatgctttccggagaatcctcatttcagaggttccaactatggcaattgagaaagtcttcatggctgacaacaactcagttatagcagatgaggttctttcacatagactaggacttattccacttgatgcagatccaagactctttgaatatatctcagaaaacgatgtcccaaatgaaaggaatactattgtttataaactgcacgtttcttgtccaaagaattctcaacgaattacagtgaaatctagtgaactagagtggttaccagaaggtagccaattaagcatgtcagcccctgcacagtctggagacaaacagaagactttcacttccttcagtcaaagccaaaaggagatcttagaaaagcctcttggtgtgaagtataaagatattactattgccaggcttgggccaggacaggctatcgagctcgaggcacatgctgttaagggaactgggaacgttcacgccaagtggtctccagttgctacagcctggttgttattcttaaagaagttgaaggccctcaggcagaggagctggtgaataagtgccgggttaatgtttttgacatcgaagacctggctaacggtggaaagagggctgttgttgcgaggccaagggcatgcacgctctgcagagaatgtgtgatgggaccaaatgagaaacaagtggagctacggcgtgtcagagaccatttcatattcaccatcgagtccaccggaagcatgcccccggaggtgctgttcacagaagccgtgaagattttggaagagaagtgcgcgagggtcatatctgagctatcctgagaggccggcggcactgtgcagcactggagttagagtaaaccagctcaggctgcagtatctgctgtttttgatggagactagtgtgcgccattaaacattttttttgtggtgttggatatttgggtcagcaaatgtaagctgtttatatcatgtaacgcagtgtaatgttagattaaactgtggcaggtgatcgaaatggcagctgtatcaaaggtagacgtcggctgttagtccgcaagcactgtatttttgcgtttaggtaggtgactcggcccaggttacatggaaaatgaattatttttttcttgagaaaaatgaaaattgcttgaaaaaacggggttgt

SEQ ID NO: 200742 - DNA, 2400 bp, Zea Mays
gcagtcgcagagctgtcgtgttcctttgctctccccgtccatgcttttgcaaaattgctccagtcaagggctagtccagtgccccctgaacccgcatccggagctcagaaacccccgccaccggagcccggacggagacgatgccggagacccatccgccgccgccgaggccggtgatgctcgccgacctcaactttgaaccagcggagagcgacggcgaggaccgcccaccgacccccgcacccaaccccgccgccgccgccgccgccgctgcggctccggcggtcgccgctgactcgtccacgaagctttggttcatgtggcccgaaaaatgcctaagaatgctcatgcacattttatgttgggtttgatgtatcaaagacttggtcaggcacagaaggcaatagcatcatatgaaaagtcaactgaaatactgctacaagatgaagaagaagtgcggagacctgatttactctcatcagtgaggatacaccacgcacagtgcattttgcaagcaagcatgggggatagttttgatgaagagcttgaaactggtgagttagatgacattctttcgaagttgaagagttcagttgagttagatcacaggcaagcagctgtttggaatatcctaggtttagttcttcttcggggtggtcagatacagagtgctatctcagttctatcttctctcacggctgttgctccagactacttggactcccttgcaaatcttggcgttgcatacattcaaagtgggaagctagagctgtctgcaaagtgctttcaagaacttcttctaaaagatcaaaaccaccccgctgctctggtgaactatgcagttcttcttctgtgtagatatggatctttgtctgcaggggcagggggcaatgtcagcacaggtccttacgtgcatcagaaagaagccttagttgttgcaaaagagtgcttgcttgcagcagtgaaggctgatcctagagctgcatcagtttgggttaatcttgcaaatgcatattacatggatggtgagcataagaactcaaagaggtgcttggagcaggcagcaaaattggaacccaatcatatgcctgctcggtatgctattgcagttcaccgtatcagagatgctgtaaggtcacaatgttctgatgatcaacttctttgggctgcaaatgaaatggcaacagttctaaaagaaggagacccttccgcagttgacgccccaattgcatgggctggattggcaatggctcacagggcacaacatgaaattgcagccatctatgatactgaaaacatcaatcttaatgatgcagaagagcgagctcaatatacactaaaacaggcaatccaagaggacccagatgatgctgttcaatggcatcaacttggcctgtacaatatttgcatgacccggttcagcaggtctgtaaattttcttaaagcagccttagcccgttccccagattgcagttatgcttggtcaaatcttggtattgcgttgcaactatcagacgatccatcctctgaaactgtatataagcgggcactggtactatcatcaactcagcagctgcacgcaatcttctctaatcttggaattctttatcggcaacataggaactatgaatttgcaaggaagatgttattaaggtcgttggaactgtgtcctggatttgcaccagctagcaacaacctgggtcttgtatttgtcgctgagggccgttgggaggatgctaaaagctggtttgagaaagctctgcaatctgatcccctgcttgatgcggccaaatcgaacttgttaaaagtcctcacattgtctacgaaacagtagaacaagagaagacctaactcctaaggaaattgccactgaagcctcagagttcagacacggaagcgcggtcaccaaatctctgttctgaagtgtctcaactgccagctcaaaattgatgcttggtgcctctagtctactgctcattgctcacagagtcacaggtgtaggaagtttcagaagtgcggcttcgaagactgcatttgattttgactgagttgctgcctatatgacaatcaaagctgcacaggctccgaagtggctgtgatgtgttcttaaagagtcgcatcagcgcaggaagagcccagattttgaagttcatgtgtagctaaatttcgatataagcttgaacggcttcccttagctgatgtatataaataaatatactccaacttgaggtgtactccaagttgagcatgtgcaagttataggttcagtgttccagagcaacttatggttctgtgcggtgaaactaacagcatctaaacctcaaatttggcagcaatttcactttggagtcaaaagggcgtcctacgagtgtataaaaatggagacgttaactgattaac

SEQ ID NO: 200743 - DNA, 2846 bp, Zea Mays
tgcttttgcaaaattgctccagtcaagggctagtccagtgccccctgaacccgcatccggagctcagaaacccccgccaccggagcccggacggagacgatgccggagacccatccgccgccgccgaggccggtgatgctcgccgacctcaactttgaaccagcggagagcgacggcgaggaccgcccaccgacccccgcacccaaccccgccgccgccgccgccgccgctgcggctccggcggtcgccgctgactcgtccacgaagagtggcaatgaagagggtggtttgacaaaaactgtgatcactacaaaggataccgacactgttgaatgtgaagatgttgatcaacattgtcaaggggcttctgctccacgtgaggaaaaagttagcaacctgaaagctgctttggttcatgtggcccgaaaaatgcctaagaatgctcatgcacattttatgttgggtttgatgtatcaaagacttggtcaggcacagaaggcaatagcatcatatgaaaagtcaactgaaatactgctacaagatgaagaagaagtgcggagacctgatttactctcatcagtgaggatacaccacgcacagtgcattttgcaagcaagcatgggggatagttttgatgaagagcttgaaactggtgagttagatgacattctttcgaagttgaagagttcagttgagttagatcacaggcaagcagctgtttggaatatcctaggtttagttcttcttcggggtggtcagatacagagtgctatctcagttctatcttctctcacggctgttgctccagactacttggactcccttgcaaatcttggcgttgcatacattcaaagtgggaagctagagctgtctgcaaagtgctttcaagaacttcttctaaaagatcaaaaccaccccgctgctctggtgaactatgcagttcttcttctgtgtagatatggatctttgtctgcaggtacatgaatgcttgcctgccataatcttctagtacttgccattttcctgtcatatcataaaggcatgtttttccctatgctattttgctctagccaaagtagtgacactagacaattagataatacacaccttattgttggatgcgttacatcaatcgatttgtttgtttatgtccactaataataagtccagaaagtattcttttccctccaaaaatgtgaccaacctaggagaacgagaaactaagcgtttttttcgttgagaagaatataggcacccaaattcaagttgagagaagacttgaacctgggtggctgggtgcatgagcacacctcccacctaatcagggcagggggcaatgtcagcacaggtccttacgtgcatcagaaagaagccttagttgttgcaaaagagtgcttgcttgcagcagtgaaggctgatcctagagctgcatcagtttgggttaatcttgcaaatgcatattacatggatggtgagcataagaactcaaagaggtgcttggagcaggcagcaaaattggaacccaatcatatgcctgctcggtatgctattgcagttcaccgtatcagagatgctgtaaggtcacaatgttctgatgatcaacttctttgggctgcaaatgaaatggcaacagttctaaaagaaggagacccttccgcagttgacgccccaattgcatgggctggattggcaatggctcacagggcacaacatgaaattgcagccatctatgatactgaaaacatcaatcttaatgatgcagaagagcgagctcaatatacactaaaacaggcaatccaagaggacccagatgatgctgttcaatggcatcaacttggcctgtacaatatttgcatgacccggttcagcaggtctgtaaattttcttaaagcagccttagcccgttccccagattgcagttatgcttggtcaaatcttggtattgcgttgcaactatcagacgatccatcctctgaaactgtatataagcgggcactggtactatcatcaactcagcagctgcacgcaatcttctctaatcttggaattctttatcggcaacataggaactatgaatttgcaaggaagatgttattaaggtcgttggaactgtgtcctggatttgcaccagctagcaacaacctgggtcttgtatttgtcgctgagggccgttgggaggatgctaaaagctggtttgagaaagctctgcaatctgatcccctgcttgatgcggccaaatcgaacttgttaaaagtcctcacattgtctacgaaacagtagaacaagagaagacctaactcctaaggaaattgccactgaagcctcagagttcagacacggaagcgcggtcaccaaatctctgttctgaagtgtctcaactgccagctcaaaattgatgcttggtgcctctagtctactgctcattgctcacagagtcacaggtgtaggaagtttcagaagtgcggcttcgaagactgcatttgattttgactgagttgctgcctatatgacaatcaaagctgcacaggctccgaagtggctgtgatgtgttcttaaagagtcgcatcagcgcaggaagagcccagattttgaagttcatgtgtagctaaatttcgatataagcttgaacggcttcccttagctgatgtatataaataaatatactccaacttgaggtgtactccaagttgagcatgtgcaagttataggttcagtgttccagagcaacttatggttctgtgcggtgaaactaacagcatctaaacctcaaatttggcagcaatttcactttggagtcaaaagggcgtcctacgagtgtataaaaatggagacgttaactgattaac

SEQ ID NO: 200744 - DNA, 1278 bp, Zea Mays
tttggatgggtccccatcgaagaaaataatgttaagagccatggtttcagaaatgtgattatctataaggttccagagactccactgcacagacctactgagctctctcctcttctcaaccattcaccagtaaacgaatccaccgaccaccactcccaggagcagggtattccgactttgattacatggagccaaggaggagatgaggtgttcctggaaggatcgtgggataactggacatcgaggagggcacttgagagatctggaaaagatcacgccgtcttgttggttctgccatccggagtctaccattaccggatcatcgtggacggggagctgaggtacatccctgaactacctcacgcagctgacgaaagagggcgagtggccaacgtcctcgatgtccatgactacgtgccagaaagcctcgacagcgtagccgagttcgaagcgcccccgtctcccgtgcacagctacgacctgcattgcccgggcgacgaggagttcgccaaggagccgcccacgctcccgccccagcttctcgtgtccgtcctcgggggggacgtcgatagcgctggccatggcaatcaagctttgaagccacagcacgtcgtcctcgaccacctgttcatcgagaaagggtgggggtcgcagtcgctgctcgccctcggcgtcacccaccggtttgagtccaagtacgtgagctttgtgctctacaagccgttggagaggtgatggtggtactgtctactagctgtgtgtgagtggaagaacagagtggactgctggaggtgaataatgtgtgtgtgtgcccttgtatagaagggaaatgcatgcaggagcttgtagctgtagctgatcttttattttatttttttattttcctttcactttcgacgaaagtaataaattagttgaccatgcatgcatgcttcgtgcaaatctgaatgtttgtgtggtctgaatgcgtgcagatatccggactttgttctgatgtggagacaccatgggaaaaaagaaaaaaaaaggaaaataacgacaccagcaaatcagtggataaagcggatttgtcgatttgatggaggcggtagttaactaggacaggtaaagaaaatgatggatgcccgctgatgtcgatgttcaccaaagggacgatagataacgtcgtgcgatcacgagctgcctggatttgtcaaaaagcttgacagcgactaggggaggaaatggtctttttctctcgattttttggagtccgaattcgtttttatgaatgatttc

SEQ ID NO: 200745 - DNA, 1402 bp, Zea Mays
gtttgatgtacatggtggaatgaattgtttggatgggtccccatcgaagaaaataatgttaagagccatggtttcagaaatgtgattatctataaggtcagttgaggaatattgtgattggccacaccgccacaagtacactcattcagttaggcttaaatgtagccgctagttagacctgcaacagaacagagttccagagactccactgcacagacctactgagctctctcctcttctcaaccattcaccagtaaacgaatccaccgaccaccactcccaggagcagggtattccgactttgattacatggagccaaggaggagatgaggtgttcctggaaggatcgtgggataactggacatcgaggagggcacttgagagatctggaaaagatcacgccgtcttgttggttctgccatccggagtctaccattaccggatcatcgtggacggggagctgaggtacatccctgaactacctcacgcagctgacgaaagagggcgagtggccaacgtcctcgatgtccatgactacgtgccagaaagcctcgacagcgtagccgagttcgaagcgcccccgtctcccgtgcacagctacgacctgcattgcccgggcgacgaggagttcgccaaggagccgcccacgctcccgccccagcttctcgtgtccgtcctcgggggggacgtcgatagcgctggccatggcaatcaagctttgaagccacagcacgtcgtcctcgaccacctgttcatcgagaaagggtgggggtcgcagtcgctgctcgccctcggcgtcacccaccggtttgagtccaagtacgtgagctttgtgctctacaagccgttggagaggtgatggtggtactgtctactagctgtgtgtgagtggaagaacagagtggactgctggaggtgaataatgtgtgtgtgtgcccttgtatagaagggaaatgcatgcaggagcttgtagctgtagctgatcttttattttatttttttattttcctttcactttcgacgaaagtaataaattagttgaccatgcatgcatgcttcgtgcaaatctgaatgtttgtgtggtctgaatgcgtgcagatatccggactttgttctgatgtggagacaccatgggaaaaaagaaaaaaaaaggaaaataacgacaccagcaaatcagtggataaagcggatttgtcgatttgatggaggcggtagttaactaggacaggtaaagaaaatgatggatgcccgctgatgtcgatgttcaccaaagggacgatagataacgtcgtgcgatcacgagctgcctggatttgtcaaaaagcttgacagcgactaggggaggaaatggtctttttctctcgattttttggagtccgaattcgtttttatgaatgatttc

SEQ ID NO: 200746 - DNA, 758 bp, Zea Mays
gttctgtggcacatgaaagtactgagaaaacattgtataaggatatagctccaaaaactgttaatgacttgaagcttatcaatggtggaaggatattggagaataaccggacacttgcagagtcccgtgttccagtaggagagatcccaggtggtgtaattacaatgcatgtggtagtgcggcctccacaagctgacaaaaacaagaagcagcttgccaattcccccaagcagaacagatgtggatgcaccattctctgataaggcgtctgcttggtgctgtacaatctgtgtgtacacataagattttgtatgtgctttgctgtgttcacacaagcatggattcgttttgatatccaattcttgaagccatacaaattccagaagtaagaacccacggaatacgaagatttctggatcgttttgttctagagtgtaggattggatgcttcctgctgtataaattgtgttgtcaaaactgaaaaaaaagtctctttcttttctgctatattgacttattatcgattctttctagctcggttgcttttgattcgtgtaacagaaatattgtactcatgtatatgtaacttgcaaaaggagtaatgtatggtgttatggtaattggtaaaggggaaacaaagaggtgaaaagagcgcatggctgtccaatggttttacatttgattatttggtgagcatgacctgaccctgcatgcagtagatgaaggtccagtgatgaccgtggacacaatttgctctg

SEQ ID NO: 200747 - DNA, 4484 bp, Zea Mays
cgccggatgccggatcaccctaccccaccccaccaatgcgatgaagtgccactctgtggccgcgctctggtcgccgttgccgccgtcacaccacgtcaccgccgctgccacaaccccggtcgcgctcttcaccggcgccgccgacggcaccgtcctccactggccactggcgctcgcctcagcttccccatctccgcgcccgtcttccctcctctgcgcccacgctgctgccatcacctccctctgcccactcccctcaccggcctcccttcttgtcgcctgcaccgcgggagtgctctccctcttctccacctacgcacccctccgctgcctccgccgccgctccctcccgctctgggtcggctcaccctccctcatcgcctcgctcccgtccatcacctccgccgaccctcgagtcgcgatcctctgccacgctcccgacgacggccaccgtcacgtttcagcactcgtagtcgtcgacgcacgcaccctcgccgtcctctacaccgtcttccatgggattctctcggtcgggactccgaatgcgatcgcggttagtggcggcggtgatgatgcagtcagcgttgtgttggctgacgcgcagggtcgggtgcaggtgatgcccgttgccgagggcgcggctgtcgaagtggacccacccaggcgtctcatcgtgagctcggtggccagcgtcgcgtcggcggagttggcggacgagagggtggaagccgtggcgttgtctcatgatgggaagaacgtggcgttggtgctgaagactagatgtttgttgaaatgtgtcactgagggggttgtgctcggtgaggtatctctgctgggtacttctctttgcaaggacaaaaacacagtagacaaggtatgcactgctggagcttttttcctcagcagtgatgaatgggatgctcatgtttcagacgatggcgttgtggttaggaatttggtgttgtggagtaacaatggtgctgtcacaatgtacaggattgctcttggtagctcatactttgactctgagatagtgtgtgaaattcctagcaacttatctatgcaaggagagggactagaagttaaattttgctggtcaaatcagcatcttgttagggtggaatgttgctcctataaggtagctgggtcattgttgtggaaaccaacagtcgccatttggtgtatggatcagttcgaactgagtaaaacagtgaatacacaaaaaccacctatgaggaaaatgcttggagaaggtggtcttcagggagaagaatttagaccagagccttctcattctcaatacaatatcaaccgagggtcggaagtgatttcacagatgtgctcattagaaaggtatagagggacagtgtcttcgtcaatgttactttctgaggattcttatgctccatatgctgtagtttatggtttccataatggtgacatagaagttatccgatttctgaacttgtcacctgctgctgcaaaatttggtggtcgagggctttacccacatatttccgagaggttatttttggggcacaagggagcaattctttgtttggctgcacattacatgcatgcacaccctgactctagaaacttccaccgagcactcatatcagggagtttagattgtacagttcgtgtctgggatctagatgctggcactcttctttctgtgatgcatcatcatgttggctcagttaagcaaatcgtactaccacctccatggacataccacccttgggatgactgcttcctttctgttggagaagatggccttgtggcgcttgtttcacttcaaaccatgcgggttgagaggatgtttcctggccatccggattatgcatcattggtagcttgggatggagtaaaagggtacatagcttgtttatgcaagaatctccactcttgcaatgatgcaggtagtggattatatatttgggatctgaaaacgggtgctcgagaacgtgttatcaatggcactgcttctcagttagcgtttgagcacttctgcaggggtatatcgaaaaacacagttactggtagcatcttaggaggaacaacttcagcgtcttccttacttgttccaatttttgaagacatgagccacattcggtctcatgcagataaaaatggtcatgacatttcatccgtgtcaaccaaccttcacaatggatgtacagattctgtgactgtaaatgcccctacaacatatgattttaagggaaagacgccagctccagatgaagctcatgaattccatggagataattctgtatacaattcaggaaaggctgtttcttcccacagtatccataataaaaaaataaagtgccctataaagtgctcttgcccctatcctggcattgcaagtctgaggtttgacctcacggcaatcatgtccacacaaggcatgacaaacagcaatagtgataggcatttgaaagatcatctccatagtgagaatcctaaagaaatgttgcagcctggaactttagacagtccttctcgtgttcatgaaatggatagcccctctagagagtcattggaagggtgtttacttcgatttagcctctgttttttgcatttatgggatgttgattgcgagctagacaaattacttgtagatgagatgcaagtttgcaagccagaaggctgccatatagcaactggggtggtaggagacaaaggctcatttacattgatgttcccaggcaaagaagccactcttgagctttggaagtcttcagccgaattttgtgccatgaggtcactgtctataatatctcttgctcaactcatgattaaattatctcgttcttgtacaaattctagcagtgctttggcagcattttatacaaggcattttgctgaaaaggttccagatataaagcctccatccctacagcttttggtgagcttttggcaacacccttcggaacatgtgcgaatggctgcacgttccttgttccactgtgcagctccccgttctattccacaaccactacgagtaaacaaaaataaagtggtcaatgcccccttgtcttcatcagataatatgaatgttcttatatgtgctgtgcagactgcctctgtatccaatcatggagagttgaaggaagatgatgaaaatgttgataaagatgatattgacactgctaatatgatcttatggttggaatcatttgaaaatcaggagtggttatcatggataggaggcacaagccaggatgcagtggcgtcaaatatcatagttgcagctgctttggtcgtttggtatccaagtgtcgtgaaagctaaactttcaagtttagttgttagtcaactaatcaagttagttatgtcgatgaatgatcgatatagttcaactgcagctgaacttctagcagagggaatggaaaacacttggaaggcatgcttgggtgctgagatcactcattttatgagtgatatccttttccaaattgagtgcctaagcactgcaccttctagcaatgctatcaataaaactgcagtggccattacaatgcgagaagcattggttggcacccttttaccaagcttggctatggctgatgtaacaggattttttggtgtaatagagagccaaatttgggctacttcgtctgattcacctgttcatgtcgcttcaatcaaaaccattatccgtgtagttcgaggtgcgccgaagtccttggtcccatacctcgacaaggcaatcaactacattctacacactatggatccaagcaatctaataatgcgaaaagcttgtattatcagttcaatgatggctctaagagaaatggcacgtgtatttccgatggttgctctcaatgagtcaatgacaaagctagctgttggtgatgctattggagagatttatgatggtacaattcgagtctatgacatagaaagggtctggttgccttctctgagaacggattgatgataagatggtggtccttaggtagtgcctggtgggagaggctgagcagaagccttactcctattcaatgcacaaagcttatctatgttcctccatgggaaggattttcacctaactctgctcgcttgagtataatttctagcattttagatgataaacctggaaggtcagagaaggaactaggcgaggcggataatctgaagttattgcttcataatcttgacctttcataccgtcttcactggattggtggaaagactatcaaacttacgaggcatggccaggatttgggtacatttcagttgtgatgggcttacccatgaatattgagttgctttgtagtgttgaaagacagctaattcgatggctggcaagtctaacaagaatcaccagtacattcatatgtcatgtgaggtaccttgatgtttctttgactgttaaaagcattgtctggtacagttcataaattggatccctatgtatggtaaataaaaaaactgaatgcaatttgattccatgttacaagactgct

SEQ ID NO: 200748 - DNA, 4601 bp, Zea Mays
cgccggatgccggatcaccctaccccaccccaccaatgcgatgaagtgccactctgtggccgcgctctggtcgccgttgccgccgtcacaccacgtcaccgccgctgccacaaccccggtcgcgctcttcaccggcgccgccgacggcaccgtcctccactggccactggcgctcgcctcagcttccccatctccgcgcccgtcttccctcctctgcgcccacgctgctgccatcacctccctctgcccactcccctcaccggcctcccttcttgtcgcctgcaccgcgggagtgctctccctcttctccacctacgcacccctccgctgcctccgccgccgctccctcccgctctgggtcggctcaccctccctcatcgcctcgctcccgtccatcacctccgccgaccctcgagtcgcgatcctctgccacgctcccgacgacggccaccgtcacgtttcagcactcgtagtcgtcgacgcacgcaccctcgccgtcctctacaccgtcttccatgggattctctcggtcgggactccgaatgcgatcgcggttagtggcggcggtgatgatgcagtcagcgttgtgttggctgacgcgcagggtcgggtgcaggtgatgcccgttgccgagggcgcggctgtcgaagtggacccacccaggcgtctcatcgtgagctcggtggccagcgtcgcgtcggcggagttggcggacgagagggtggaagccgtggcgttgtctcatgatgggaagaacgtggcgttggtgctgaagactagatgtttgttgaaatgtgtcactgagggggttgtgctcggtgaggtatctctgctgggtacttctctttgcaaggacaaaaacacagtagacaaggtatgcactgctggagcttttttcctcagcagtgatgaatgggatgctcatgtttcagacgatggcgttgtggttaggaatttggtgttgtggagtaacaatggtgctgtcacaatgtacaggattgctcttggtagctcatactttgactctgagatagtgtgtgaaattcctagcaacttatctatgcaaggagagggactagaagttaaattttgctggtcaaatcagcatcttgttagggtggaatgttgctcctataaggtagctgggtcattgttgtggaaaccaacagtcgccatttggtgtatggatcagttcgaactgagtaaaacagtgaatacacaaaaaccacctatgaggaaaatgcttggagaaggtggtcttcagggagaagaatttagaccagagccttctcattctcaatacaatatcaaccgagggtcggaagtgatttcacagatgtgctcattagaaaggtatagagggacagtgtcttcgtcaatgttactttctgaggattcttatgctccatatgctgtagtttatggtttccataatggtgacatagaagttatccgatttctgaacttgtcacctgctgctgcaaaatttggtggtcgagggctttacccacatatttccgagaggttatttttggggcacaagggagcaattctttgtttggctgcacattacatgcatgcacaccctgactctagaaacttccaccgagcactcatatcagggagtttagattgtacagttcgtgtctgggatctagatgctggcactcttctttctgtgatgcatcatcatgttggctcagttaagcaaatcgtactaccacctccatggacataccacccttgggatgactgcttcctttctgttggagaagatggccttgtggcgcttgtttcacttcaaaccatgcgggttgagaggatgtttcctggccatccggattatgcatcattggtagcttgggatggagtaaaagggtacatagcttgtttatgcaagaatctccactcttgcaatgatgcaggtagtggattatatatttgggatctgaaaacgggtgctcgagaacgtgttatcaatggcactgcttctcagttagcgtttgagcacttctgcaggggtatatcgaaaaacacagttactggtagcatcttaggaggaacaacttcagcgtcttccttacttgttccaatttttgaagacatgagccacattcggtctcatgcagataaaaatggtcatgacatttcatccgtgtcaaccaaccttcacaatggatgtacagattctgtgactgtaaatgcccctacaacatatgattttaagggaaagacgccagctccagatgaagctcatgaattccatggagataattctgtatacaattcaggaaaggctgtttcttcccacagtatccataataaaaaaataaagtgccctataaagtgctcttgcccctatcctggcattgcaagtctgaggtttgacctcacggcaatcatgtccacacaaggcatgacaaacagcaatagtgataggcatttgaaagatcatctccatagtgagaatcctaaagaaatgttgcagcctggaactttagacagtccttctcgtgttcatgaaatggatagcccctctagagagtcattggaagggtgtttacttcgatttagcctctgttttttgcatttatgggatgttgattgcgagctagacaaattacttgtagatgagatgcaagtttgcaagccagaaggctgccatatagcaactggggtggtaggagacaaaggctcatttacattgatgttcccaggcaaagaagccactcttgagctttggaagtcttcagccgaattttgtgccatgaggtcactgtctataatatctcttgctcaactcatgattaaattatctcgttcttgtacaaattctagcagtgctttggcagcattttatacaaggcattttgctgaaaaggttccagatataaagcctccatccctacagcttttggtgagcttttggcaacacccttcggaacatgtgcgaatggctgcacgttccttgttccactgtgcagctccccgttctattccacaaccactacgagtaaacaaaaataaagtggtcaatgcccccttgtcttcatcagataatatgaatgttcttatatgtgctgtgcagactgcctctgtatccaatcatggagagttgaaggaagatgatgaaaatgttgataaagatgatattgacactgctaatatgatcttatggttggaatcatttgaaaatcaggagtggttatcatggataggaggcacaagccaggatgcagtggcgtcaaatatcatagttgcagctgctttggtcgtttggtatccaagtgtcgtgaaagctaaactttcaagtttagttgttagtcaactaatcaagttagttatgtcgatgaatgatcgatatagttcaactgcagctgaacttctagcagagggaatggaaaacacttggaaggcatgcttgggtgctgagatcactcattttatgagtgatatccttttccaaattgagtgcctaagcactgcaccttctagcaatgctatcaataaaactgcagtggccattacaatgcgagaagcattggttggcacccttttaccaagcttggctatggctgatgtaacaggattttttggtgtaatagagagccaaatttgggctacttcgtctgattcacctgttcatgtcgcttcaatcaaaaccattatccgtgtagttcgaggtgcgccgaagtccttggtcccatacctcgacaaggcaatcaactacattctacacactatggatccaagcaatctaataatgcgaaaagcttgtattatcagttcaatgatggctctaagagaaatggcacgtgtatttccgatggttgctctcaatgagtcaatgacaaagctagctgttggtgatgctattggagagatttatgatggtacaattcgagtctatgacatagaaagtgtcacaaagataagaattcttgatgcaagtggaccaccaggccttccaagcttacttgcaggatcatcgaatagaacaacaaccatactgatatcagttctgagtttctcaccggatggagagggtctggttgccttctctgagaacggattgatgataagatggtggtccttaggtagtgcctggtgggagaggctgagcagaagccttactcctattcaatgcacaaagcttatctatgttcctccatgggaaggattttcacctaactctgctcgcttgagtataatttctagcattttagatgataaacctggaagaaggaactaggcgaggcggataatctgaagttattgcttcataatcttgacctttcataccgtcttcactggattggtggaaagactatcaaacttacgaggcatggccaggatttgggtacatttcagttgtgatgggcttacccatgaatattgagttgctttgtagtgttgaaagacagctaattcgatggctggcaagtctaacaagaatcaccagtacattcatatgtcatgtgaggtaccttgatgtttctttgactgttaaaagcattgtctggtacagttcataaattggatccctatgtatggtaaataaaaaaactgaatgcaatttgattccatgttacaagactgct

SEQ ID NO: 200749 - DNA, 4352 bp, Zea Mays
cgccggatgccggatcaccctaccccaccccaccaatgcgatgaagtgccactctgtggccgcgctctggtcgccgttgccgccgtcacaccacgtcaccgccgctgccacaaccccggtcgcgctcttcaccggcgccgccgacggcaccgtcctccactggccactggcgctcgcctcagcttccccatctccgcgcccgtcttccctcctctgcgcccacgctgctgccatcacctccctctgcccactcccctcaccggcctcccttcttgtcgcctgcaccgcgggagtgctctccctcttctccacctacgcacccctccgctgcctccgccgccgctccctcccgctctgggtcggctcaccctccctcatcgcctcgctcccgtccatcacctccgccgaccctcgagtcgcgatcctctgccacgctcccgacgacggccaccgtcacgtttcagcactcgtagtcgtcgacgcacgcaccctcgccgtcctctacaccgtcttccatgggattctctcggtcgggactccgaatgcgatcgcggttagtggcggcggtgatgatgcagtcagcgttgtgttggctgacgcgcagggtcgggtgcaggtgatgcccgttgccgagggcgcggctgtcgaagtggacccacccaggcgtctcatcgtgagctcggtggccagcgtcgcgtcggcggagttggcggacgagagggtggaagccgtggcgttgtctcatgatgggaagaacgtggcgttggtgctgaagactagatgtttgttgaaatgtgtcactgagggggttgtgctcggtgaggtatctctgctgggtacttctctttgcaaggacaaaaacacagtagacaaggtatgcactgctggagcttttttcctcagcagtgatgaatgggatgctcatgtttcagacgatggcgttgtggttaggaatttggtgttgtggagtaacaatggtgctgtcacaatgtacaggattgctcttggtagctcatactttgactctgagatagtgtgtgaaattcctagcaacttatctatgcaaggagagggactagaagttaaattttgctggtcaaatcagcatcttgttagggtggaatgttgctcctataaggtagctgggtcattgttgtggaaaccaacagtcgccatttggtgtatggatcagttcgaactgagtaaaacagtgaatacacaaaaaccacctatgaggaaaatgcttggagaaggtggtcttcagggagaagaatttagaccagagccttctcattctcaatacaatatcaaccgagggtcggaagtgatttcacagatgtgctcattagaaaggtatagagggacagtgtcttcgtcaatgttactttctgaggattcttatgctccatatgctgtagtttatggtttccataatggtgacatagaagttatccgatttctgaacttgtcacctgctgctgcaaaatttggtggtcgagggctttacccacatatttccgagaggttatttttggggcacaagggagcaattctttgtttggctgcacattacatgcatgcacaccctgactctagaaacttccaccgagcactcatatcagggagtttagattgtacagttcgtgtctgggatctagatgctggcactcttctttctgtgatgcatcatcatgttggctcagttaagcaaatcgtactaccacctccatggacataccacccttgggatgactgcttcctttctgttggagaagatggccttgtggcgcttgtttcacttcaaaccatgcgggttgagaggatgtttcctggccatccggattatgcatcattggtagcttgggatggagtaaaagggtacatagcttgtttatgcaagaatctccactcttgcaatgatgcaggtagtggattatatatttgggatctgaaaacgggtgctcgagaacgtgttatcaatggcactgcttctcagttagcgtttgagcacttctgcaggggtatatcgaaaaacacagttactggtagcatcttaggaggaacaacttcagcgtcttccttacttgttccaatttttgaagacatgagccacattcggtctcatgcagataaaaatggtcatgacatttcatccgtgtcaaccaaccttcacaatggatgtacagattctgtgactgtaaatgcccctacaacatatgattttaagggaaagacgccagctccagatgaagctcatgaattccatggagataattctgtatacaattcaggaaaggctgtttcttcccacagtatccataataaaaaaataaagtgccctataaagtgctcttgcccctatcctggcattgcaagtctgaggtttgacctcacggcaatcatgtccacacaaggcatgacaaacagcaatagtgataggcatttgaaagatcatctccatagtgagaatcctaaagaaatgttgcagcctggaactttagacagtccttctcgtgttcatgaaatggatagcccctctagagagtcattggaagggtgtttacttcgatttagcctctgttttttgcatttatgggatgttgattgcgagctagacaaattacttgtagatgagatgcaagtttgcaagccagaaggctgccatatagcaactggggtggtaggagacaaaggctcatttacattgatgttcccaggcaaagaagccactcttgagctttggaagtcttcagccgaattttgtgccatgaggtcactgtctataatatctcttgctcaactcatgattaaattatctcgttcttgtacaaattctagcagtgctttggcagcattttatacaaggcattttgctgaaaaggttccagatataaagcctccatccctacagcttttggtgagcttttggcaacacccttcggaacatgtgcgaatggctgcacgttccttgttccactgtgcagctccccgttctattccacaaccactacgagtaaacaaaaataaagtggtcaatgcccccttgtcttcatcagataatatgaatgttcttatatgtgctgtgcagactgcctctgtatccaatcatggagagttgaaggaagatgatgaaaatgttgataaagatgatattgacactgctaatatgatcttatggttggaatcatttgaaaatcaggagtggttatcatggataggaggcacaagccaggatgcagtggcgtcaaatatcatagttgcagctgctttggtcgtttggtatccaagtgtcgtgaaagctaaactttcaagtttagttgttagtcaactaatcaagttagttatgtcgatgaatgatcgatatagttcaactgcagctgaacttctagcagagggaatggaaaacacttggaaggcatgcttgggtgctgagatcactcattttatgagtgatatccttttccaaattgagtgcctaagcactgcaccttctagcaatgctatcaataaaactgcagtggccattacaatgcgagaagcattggttggcacccttttaccaagcttggctatggctgatgtaacaggattttttggtgtaatagagagccaaatttgggctacttcgtctgattcacctgttcatgtcgcttcaatcaaaaccattatccgtgtagttcgaggtgcgccgaagtccttggtcccatacctcgacaaggcaatcaactacattctacacactatggatccaagcaatctaataatgcgaaaagcttgtattatcagttcaatgatggctctaagagaaatggcacgtgtatttccgatggttgctctcaatgagtcaatgacaaagctagctgttggtgatgctattggagagatttatgatggtacaattcgagtctatgacatagaaagtgtcacaaagataagaattcttgatgcaagtggaccaccaggccttccaagcttacttgcaggatcatcgaatagaacaacaaccatactgatatcagttctgagtttctcaccggatggagagggtctggttgccttctctgagaacggattgatgataagatggtggtccttaggtagtgcctggtgggagaggctgagcagaagccttactcctattcaatgcacaaagcttatctatgttcctccatgggaaggattttcacctaactctgctcgcttgagtataatttctagcattttagatgataaacctggaaggtcagagtcattttttgtggctgctgctgcaattgcatcaattttctggactcagctgctgcagcgaattagggccatgtgaatttgaaaattgtcaaaacaagttaaag

SEQ ID NO: 200750 - DNA, 2444 bp, Zea Mays
ctctaatcgctctcatcaaatcacgattcacataaaaaaggtgtgggagcccgatccgatcgccagatccgccggcctgtgcgccgactcgggcgtccttccacagatcctcttccttctatcgtaggctcgccctcgccgctcgctggagcggaggtctctccctgcagcccatactccttgattcattctattgcctcgccgccggctctatggataagcaggagccagtagccaatggtgaacaaacgataggtcttgctgagaagccgaaggagctgcctgttgccagtaaggatgagaaagcaactgtgcccccgattttagttgattcaaatgctttcaatctaccaagtgaaggccaaacccaagctggcacatctaacatggatgggggccataatggtgcacacaacttttatgcttctcaggcacaaccattctattaccaaggctccggttctgaaaaccctacacaagcatgggatacatatcctccctacatgagtgttgaaggattggaagtgggtccaccagttgtatacaatgaggacccctcattgatgttccatggtggctatggttacgacccatattattctcctattgcaacacctgtaccaaatgctgttagtggaggtggtcagctctactcccctcagcagttcttctcggctccttactaccagcagtcagtaccacctgacatgcaatatttaagctctcctactccaatatcacagggtgatacaataatgccgattgacccaacacaaggagcttttatcgctgataccctgagtccaaacagcttcctgtttggcccaagacctgaatggttcagatcttcagaaggaactgggtcatttccatcacctgcagcttcacctcaaccttctaggggtgttccagggtcctatgaccaaaacaactttccaatggcttcaagaatggccagtaattatgggggatccgtcaccagctttggccttaatggtagaagtttgatctcaaccgagaaagggcgcaggaggggaaggggcaatgcacttatttgcagctgcaatggtcctcttgactttcttaatgagcaaagtcggggtccacgtgcaactaagcctaagaagcaaccagaggttgacagtaaggatgaggtgcctactacaggagttggtcgtgagttatacaacaagcctgactttgttatggagtacacgaatgcgaggtttttcatcataaaatcgtacagcgaagataatgtgcacaagagtgtcaaatatggtgtttgggctagcaccacaaatggaaacaagaaactggactcagcctatcgcgaagctaaggagaaaggagagcactgtcccattttcctgttattttcgtgaatgccagtgcacaattctgtggtgttgctgagatgattggaccagtggactttgagaaaagtgtggattactggcagcaagataagtggactggtcaattccctgtgaagtggcacatagtgaaggatgttcccaataatcttttccgacatataattcttgaaaacaacgacaataaacctgtaacaaacagcagagatacacaggaggtgaaactagagcaaggaatggagatgctgaagatctttaagaaccatgatgatgatgcatcaatccttgacgactttgagttttacgaggagcgtgagaaagcgctgcaggaaaataaggcacgcctgcatcagcaacatctacccagttctattgttattgagcccaagaaacccttgactgcacccagtgacctcgtgggccatatcaccaagagttttgctgaggctgtgcggcttggtgaggccaagactgtaagccatttgactgagaaggtttctgggggtgatccgtctattcctgtgaagcatgttgaagttaagcagagtggtttatcttaggaactcttgatcgatgtgaatgaactgtaccaaaaattcacccatacgcttcctgatcaaaatgtcgggaatgcatatgcagatggatgatgatgaaacccaagacatcggcaaaagcatgcatgcacactagggtaggtctttgccaaccttggaagcatagtttcttgaatagtttctctctttttttcttctttcttcctagtattttctccccttctcttcgcatcatatgatgattccttagtgtctagcctcaaggagagttgctgtttttgtgtaagcctctgtaagtttcctgttccatcacatatgagtaaggcctttttgtttctttttatttaagtaaaagatccatcttttatgtactgtcgtggcagttttattatactatgtctgaacaaggcctattcactatgtaagcaaaacataaacgctatccaggtgacctggttgtgatgactacagtaataagtaactgaataattttttatgtttgctgggaagg

SEQ ID NO: 200751 - DNA, 1806 bp, Zea Mays
tgaaaatgcttccttttctctggttgagatcttcccctccccctgccggatctgaatctcatccccgggtggggccgtgggggggactctagctggaggggcactttcttgttcaccatgtgctccaggaacaagtgccgtccaccagatccaggctcggcatgttcgtgatcgaggacaagggcggcgccatcgcgctgatgctggcgtcgctcctgttcctgggcacctggccggccgtgctcaccctgctggagcgccggggccgcctgccgcagcacacgtacctggactactccatcaccaacctcctcgcggccgtgctcatcgcgctcaccttcggccagctcggggacagcaggcgcggcatgcccaacttcttcacgcagctcggccaggacaactggccctctgtgctgttcgccatggccgggggcgtcgtgctcagcgtcggcaacctctccacccagtacgcttgggcctatgtgggcctctccgtcactgaggtcatcagctccagcatggtggtggtcataggcaccacgctgaactacttcctggacaaccgcatcaacagggcagagattctgttccctggtgtggcgtgcttcctcgtcgccgtcatccttggctccgctgtccattcctccaatgcagctgacaatgagcagaaactcggtgcctccacgaatgcctacaaactcgggacaagtggaaatgtggaaccaagcaaacaagctgtagacagagatgctcccaaagacttggaggagagtggagcctctggaatccggcaacctgacaaagctgaggcaggcactgcagagtacctcattgagcttgaagaacggcgatcaattaaggtattcggttcaaacaccttcatcgggctggggatcgtcttcttcgcgggcgtgtgcttctcgctcttctccccggcgttcaacctggccactaacgaccagtggcacacgctcagggacggcgtgccgcacctggtggtgtacaccgccttcttctacttctccatctcctgcttcgtcgtcggcgtcggactcaacgtcctgttcctctaccgccccatggccggcgtgccccgctcctccctcggggcctacctcagggactgggacggccgccagtgggcgctcctcgccggcctgctctgcggcttcggcaacggcttccagttcatgggcggccaggccgcagggtacgccgccgctgacgctgtccaggccctgccgctcgtcagcaccttctggggcgtactgctcttcggggagtaccgcaagtcgtcgcggaagacctacgtcctgctcggcttcatgctcttcatgttcgtcgccgctgtcgccgtgctcatggcttcgtcaggtcacaggagcacagagtgaattgcaagtcttgttcgtcctctgcttgttgcaagcccttccacttgcgattgatccacggaaagatccatcgtcttcgtgaagcaggggaaatccattccttccagccattaatgagatcttcagaacaatggaatggagatgtacaaaaaaatggttgttgtatgattgatcaaatgtatagaactatttatattctttccaagacaattggctgataggataggaactgttccaggggtggaaaaaatctctatctttatgaacagggtaaaagcaatgttcagaaaaaagtagtttgtgcctagtatgacagattcagaatggtatcagtactcccgctgttttggaatgttcaagagaaaactagtggatgctctaaatcttataatcttgcaatgcttctcgg

SEQ ID NO: 200752 - DNA, 3890 bp, Zea Mays
gctccctcgatcttttgggtttcgttttcccagttcccaccctctcttccaccctgccctgtttccagatttgaccgatccccttcgattcgatttctacacctccagagcactcactctcctggcaaaccccttcgtctcccaaccctagagagcagcagcagctaccgcagcccctgccatggcgccgagctccccgtcacccgccgcgcccacacgcgtctctgggcggaagcgcgccgccaaggccgaggagatccaccagaacaaggaggaggaggaggaggaggaggaggtcgtggcggcgtcctccgccaagcgcagccgcaaggcggcatcttctgggaagaagcccaagtcgccccccaagcaggccaagccggggaggaagaagaagggggatgccgagatgaaggagcccgtggaggacgacgtgtgcgccgaggagcccgacgaggaggagttggccatgggcgaggaggaggccgaggagcaggccatgcgggaggaggtggttgcggtcgcggcggggtcacccgggaagaagagggtggggagaaggaacgccgccgccgccgccggcgaccacgagccggagttcatcggcagccctgttgccgcggacgaggcgcgcagcaactggcccaagcgctacggccgcagcactgccgcaaagaaaccggatgaggaggaagagctcaaggccagatgtcactaccggagcgctaaggtggacaacgtcgtctactgccttggggatgacgtctatgtcaaggctggagaaaacgaggcagattacattggccgcattactgaattttttgaggggactgaccagtgtcactattttacttgccgttggttcttccgagcagaggacacggttatcaattctttggtgtccataagtgtggatggccacaagcatgaccctagacgtgtttttctttctgaggaaaagaacgacaatgtgcttgattgcattatctccaaggtcaagatagtccatgttgatccaaatatggatccaaaagccaaggctcagctgatagagagttgcgacctatactatgacatgtcttactctgttgcatattctacatttgctaatatctcgtctgaaaatgggcagtcagacagtgataccgcttcgggtatttcttctgatgatgtggatctggagacgtcatctagtatgccaacgaggacagcaacccttcttgatctgtattctggctgtgggggcatgtctactggtctttgcttgggtgcagctctttctggcttgaaacttgaaactcgatgggctgttgatttcaacagttttgcgtgccaaagtttaaaatataatcatccacagactgaggtgcgaaatgagaaagccgatgagtttcttgccctccttaaggaatgggcagttctatgcaaaaaatatgtccaagatgtggattcaaatttagcaagctcagaggatcaagcggatgaagacagccctcttgacaaggacgaatttgttgtagagaagcttgtcgggatatgttatggtggcagtgacagggaaaatggcatctattttaagtgggaaggatacggccctgaggaggatacatgggaaccgattgataacttgagtgactgcccgcagaaaattagagattttgtacaagaagggcacaaaagaaagattctcccactgcctggtgatgttgatgtcatttgtggaggcccaccatgccaaggtatcagtgggtttaatcggtacagaaaccgtgatgagccactcaaagatgagaaaaacaaacaaatggtgactttcatggatattgtggcgtacttgaagcccaagtatgttctcatggaaaatgtggtggacatactcaaatttgcggatggttacctaggaaaatatgctttgagctgccttgttgctatgaagtaccaagcgcggcttggaatgatggtggctggttgctatggtctgccacagttcaggatgcgtgtgttcctctggggtgctctttcttccatggtgctccctaagtatcctctgcccacctatgatgttgtagtacgtggaggagcccctaatgccttttcgcaatgtatggttgcatatgacgagacacaaaaaccatccctgaaaaaagccttgcttcttggcgatgcaatttcagatttaccaaaggttcaaaatcaccagcctaacgatgtgatggagtatggtggttcccccaagaccgaattccagcgctacattcgactcagtcgtaaagacatgttggattggtccttcggtgagggggctggtccagatgaaggcaagctcttggatcaccagcctttacggcttaacaacgatgattatgagcgggttcaacagattcctgtcaagaagggagccaacttccgcgacctaaagggcgtgagggttggagcaaacaatattgttgagtgggatccagaaatcgagcgtgtgaaactttcatctgggaaaccactggttcctgactatgcaatgtcattcatcaagggcaaatcactcaagccgtttgggcgcctgtggtgggacgagacagttcctacagttgtaaccagagcagagcctcacaaccaggttataattcatccgactcaagcaagggtcctcactatccgggagaacgcaaggttacagggcttccccgattactaccgattgtttggcccgatcaaggagaagtacattcaagtcgggaacgcagtggctgtccctgttgcccgggcactgggctactgtctggggcaagcctacctgggtgaatctgaggggagtgaccctctgtaccagctgcctccaagtttcacctctgttggaggacgcactgcggggcaggcgagggcctctcctgttggcacccctgcaggggaggtagttgagcagtaaaaggatgacagatctgagctgagctgggcaacatccagcggcaggagcatttctggttcggttcgattcgggctcacgagcgcattgtgctgattcgcagggtgcactcgagctcgagtgcggagttgttgtaatgtaggttgaggtttcaaaacatccatccatccatcggccccgcctatttgtggatggtgtttctcgtgccattttagttcagctgtattgatgcttcgtcatgtatgtgtattgtaccattcgttcttgttacctactagtaaggcaacatttgatccatgttcaacgcgagcaaaattccatccactttaggtactgagatgctcaagtagttcagtcatcaggtaacatttacaacctattattttgcctggtattatctgaaaacgatttgctgaggatgttttttttttgaagtaaaggtactgtaggaaggtcctacagtaatattattaaatcaaaagaactaagtttagggagacagaagaatattacaaagaaataaaagggagagtgaggagggggaagaattctggatacatgtatttactctatttcacataaacatatggacatcaacatagatgtgaaggtatctaatctaaataagcgccgacatgctttacaagatagtttgatctataaggtgagggatgttgtggatgaagattgtgaccaactagctcatgtgtagttttgtttgtagtacctgtcctaaaaaatatgtaattctaagtttaatttgaatcagccttgttttttaaaatttttttgaccaagtccgttaaaaagtaataacattttttacttcaaatagatttactatgaaattttgtcttatggttatctaatgacatttatttaaaactgtaacaaaaactggtttggttaggggactgagggagtagtgcttaaaatggaagacgataggagagatcacattagtggtggc

SEQ ID NO: 200753 - DNA, 3887 bp, Zea Mays
ccgctccctcgatcttttgggtttcgttttcccagttcccaccctctcttccaccctgccctgtttccagatttgaccgatccccttcgattcgatttctacacctccagagcactcactctcctggcaaaccccttcgtctcccaaccctagagagcagcagcagctaccgcagcccctgccatggcgccgagctccccgtcacccgccgcgcccacacgcgtctctgggcggaagcgcgccgccaaggccgaggagatccaccagaacaaggaggaggaggaggaggaggaggaggtcgtggcggcgtcctccgccaagcgcagccgcaaggcggcatcttctgggaagaagcccaagtcgccccccaagcaggccaagccggggaggaagaagaagggggatgccgagatgaaggagcccgtggaggacgacgtgtgcgccgaggagcccgacgaggaggagttggccatgggcgaggaggaggccgaggagcaggccatgcgggaggaggtggttgcggtcgcggcggggtcacccgggaagaagagggtggggagaaggaacgccgccgccgccgccggcgaccacgagccggagttcatcggcagccctgttgccgcggacgaggcgcgcagcaactggcccaagcgctacggccgcagcactgccgcaaagaaaccggatgaggaggaagagctcaaggccagatgtcactaccggagcgctaaggtggacaacgtcgtctactgccttggggatgacgtctatgtcaaggctggagaaaacgaggcagattacattggccgcattactgaattttttgaggggactgaccagtgtcactattttacttgccgttggttcttccgagcagaggacacggttatcaattctttggtgtccataagtgtggatggccacaagcatgaccctagacgtgtttttctttctgaggaaaagaacgacaatgtgcttgattgcattatctccaaggtcaagatagtccatgttgatccaaatatggatccaaaagccaaggctcagctgatagagagttgcgacctatactatgacatgtcttactctgttgcatattctacatttgctaatatctcgtctgtcagacagtgataccgcttcgggtatttcttctgatgatgtggatctggagacgtcatctagtatgccaacgaggacagcaacccttcttgatctgtattctggctgtgggggcatgtctactggtctttgcttgggtgcagctctttctggcttgaaacttgaaactcgatgggctgttgatttcaacagttttgcgtgccaaagtttaaaatataatcatccacagactgaggtgcgaaatgagaaagccgatgagtttcttgccctccttaaggaatgggcagttctatgcaaaaaatatgtccaagatgtggattcaaatttagcaagctcagaggatcaagcggatgaagacagccctcttgacaaggacgaatttgttgtagagaagcttgtcgggatatgttatggtggcagtgacagggaaaatggcatctattttaaggtccagtgggaaggatacggccctgaggaggatacatgggaaccgattgataacttgagtgactgcccgcagaaaattagagattttgtacaagaagggcacaaaagaaagattctcccactgcctggtgatgttgatgtcatttgtggaggcccaccatgccaaggtatcagtgggtttaatcggtacagaaaccgtgatgagccactcaaagatgagaaaaacaaacaaatggtgactttcatggatattgtggcgtacttgaagcccaagtatgttctcatggaaaatgtggtggacatactcaaatttgcggatggttacctaggaaaatatgctttgagctgccttgttgctatgaagtaccaagcgcggcttggaatgatggtggctggttgctatggtctgccacagttcaggatgcgtgtgttcctctggggtgctctttcttccatggtgctccctaagtatcctctgcccacctatgatgttgtagtacgtggaggagcccctaatgccttttcgcaatgtatggttgcatatgacgagacacaaaaaccatccctgaaaaaagccttgcttcttggcgatgcaatttcagatttaccaaaggttcaaaatcaccagcctaacgatgtgatggagtatggtggttcccccaagaccgaattccagcgctacattcgactcagtcgtaaagacatgttggattggtccttcggtgagggggctggtccagatgaaggcaagctcttggatcaccagcctttacggcttaacaacgatgattatgagcgggttcaacagattcctgtcaagaagggagccaacttccgcgacctaaagggcgtgagggttggagcaaacaatattgttgagtgggatccagaaatcgagcgtgtgaaactttcatctgggaaaccactggttcctgactatgcaatgtcattcatcaagggcaaatcactcaagccgtttgggcgcctgtggtgggacgagacagttcctacagttgtaaccagagcagagcctcacaaccaggttataattcatccgactcaagcaagggtcctcactatccgggagaacgcaaggttacagggcttccccgattactaccgattgtttggcccgatcaaggagaagtacattcaagtcgggaacgcagtggctgtccctgttgcccgggcactgggctactgtctggggcaagcctacctgggtgaatctgaggggagtgaccctctgtaccagctgcctccaagtttcacctctgttggaggacgcactgcggggcaggcgagggcctctcctgttggcacccctgcaggggaggtagttgagcagtaaaaggatgacagatctgagctgagctgggcaacatccagcggcaggagcatttctggttcggttcgattcgggctcacgagcgcattgtgctgattcgcagggtgcactcgagctcgagtgcggagttgttgtaatgtaggttgaggtttcaaaacatccatccatccatcggccccgcctatttgtggatggtgtttctcgtgccattttagttcagctgtattgatgcttcgtcatgtatgtgtattgtaccattcgttcttgttacctactagtaaggcaacatttgatccatgttcaacgcgagcaaaattccatccactttaggtactgagatgctcaagtagttcagtcatcaggtaacatttacaacctattattttgcctggtattatctgaaaacgatttgctgaggatgttttttttttgaagtaaaggtactgtaggaaggtcctacagtaatattattaaatcaaaagaactaagtttagggagacagaagaatattacaaagaaataaaagggagagtgaggagggggaagaattctggatacatgtatttactctatttcacataaacatatggacatcaacatagatgtgaaggtatctaatctaaataagcgccgacatgctttacaagatagtttgatctataaggtgagggatgttgtggatgaagattgtgaccaactagctcatgtgtagttttgtttgtagtacctgtcctaaaaaatatgtaattctaagtttaatttgaatcagccttgttttttaaaatttttttgaccaagtccgttaaaaagtaataacattttttacttcaaatagatttactatgaaattttgtcttatggttatctaatgacatttatttaaaactgtaacaaaaactggtttggttaggggactgagggagtagtgcttaaaatggaagacgataggagagatcacattagtggtggc

SEQ ID NO: 200754 - DNA, 3769 bp, Zea Mays
cataccctcccgctgcagacgggtcccacgccgtcaaaatttggacgctcccgctccctcgatcttttgggtttcgttttcccagttcccaccctctcttccaccctgccctgtttccagatttgaccgatccccttcgattcgatttctacacctccagagcactcactctcctggcaaaccccttcgtctcccaaccctagagagcagcagcagctaccgcagcccctgccatggcgccgagctccccgtcacccgccgcgcccacacgcgtctctgggcggaagcgcgccgccaaggccgaggagatccaccagaacaaggaggaggaggaggaggaggaggaggtcgtggcggcgtcctccgccaagcgcagccgcaaggcggcatcttctgggaagaagcccaagtcgccccccaagcaggccaagccggggaggaagaagaagggggatgccgagatgaaggagcccgtggaggacgacgtgtgcgccgaggagcccgacgaggaggagttggccatgggcgaggaggaggccgaggagcaggccatgcgggaggaggtggttgcggtcgcggcggggtcacccgggaagaagagggtggggagaaggaacgccgccgccgccgccggcgaccacgagccggagttcatcggcagccctgttgccgcggacgaggcgcgcagcaactggcccaagcgctacggccgcagcactgccgcaaagaaaccggatgaggaggaagagctcaaggccagatgtcactaccggagcgctaaggtggacaacgtcgtctactgccttggggatgacgtctatgtcaaggctggagaaaacgaggcagattacattggccgcattactgaattttttgaggggactgaccagtgtcactattttacttgccgttggttcttccgagcagaggacacggttatcaattctttggtgtccataagtgtggatggccacaagcatgaccctagacgtgtttttctttctgaggaaaagaacgacaatgtgcttgattgcattatctccaaggtcaagatagtccatgttgatccaaatatggatccaaaagccaaggctcagctgatagagagttgcgacctatactatgacatgtcttactctgttgcatattctacatttgctaatatctcgtctgcgatgggctgttgatttcaacagttttgcgtgccaaagtttaaaatataatcatccacagactgaggtgcgaaatgagaaagccgatgagtttcttgccctccttaaggaatgggcagttctatgcaaaaaatatgtccaagatgtggattcaaatttagcaagctcagaggatcaagcggatgaagacagccctcttgacaaggacgaatttgttgtagagaagcttgtcgggatatgttatggtggcagtgacagggaaaatggcatctattttaaggtccagtgggaaggatacggccctgaggaggatacatgggaaccgattgataacttgagtgactgcccgcagaaaattagagattttgtacaagaagggcacaaaagaaagattctcccactgcctggtgatgttgatgtcatttgtggaggcccaccatgccaaggtatcagtgggtttaatcggtacagaaaccgtgatgagccactcaaagatgagaaaaacaaacaaatggtgactttcatggatattgtggcgtacttgaagcccaagtatgttctcatggaaaatgtggtggacatactcaaatttgcggatggttacctaggaaaatatgctttgagctgccttgttgctatgaagtaccaagcgcggcttggaatgatggtggctggttgctatggtctgccacagttcaggatgcgtgtgttcctctggggtgctctttcttccatggtgctccctaagtatcctctgcccacctatgatgttgtagtacgtggaggagcccctaatgccttttcgcaatgtatggttgcatatgacgagacacaaaaaccatccctgaaaaaagccttgcttcttggcgatgcaatttcagatttaccaaaggttcaaaatcaccagcctaacgatgtgatggagtatggtggttcccccaagaccgaattccagcgctacattcgactcagtcgtaaagacatgttggattggtccttcggtgagggggctggtccagatgaaggcaagctcttggatcaccagcctttacggcttaacaacgatgattatgagcgggttcaacagattcctgtcaagaagggagccaacttccgcgacctaaagggcgtgagggttggagcaaacaatattgttgagtgggatccagaaatcgagcgtgtgaaactttcatctgggaaaccactggttcctgactatgcaatgtcattcatcaagggcaaatcactcaagccgtttgggcgcctgtggtgggacgagacagttcctacagttgtaaccagagcagagcctcacaaccaggttataattcatccgactcaagcaagggtcctcactatccgggagaacgcaaggttacagggcttccccgattactaccgattgtttggcccgatcaaggagaagtacattcaagtcgggaacgcagtggctgtccctgttgcccgggcactgggctactgtctggggcaagcctacctgggtgaatctgaggggagtgaccctctgtaccagctgcctccaagtttcacctctgttggaggacgcactgcggggcaggcgagggcctctcctgttggcacccctgcaggggaggtagttgagcagtaaaaggatgacagatctgagctgagctgggcaacatccagcggcaggagcatttctggttcggttcgattcgggctcacgagcgcattgtgctgattcgcagggtgcactcgagctcgagtgcggagttgttgtaatgtaggttgaggtttcaaaacatccatccatccatcggccccgcctatttgtggatggtgtttctcgtgccattttagttcagctgtattgatgcttcgtcatgtatgtgtattgtaccattcgttcttgttacctactagtaaggcaacatttgatccatgttcaacgcgagcaaaattccatccactttaggtactgagatgctcaagtagttcagtcatcaggtaacatttacaacctattattttgcctggtattatctgaaaacgatttgctgaggatgttttttttttgaagtaaaggtactgtaggaaggtcctacagtaatattattaaatcaaaagaactaagtttagggagacagaagaatattacaaagaaataaaagggagagtgaggagggggaagaattctggatacatgtatttactctatttcacataaacatatggacatcaacatagatgtgaaggtatctaatctaaataagcgccgacatgctttacaagatagtttgatctataaggtgagggatgttgtggatgaagattgtgaccaactagctcatgtgtagttttgtttgtagtacctgtcctaaaaaatatgtaattctaagtttaatttgaatcagccttgttttttaaaatttttttgaccaagtccgttaaaaagtaataacattttttacttcaaatagatttactatgaaattttgtcttatggttatctaatgacatttatttaaaactgtaacaaaaactggtttggttaggggactgagggagtagtgcttaaaatggaagacgataggagagatcacattagtggtggc

SEQ ID NO: 200755 - DNA, 3679 bp, Zea Mays
ctcatataaaattcgaagcatcctgccgtgcgtccccgaagttccgagtccccattcggtcccccccctctgctctctcgaagcctccaggctccagaacccccaccccctctcctctcgcgccgcgaggggttgatccgtccggcgatctgggccctccggccggcgcccgcgcctgggaggcttttccttacccgccgcacgggcggagatgctctcgctccaacagcagcacggcggcgctgtcgccgccggcggcgatgcgcgccaccacgcaccgcagccgtcggtgctcggtggaggcgcggactggctagtgttcgggggccgcgccgacctggaggagcccgcgaggaatgccccgtcgcccgccttgttccttcttccgcccgcggggctcgatgacagggcggcccagcccgagcccaatcccaagcccgcacagctcgcaggagctgttgatgaagagcgacatttggcacttgcacatcaaaactacaggtcagggaagtaccgagaggctctagagcatggtaatgtcgtttacgagaagaatccacgtcgaactgataacctcctcctccttggagctatatactatcagattcgtaattatgacatgtgcattgcaaaaaacgaggaggctcttgccatagatccacattttgctgaatgctacggcaatatggcaaatgcttggaaggagaaaggtgatattgatcttgcaattcgttactatcttactgctattcagctgcgaccaaacttctgtgatgcatggtcaaatctcgctagcgcatatacaaggaaggggagactgaatgaggcagctcaatgttgtagacaggcacttgctataaatcctcgattggttgatgcacatagtaatcttggaaatctgatgaaagctcaaggctttattcaagaggcatacagttgctacatcgaggcgttacgtattgatcctcattttgcaattgcatggtcaaaccttgctggtctgtttatggaggcaggagacctcgacaaggctttaatgtattataaggaagctgttaagcttaagccatctttcgctgatgcatatcttaatcaagggaatgtttataaggctttgggaatgcctcaagatgccattatgtgttatcaacgtgcactgcaggcacgtcctgactatgctatggcttatgatactcatctcgggtgagatgcgaacaagcttacaagagaatggtcctttctttaccttcaaagtagagccttagtatacctcgtaatacaaaggtaggggaacattttcatgcaggtaatcttgctactatttactatgagcaaggccagcttgatatggcaattcgttgttacaatcaagctatagtctacgacccacagtttattgaagcatacaacaacatgggcaacgcacttaaagatgctggaagagtagaagaagcaatcaactgctacagatcctgccttgcactgcaagcaaaccacccgcaagcccttactaatttaggaaacatatacatggagtggaacatgataagcgctgctacttcattttacaaagcagctatatctgtgacatctggattatcttccccacttaacaacttggctgtgatatacaagcaacagggaaactatgctgatgctatcacatgttacactgaagtactccgtatagatcctacagcagctgatgcactagttaatagagggaacacattcaaagagattggcagagttaatgaagcaattcaggattatgttcaggcagcaacaatcaggccaaacatgccagaagcccatgccaacttggcctcagcatacaaggacagtgggcatgtagaaacggctataattagctacaagcaggctctccggctgcgtcctgattttcctgaggcaacctgtaatctcctgcatactctacagtgtgtctgtgactgggaaaacagagatggcatgtttcgagatgttgaagaaattattagaaggcaaataaagatgtcagtacttccaagtgttcaacctttccatgccattgcttatcctattgatccattgcttgctttggaaataagccgtaaatatgcggcccactgttccttgattgcctctcgttttgggctgccgccttttgtgcatccacctcctgttcctgtaaaagcagagggtaaacactgccgactgaaagtaggatatgtgagtagtgattttggtaatcaccccctttcccatctcatgggatcagtatttggaatgcatgatcgtgccaatatcgaggtcttttgctatgcactcagtcaaaacgatggtactgagtggaggcagcgtattcagtctgaggcagaacattttgtcgatgtttctgccatgacttccgataatatcgccaagcttatcaatcaagacaaaatacaaattttgataaatcttaatggctacacaaagggtgccaggaacgaaatttttgcaatgcagccagcacctatccaagtttcgtacatggggttccctggaacaacgggtgctgcatacatagattacttggtcacagatgagtttgtttctccatctagctatgcacatatatattcagaaaagctcgtccatttgcctcattgctattttgtcaatgactacaagcagaaaaatcgagactgtctcactccagtatgtccacacaaaagatctgattatggattacctgaggataaatttatttttgcttgcttcaatcagctttacaaaatggaccctgagatatttgacacatggtgcaatattctcaaacgtgttcccaacagcgcattatggcttttaagattcccggcagctggtgaaactagagtgagagcatatgctgctgccagaggagtaagatcagatcaaattgtattcacagacgttgccatgaaaaatgagcatatacgacgcagtgccctggcagaccttttcctggacactcccctctgcaatgcacacacaacaggcactgacatactgtgggctggtctgccaatgatcacccttccactagagaaaatggcaaccagagtagctggttccctctgcgtagctactgggcttggggaggagatgattgttagcagcatgaagaagtatgaagatagagcagtagaactagcgctgaatccggtgaagcttcaagcgctgactaacaagctcaaggaagttcgtatgacctgcccgttgtttgatacagctcgatgggtgcgcaaccttgaaagggcatactacaagatgtggaacctttactgctccagtcgccacccggagccattcaaggtggtagaggatgacaatgagtccccatttgaccgctaacgagatctcatcagcagcccggctctgtaaataaggcgagagttgtagaatatttagcatcgtgaccgctgttgctccaggtgcttgtttgccgccccctttcctgccgtgcacatcacctctgtggaggctaacttcgtagtatgtatgtactacactgcaaaagaagtcctagggttagcctattgttatcactatttagtttgctatattgtatcgcggtcgtggtttctaaaataaactgcaacctttaggagtgttgatgtgaaatctcattcttaatagcttctgtccaaaaatgagcaaaaaggacttgagtgtg

SEQ ID NO: 200756 - DNA, 3680 bp, Zea Mays
ccaaaacatgccacaagttgcttccgaacagtgacaaaaggccgaaacaaacagcccatctctctcctcatataaaattcgaagcatcctgccgtgcgtccccgaagttccgagtccccattcggtcccccccctctgctctctcgaagcctccaggctccagaacccccaccccctctcctctcgcgccgcgaggggttgatccgtccggcgatctgggccctccggccggcgcccgcgcctgggaggcttttccttacccgccgcacgggcggagatgctctcgctccaacagcagcacggcggcgctgtcgccgccggcggcgatgcgcgccaccacgcaccgcagccgtcggtgctcggtggaggcgcggactggctagtgttcgggggccgcgccgacctggaggagcccgcgaggaatgccccgtcgcccgccttgttccttcttccgcccgcggggctcgatgacagggcggcccagcccgagcccaatcccaagcccgcacagctcgcaggaggcgatcgtgccgactgtttcgactttggactgggagaagtgggcacaaaagctgttgatgaagagcgacatttggcacttgcacatcaaaactacaggtcagggaagtaccgagaggctctagagcatggtaatgtcgtttacgagaagaatccacgtcgaactgataacctcctcctccttggagctatatactatcagattcgtaattatgacatgtgcattgcaaaaaacgaggaggctcttgccatagatccacattttgctgaatgctacggcaatatggcaaatgcttggaaggagaaaggtgatattgatcttgcaattcgttactatcttactgctattcagctgcgaccaaacttctgtgatgcatggtcaaatctcgctagcgcatatacaaggaaggggagactgaatgaggcagctcaatgttgtagacaggcacttgctataaatcctcgattggttgatgcacatagtaatcttggaaatctgatgaaagctcaaggctttattcaagaggcatacagttgctacatcgaggcgttacgtattgatcctcattttgcaattgcatggtcaaaccttgctggtctgtttatggaggcaggagacctcgacaaggctttaatgtattataaggaagctgttaagcttaagccatctttcgctgatgcatatcttaatcaagggaatgtttataaggctttgggaatgcctcaagatgccattatgtgttatcaacgtgcactgcaggcacgtcctgactatgctatggcttatggtaatcttgctactatttactatgagcaaggccagcttgatatggcaattcgttgttacaatcaagctatagtctacgacccacagtttattgaagcatacaacaacatgggcaacgcacttaaagatgctggaagagtagaagaagcaatcaactgctacagatcctgccttgcactgcaagcaaaccacccgcaagcccttactaatttaggaaacatatacatggagtggaacatgataagcgctgctacttcattttacaaagcagctatatctgtgacatctggattatcttccccacttaacaacttggctgtgatatacaagcaacagggaaactatgctgatgctatcacatgttacactgaagtactccgtatagatcctacagcagctgatgcactagttaatagagggaacacattcaaagagattggcagagttaatgaagcaattcaggattatgttcaggcagcaacaatcaggccaaacatgccagaagcccatgccaacttggcctcagcatacaaggacagtgggcatgtagaaacggctataattagctacaagcaggctctccggctgcgtcctgattttcctgaggcaacctgtaatctcctgcatactctacagtgtgtctgtgactgggaaaacagagatggcatgtttcgagatgttgaagaaattattagaaggcaaataaagatgtcagtacttccaagtgttcaacctttccatgccattgcttatcctattgatccattgcttgctttggaaataagccgtaaatatgcggcccactgttccttgattgcctctcgttttgggctgccgccttttgtgcatccacctcctgttcctgtaaaagcagagggtaaacactgccgactgaaagtaggatatgtgagtagtgattttggtaatcaccccctttcccatctcatgggatcagtatttggaatgcatgatcgtgccaatatcgaggtcttttgctatgcactcagtcaaaacgatggtactgagtggaggcagcgtattcagtctgaggcagaacattttgtcgatgtttctgccatgacttccgataatatcgccaagcttatcaatcaagacaaaatacaaattttgataaatcttaatggctacacaaagggtgccaggaacgaaatttttgcaatgcagccagcacctatccaagtttcgtacatggggttccctggaacaacgggtgctgcatacatagattacttggtcacagatgagtttgtttctccatctagctatgcacatatatattcagaaaagctcgtccatttgcctcattgctattttgtcaatgactacaagcagaaaaatcgagactgtctcactccagtatgtccacacaaaagatctgattatggattacctgaggataaatttatttttgcttgcttcaatcagctttacaaaatggaccctgagatatttgacacatggtgcaatattctcaaacgtgttcccaacagcgcattatggcttttaagattcccggcagctggtgaaactagagtgagagcatatgctgctgccagaggagtaagatcagatcaaattgtattcacagacgttgccatgaaaaatgagcatatacgacgcagtgccctggcagaccttttcctggacactcccctctgcaatgcacacacaacaggcactgacatactgtgggctggtctgccaatgatcacccttccactagagaaaatggcaaccagagtagctggttccctctgcgtagctactgggcttggggaggagatgattgttagcagcatgaagaagtatgaagatagagcagtagaactagcgctgaatccggtgaagcttcaagcgctgactaacaagctcaaggaagttcgtatgacctgcccgttgtttgatacagctcgatgggtgcgcaaccttgaaagggcatactacaagatgtggaacctttactgctccagtcgccacccggagccattcaaggtggtagaggatgacaatgagtccccatttgaccgctaacgagatctcatcagcagcccggctctgtaaataaggcgagagttgtagaatatttagcatcgtgaccgctgttgctccaggtgcttgtttgccgccccctttcctgccgtgcacatcacctctgtggaggctaacttcgtagtatgtatgtactacactgcaaaagaagtcctagggttagcctattgttatcactatttagtttgctatattgtatcgcggtcgtggtttctaaaataaactgcaacctttaggagtgttgatgtgaaatctcattcttaatagcttctgtccaaaaatgagcaaaaaggacttgagtgtg

SEQ ID NO: 200757 - DNA, 1178 bp, Zea Mays
gccgtgcgtccccgaagttccgagtccccattcggtcccccccctctgctctctcgaagcctccaggctccagaacccccaccccctctcctctcgcgccgcgaggggttgatccgtccggcgatctgggccctccggccggcgcccgcgcctgggaggcttttccttacccgccgcacgggcggagatgctctcgctccaacagcagcacggcggcgctgtcgccgccggcggcgatgcgcgccaccacgcaccgcagccgtcggtgctcggtggaggcgcggactggctagtgttcgggggccgcgccgacctggaggagcccgcgaggaatgccccgtcgcccgccttgttccttcttccgcccgcggggctcgatgacagggcggcccagcccgagcccaatcccaagcccgcacagctcgcaggagctgttgatgaagagcgacatttggcacttgcacatcaaaactacaggtcagggaagtaccgagaggctctagagcatggtaatgtcgtttacgagaagaatccacgtcgaactgataacctcctcctccttggagctatatactatcagattcgtaattatgacatgtgcattgcaaaaaacgaggaggctcttgccatagatccacattttgctgaatgctacggcaatatggcaaatgcttggaaggagaaaggtgatattgatcttgcaattcgttactatcttactgctattcagctgcgaccaaacttctgtgatgcatggtcaaatctcgctagcgcatatacaaggaaggggagactgaatgaggcagctcaatgttgtagacaggcacttgctataaatcctcgattggttgatgcacatagtaatcttggaaatctgatgaaagctcaaggctttattcaagaggcatacagttgctacatcgaggcgttacgtattgatcctcattttgcaattgcatggtcaaaccttgctggtctgtttatggaggcaggagacctcgacaaggctttaatgtattataaggaagctgttaagcttaagccatctttcgctgatgcatatcttaatcaagggaatgtttataaggctttgggaatgcctcaagatgccattatgtgttatcaacgtgcactgcaggcacgtcctgactatgctatggcttatggggaacattttc

SEQ ID NO: 200758 - DNA, 1360 bp, Zea Mays
aaacaaacagcccatctctctcctcatataaaattcgaagcatcctgccgtgcgtccccgaagttccgagtccccattcggtcccccccctctgctctctcgaagcctccaggctccagaacccccaccccctctcctctcgcgccgcgaggggttgatccgtccggcgatctgggccctccggccggcgcccgcgcctgggaggcttttccttacccgccgcacgggcggagatgctctcgctccaacagcagcacggcggcgctgtcgccgccggcggcgatgcgcgccaccacgcaccgcagccgtcggtgctcggtggaggcgcggactggctagtgttcgggggccgcgccgacctggaggagcccgcgaggaatgccccgtcgcccgccttgttccttcttccgcccgcggggctcgatgacagggcggcccagcccgagcccaatcccaagcccgcacagctcgcaggaggcgatcgtgccgactgtttcgactttggactgggagaagtgggcacaaaagctgttgatgaagagcgacatttggcacttgcacatcaaaactacaggtcagggaagtaccgagaggctctagagcatggtaatgtcgtttacgagaagaatccacgtcgaactgataacctcctcctccttggagctatatactatcagattcgtaattatgacatgtgcattgcaaaaaacgaggaggctcttgccatagatccacattttgctgaatgctacggcaatatggcaaatgcttggaaggagaaaggtgatattgatcttgcaattcgttactatcttactgctattcagctgcgaccaaacttctgtgatgcatggtcaaatctcgctagcgcatatacaaggaaggggagactgaatgaggcagctcaatgttgtagacaggcacttgctataaatcctcgattggttgatgcacatagtaatcttggaaatctgatgaaagctcaaggctttattcaagaggcatacagttgctacatcgaggcgttacgtattgatcctcattttgcaattgcatggtcaaaccttgctggtctgtttatggaggcaggagacctcgacaaggctttaatgtattataaggaagctgttaagcttaagccatctttcgctgatgcatatcttaatcaagggaatgtttataaggctttgggaatgcctcaagatgccattatgtgttatcaacgtgcactgcaggcacgtcctgactatgctatggcttatgatactcatctcgggtgagatgcgaacaagcttacaagagaatggtcctttctttaccttcaaagtagagccttagtatacctcgtaatacaaaggta

SEQ ID NO: 200759 - DNA, 1122 bp, Zea Mays
aagcatcctgccgtgcgtccccgaagttccgagtccccattcggtcccccccctctgctctctcgaagcctccaggctccagaacccccaccccctctcctctcgcgccgcgaggggttgatccgtccggcgatctgggccctccggccggcgcccgcgcctgggaggcttttccttacccgccgcacgggcggagatgctctcgctccaacagcagcacggcggcgctgtcgccgccggcggcgatgcgcgccaccacgcaccgcagccgtcggtgctcggtggaggcgcggactggctagtgttcgggggccgcgccgacctggaggagcccgcgaggaatgccccgtcgcccgccttgttccttcttccgcccgcggggctcgatgacagggcggcccagcccgagcccaatcccaagcccgcacagctcgcaggagctgttgatgaagagcgacatttggcacttgcacatcaaaactacaggtcagggaagtaccgagaggctctagagcatggtaatgtcgtttacgagaagaatccacgtcgaactgataacctcctcctccttggagctatatactatcagattcgtaattatgacatgtgcattgcaaaaaacgaggaggctcttgccatagatccacattttgctgaatgctacggcaatatggcaaatgcttggaaggagaaaggtgatattgatcttgcaattcgttactatcttactgctattcagctgcgaccaaacttctgtgatgcatggtcaaatctcgctagcgcatatacaaggaaggggagactgaatgaggcagctcaatgttgtagacaggcacttgctataaatcctcgattggttgatgcacatagtaatcttggaaatctgatgaaagctcaaggctttattcaagaggcatacagttgctacatcgaggcgttacgtattgatcctcattttgcaattgcatggtcaaaccttgctggtctgtttatggaggcaggagacctcgacaaggctttaatgtattataaggaagctgttaagcttaagccatctttcgctgatgcatatcttaatcaagggaatgtttataagggaaactggatcttatatatttttgg

SEQ ID NO: 200760 - DNA, 1758 bp, Zea Mays
ctcactctcaactcccgagagcacacaagagtagacccaatggccaatggcgatggcaatggaatcacgggagccccgcacatcgctgcactgccatgggacgcccgttgaaaaccccaaggagctggagccgatgaagtagccggcgatcccagcccgacctcgatcctgttctgaacgaggagatattcgccatcctggtgctcatggcgctggtgaccacgttcatcaccacgcccacggtgatggctatctacaagcccgcgcgcgccgccggccgcaggcgcctgcaccagcgcaagctccagggccccgacccctccgcgccgtcctcgccgtccgcctcggccggcgccggcgccgcgatggagctgcgcgtgctggcctgcatccacggcgggcaggacgtgcccgcggtgatcaacctcatcgagaccatccgtggccacacgcagccacgccgactcgtcaagctctacatcctccgcatggtggagctgacggagcgcacctcctccatcctcatggcgcgcgccgcgcgccggaacgggctgccgttcctgcgcccgcgccgcgcgggggagccgcacgaccaggtggacgtggccttcgacacgtacgcgcagctcggccacgtccacgtccgcgccatggccgccgtgtccgcgctccacaccatgcacgacgacgtcaccgccgtggccgaggacaagcgcgtctccctcgtcgtgctgccgttccacaagcgccacacgggcggcggcgacgacgtcgagaacctcgggcccgagtggcgcgccgtcaaccgccggatcctccgcgaggcgccctgctccgtcgccgtcctcgtcgaccgcggcttcggcggcggggagcaggtcagctcggagcaggtggcgcacggcgtctgcgtcgtgttcttcggcgggcccgacgacagggaggcgctcgagctcgccgggaggatggccgagcaccccggcgtgcaggtcaccgtcgtgcggttcgttgatggcaaggccggtagcgaggagcagtccgaggtcacgctgcgcccgtcccacaccaagaacgccgaccggagctacacgttctccacggccgtcgtcgacgccggcaaggagaaggagctggacgaggcggctgtggcggagttccggcagaggatggggtccctggtgcggttcgaggagcgggtggtggtgggcaacgtgatcgaggaggtggtgtcgatcgggaagagcagggagtacggcctggtggtcgtcggcaagggccggctgccgtccgcgatggtggcgcagctcgccgtcgttccggcagagcacccggagctcgggcccatcggcgacgcgctcgcgtcgtccggccacggggtgacgtcgtcggtgctcgtggtccagcagcacgacatgagcaacgccgacgaggtgcccgtctctgtggtggtcgacggccgtcctcaggacggcgagttcgccaaggacatggcggagccgtgagagccttgctccagtaggacgacgatggctaaaagtacttctatagttgttcttcggtaataagcatgtagtactaatcattattgctaagtgtgtctcggttttcttttcacaagcattgctgctgctaatacactattagtatatactgtattcactcgttagtttttatttaccgatgctaataatacccaaatgtataaatgtttgttcggacagctgagacaggcagagcttgatcctttttcagactgaa

SEQ ID NO: 200761 - DNA, 3433 bp, Zea Mays
ctggatgcaacttcttcatgtttatttatattaggttggacttctacttcaagcagtaggttacccaccaactacaataatattcttggccggttctgagacttttggtggacaaagaatgcttattcctctacgagctatgttcgctaacctagtagaccgcacttcattatgtagtcagagggagctgtttgatttagttgggccagaagatcctcgaaccccagatttgccacagcctccacctcccaaaagtgaaaaacaacttattgaagaatggaggagagcagggcctcgtccaaggccgctgcctccacctcctgcaaggccattctatgcacatgagaaggaaggctggtatggttggattggtgagaatgacacagaaccggatgcttcactgatcgagttcaggaggcaagcacaccagttgctctgggatgcacttgattattttgtttctgttgaagctgatgccttcttccccgggtttcacaatgacggtagtggttggccagactactcaagtttggtcatggggcaccggttgtaccaaacaccttccggtataacctacaggccggacagaaagattattgctgcactgtttgaagatgttaatgatcatcggtatcatccacctcggaattggacaattgctgcacgtgagcacctcaacaggagtgcaaatgtggagggcgtagtgtcatcagctatgttatcaagacctgtatcttttctcgcccaccctttgccagagtgctcttgcagcacatcgaagtcacctgctgttgaaccggtgaaagatagcaatggcagattcctatttggaggtgaggaagagtgtgctggttggatggcacgcagccctgcgatggcgtctgccaggaataatgaacctcaaattgaggactatgaggataatttgcctgaagaaggctctagttcagacatgcaggaatctgacagaagtgactcgaataaatcttcggagcaagatgaggagatggatctggatgattagagatatgtggagcatggatgtatggcacacctttcaaccgctaccagctccaggtccaggctactcgaagacaagcatacatacgctcagaatctcctggacaggtgggaatcatcttgcatcgcgcagcgacacatcagcatctggattagtcccaggatcacaattcacaaggtcatccagcgtgggagcttgcctggaccgtactcggtatacaacaaggctttaatacgaaactaacactttgttcccttcttcattcacgtgtcattttttgtgggtacagccctaagaaactgtttatgtacaaatgtcttaactgggaatacatcattttttttgggtgagtttgatatctaatggcgactatgagctaatgagattggcttatggtggacagatgtgcacctgtatacaggacaacattgcaattgtttgtgagttttattgatcgccgaagagtgtgcttacacggatggagttggttcttctgcatgacctgtgctatggatcagaaaatcgtgtatatctactttggctacacgaaaagtttgtgtttcacatgagaagtttttgagtgaaaaaccttctctgaattcggctggctgctgtagtcggatcaaactgttgcatcttacttgttcttgttcatacagggagtgaacagaatgcatcgctgttcagtatatcgaacgcaggattccaaagtttggacatttcaatgcttgtaataaccagtggcagatcttaaaaaggaggccatgtctcctccccagttttaaaacacacatctttgtcaagctccgccactgcctataactgttaaatacatctcaataatcaacattggccatgagacttgacaaattgagattcttctgtctgccaggtcatcatgctattcatttcaatctcttctcatcccaagagcatcaagtgtatgttgctgctttgtgtgaggaccgaattgaaaatggtgtgccacttatacaaatctggatgggtatgcttgctgtcttagatgtcaaaagtgagcttctcgttgttcatggcagctgctacaacacaatggcactataggaaaactgaatataggaacacgctactcgtcgaacacaaagttaggatcctcaacaacaaatacaaagggaggggctgggagagcgcggcgcgcagtggaccgaggtcatctcgtgggagccaagggcattcgtctaccacaacttcctgtctaaggaagagtgtgaatacctaattggattggccaagcctcacatggtaaaatcaacagttgtcgacagcactactggtaaaagcaaggacagcagggtccggacaagttcgggcatgtttcttcaaagaggaagggacaaggttattcgagtaattgaaaagaggattgcagactataccttcatacctgtagatcatggagagggactccaagtactgcattatgaagtcgggcagaagtatgagcctcactttgattattttcttgatgagtttaacaccaagaatggtggtcagaggatggctactcttctgatgtatctatcagatgttgaagaagggggcgagactattttccctgatgcaaatgtgaacgtcagttctttaccatggtacaatgagctttcagagtgtgccaagagaggcctttctgtcaaaccaaagatgggagatgcacttcttttctggagcatgaaaccagatgccaccctggacccattaagtttgcatgggggttgtcctgtgattagaggaaataaatggtcgtcaaccaagtggatgcatatccacgagtacaaagcttgagccttcaagactcgagagtcgagcgtaccaaagatggatctctatgcatgtgacttggggctgtctactgggttgacacccatgtatgctttacagacccactgaagctgtattctttgctcctttgttggaggggggagaattgcagataataggggccaataagcaggggccttgctcatccctgcagtatttttgggtctgatccttgctgacttggcttttgtcttttcttttctttttcttaccttgccgtaccccagctatagaggaatggtgtagtgtctgggggcatagagtttgagattttgttttgtgccacacctgtgttactagtataagctttggtactaatgaataacgaggcctaagctcacatctactacatgaatggtgtaatattgttgaagatagaaagcatctaatgttcggtggttttcgttatggtttcggttattacgacacaagattattgtgacaaaaagtgtgttttgagagataatagagctcacatctagtacatgaatgttgtattactgtttaatgatgacacgagattatttgataattatgactgaaagtcgcctagag

SEQ ID NO: 200762 - DNA, 4452 bp, Zea Mays
ggcccggccaccccagcaggcttgggccgtggtctgctactctgctcgccctctcgcctcacttccactctcacccaccaccgcctttctccttcccccgcgccgatcacgccacggcggccacgccatagggctagggtcggagatccgctcgcccggtgatcgattcgcacctcctcctctacccggatttggaggttagagtaatgaaataaaatgctgctcaaaagcaagtttaagttggccacaaccattggcatcgtgctgtcgatgctatcgctgctcgtgcacctttttattgctaattattcagctgggggcattacaaattacagcatgcacatggacgatatccttccatttggactgaggcctcgaccacggaggctgtggggtccattggtcccactcgatcacttgcatccttttgcgaaacctagcaaaccatatgctgctcccagtaagcataatggttttatttatgcaaagatatatggtggctttgagaagatacagtctacaatctgtgaccttgttgccgttgccaggctattaaatgccactctggttattcctgagatacaagcaacaactcgtgcaaaaggcataagtccgaagttcaaaagcttttcatatatatacgatgaagatcatttcatacatgcactttccagtgatgtggttattgtgcatggcttgccaaaggatctcagagaggctaggaaaaagataaaatttcccacactatctcctaggaattctgctactccagaatactacatcgaagaagtattacccagacttgtaaaatcgaaagttcttgggataattgttaatggaggtaattgtcttcagtcaattctccctgcaagcttggaggaatttcagaagcttagatgcagggtagccttccatgctctaaggttgcgccctcaaattcaggctcttgggagccaaatagtaggaagattgcgagcatctggccgtccttatgtggcctatcacccaggactgcttagagatactctagctttttatggttgcgctgaactgttccaggatattcatacagagcttattcagtatagaaggaatcagatgattaaacgaggaacagtaaaggagcagctagcagttgattcagtgtccaggaagatggctggtttgtgtccactcatgccagaagaggttggacttctacttcaagcagtaggttacccaccaactacaataatattcttggccggttctgagacttttggtggacaaagaatgcttattcctctacgagctatgttcgctaacctagtagaccgcacttcattatgtagtcagagggagctgtttgatttagttgggccagaagatcctcgaaccccagatttgccacagcctccacctcccaaaagtgaaaaacaacttattgaagaatggaggagagcagggcctcgtccaaggccgctgcctccacctcctgcaaggccattctatgcacatgagaaggaaggctggtatggttggattggtgagaatgacacagaaccggatgcttcactgatcgagttcaggaggcaagcacaccagttgctctgggatgcacttgattattttgtttctgttgaagctgatgccttcttccccgggtttcacaatgacggtagtggttggccagactactcaagtttggtcatggggcaccggttgtaccaaacaccttccggtataacctacaggccggacagaaagattattgctgcactgtttgaagatgttaatgatcatcggtatcatccacctcggaattggacaattgctgcacgtgagcacctcaacaggagtgcaaatgtggagggcgtagtgtcatcagctatgttatcaagacctgtatcttttctcgcccaccctttgccagagtgctcttgcagcacatcgaagtcacctgctgttgaaccggtgaaagatagcaatggcagattcctatttggaggtgaggaagagtgtgctggttggatggcacgcagccctgcgatggcgtctgccaggaataatgaacctcaaattgaggactatgaggataatttgcctgaagaaggctctagttcagacatgcaggaatctgacagaagtgactcgaataaatcttcggagcaagatgaggagatggatctggatgattagagatatgtggagcatggatgtatggcacacctttcaaccgctaccagctccaggtccaggctactcgaagacaagcatacatacgctcagaatctcctggacaggtgggaatcatcttgcatcgcgcagcgacacatcagcatctggattagtcccaggatcacaattcacaaggtcatccagcgtgggagcttgcctggaccgtactcggtatacaacaaggctttaatacgaaactaacactttgttcccttcttcattcacgtgtcattttttgtgggtacagccctaagaaactgtttatgtacaaatgtcttaactgggaatacatcattttttttgggtgagtttgatatctaatggcgactatgagctaatgagattggcttatggtggacagatgtgcacctgtatacaggacaacattgcaattgtttgtgagttttattgatcgccgaagagtgtgcttacacggatggagttggttcttctgcatgacctgtgctatggatcagaaaatcggagtgaacagaatgcatcgctgttcagtatatcgaacgcaggattccaaagtttggacatttcaatgcttgtaataaccagtggcagatcttaaaaaggaggccatgtctcctccccagttttaaaacacacatctttgtcaagctccgccactgcctataactgttaaatacatctcaataatcaacattggccatgagacttgacaaattgagattcttctgtctgccaggtcatcatgctattcatttcaatctcttctcatcccaagagcatcaagtgtatgttgctgctttgtgtgaggaccgaattgaaaatggtgtgccacttatacaaatctggatgggtatgcttgctgtcttagatgtcaaaagtgagcttctcgttgttcatggcagctgctacaacacaatggcactataggaaaactgaatataggaacacgctactcgtcgaacacaaagttaggatcctcaacaacaaatacaaagggaggggctgggagagcgcggcgcgcagtggaccgaggtcatctcgtgggagccaagggcattcgtctaccacaacttcctgtctaaggaagagtgtgaatacctaattggattggccaagcctcacatggtaaaatcaacagttgtcgacagcactactggtaaaagcaaggacagcagggtccggacaagttcgggcatgtttcttcaaagaggaagggacaaggttattcgagtaattgaaaagaggattgcagactataccttcatacctgtagatcatggagagggactccaagtactgcattatgaagtcgggcagaagtatgagcctcactttgattattttcttgatgagtttaacaccaagaatggtggtcagaggatggctactcttctgatgtatctatcagatgttgaagaagggggcgagactattttccctgatgcaaatgtgaacgtcagttctttaccatggtacaatgagctttcagagtgtgccaagagaggcctttctgtcaaaccaaagatgggagatgcacttcttttctggagcatgaaaccagatgccaccctggacccattaagtttgcatgggggttgtcctgtgattagaggaaataaatggtcgtcaaccaagtggatgcatatccacgagtacaaagcttgagccttcaagactcgagagtcgagcgtaccaaagatggatctctatgcatgtgacttggggctgtctactgggttgacacccatgtatgctttacagacccactgaagctgtattctttgctcctttgttggaggggggagaattgcagataataggggccaataagcaggggccttgctcatccctgcagtatttttgggtctgatccttgctgacttggcttttgtcttttcttttctttttcttaccttgccgtaccccagctatagaggaatggtgtagtgtctgggggcatagagtttgagattttgttttgtgccacacctgtgttactagtataagctttggtactaatgaataacgaggcctaagctcacatctactacatgaatggtgtaatattgttgaagatagaaagcatctaatgttcggtggttttcgttatggtttcggttattacgacacaagattattgtgacaaaaagtgtgttttgagagataatagagctcacatctagtacatgaatgttgtattactgtttaatgatgacacgagattatttgataattatgactgaaagtcgcctagag

SEQ ID NO: 200763 - DNA, 2115 bp, Zea Mays
cctataggctccaaatataggagttcccaaaacgtgcggcaaccataaaccatgcgggtccgctagcattgatttgcaaatctgtctagttcacctcgatggccgccaaccacaacgctgatgatgccgctagagagcctgtcgcgagcgcctctccacccgcctctgaggccgagcaccgcgccctcctccgaccatcgtcgttcatctccgccatctcagacgacaatgaagggtgcaaggagcgggcgttcgagccatccgagaaggtcatcgtctccgtctccggcgaccccgaaggcgatgctagcgaagagcgcgccttctacgcctcggggggctgcatgccgcccttctcgtggcgcaagctgtgggcattctcggggcccggctttctgatgagcatcgcgttcgtagacccggggaacatcgagggcgacctgcaggccggtgccacagcgggcggcacgctgctctgggtgctcgtgtgggcgacggccatgggcctactcgtgcagcttcacgccgcgcgcctcggggtggccacagggaggcaccttgctgagctgtgccgtgacgagtacccggattgggcgcgccgcgcgctctggttgatggccgaggtcgccttggtcagcgctgacatccaggaggtcatcgggagcgccattgccatcaagatcctcagccacggcctgttgcctctctggggcggtgttgtcattaccgctttggattgctttatgattctttccctcgagaactatggggtgagaaagttggaagctctatttgcggttctaattacaacaatggcgtgctccttcgcatggatgtttgtagagaccgagcctagtggcaaagatctattcattggtattcttgtcccaaaactaagctcgagatcgataaaacaggccgttggccttgttggatgtgtcatcacaccccacaacgtgttcctccattccgctcttgtgcagtcaagaaagattgacccggacaaggaatacgaagtccgtgaagcgttgaggtactattccattgaatccaccctggcattggtagtgcccttgatgataaatttatttgtcacgacagtttttgcaaaggggttctatggtaccaaggaagcggatagtatcggccttgagaacgccgggaagtatctgcaggagaagtttgggggagactttttccctatcctttatatctggggtgttggactgttagccgccggcaccagtagcaccataactggaacttacgctgggcagtttataatgggtgggtttctgaactggcggctgaaaaaatggatcagggcattgatcactagaagctttgcgattgttccgacgataatcgtcgctttgtacttcaacaattctggctatgagctggatgttctcaatgagtggctcaatgtgctccagtcagttcagatccctttttctctcatcccactgataacactggtttcaaaggaggaagtcatgggggtgtacaagataggtccaagaatgaaaattctaacctggatagttgcctctctaccgatcctaatcaacagctatatgttgttggacttcttctctctggaaatgggaggcatgttgtacaacacaactctttgcgtggctgtggtggcttattctatgttcatattatatcttatttttcgaggcatgaaatttccttcctatctgacgacgacgtaacatgagaagagattcgtattgtgaaacttggatggagaaaattgttgtatggtagattattgccattagaagatcacaaaaatgcagtgtccattgtatagagtcacataaagtttcaattgttgcaaaggactagtaactagtaagactgttgtatggtttgtacataaacctctaactacgattaaaaaattatcatgagagatgaacaacctatgtattttacattaatttcctaaggatattttcttgtttcatgatacctgaaaatgataaatagtggtcagtggatggtcgagtcctcgtgacatggatctcccaaaagtcccctccatgggagatcgaatccccacatcgcggtcatgtctcagaagttcccccgagacacctgtaa

SEQ ID NO: 200764 - DNA, 1037 bp, Zea Mays
cgacagtggtggccacatccattcggctttctgggcttcaggaagatagtggcggacaggtgggagttcgccaacgagttcttcaggaagggcgccaagcacctcctcgccgagatccaccggaggaagtcgtcgcagccgctgccgacgccgctgccgccgcaccagccctaccaccaccacctccaccatctccaccaccacctcagcccgttctccccgccgccgctggcacagccggtgccgtcgtaccaccaccaccactttccaagaagagcccatcgccaccgccaccgcgccgcacggcggtgctcaagccgccgccgccggcggcaacaatgaaggcagcggcgccggctcccggcggggactttctggccgcgctgtcggaggacaaccggcagctgcggcggcgcaactcgctgctgctgtcggagctggcgcacatgaagaagctctacaacgacatcatctacttcctgcagaaccacgtggccccggtgacgagcccctcgtcggcggcgcacgcgtccctgcccagcgccggcggcggcggcgccgcggcgtcctcctgcaggctaatggagctggacccggcggactccccatccccgccgcggcggccggaggcggacgacggcacggacacggtgaagctgttcggcgtggccctgcagggcaagaagaagaagcgggcgcaccaggaggatggggacgacggcaaccatgagcagggaagcagcgacgtctagccgccggccggcttgcattgctagctctctcgttcgtgtacatacagagatcagatcagagagtagtagtttgcctcgctagctaggctaggctaggctttggtaattttcttctgagtgcgtactgaaattaatgtgcaagagcgaagtgtttgtctgagtaaaactaacaagaatctacggatgcgtgcatggaagctaagctagatgcagaggcttgcaccaccttctcaattcgcaatcgcaacaagttcttcctcgccgcggatgggaatactatacgga

SEQ ID NO: 200765 - DNA, 1074 bp, Zea Mays
acttgttgaaagggacttcattcacttgcattattacttcgagagtaaaggatatatacatgcatacaagggcttcaggaagatagtggcggacaggtgggagttcgccaacgagttcttcaggaagggcgccaagcacctcctcgccgagatccaccggaggaagtcgtcgcagccgctgccgacgccgctgccgccgcaccagccctaccaccaccacctccaccatctccaccaccacctcagcccgttctccccgccgccgctggcacagccggtgccgtcgtaccaccaccaccactttccaagaagagcccatcgccaccgccaccgcgccgcacggcggtgctcaagccgccgccgccggcggcaacaatgaaggcagcggcgccggctcccggcggggactttctggccgcgctgtcggaggacaaccggcagctgcggcggcgcaactcgctgctgctgtcggagctggcgcacatgaagaagctctacaacgacatcatctacttcctgcagaaccacgtggccccggtgacgagcccctcgtcggcggcgcacgcgtccctgcccagcgccggcggcggcggcgccgcggcgtcctcctgcaggctaatggagctggacccggcggactccccatccccgccgcggcggccggaggcggacgacggcacggacacggtgaagctgttcggcgtggccctgcagggcaagaagaagaagcgggcgcaccaggaggatggggacgacggcaaccatgagcagggaagcagcgacgtctagccgccggccggcttgcattgctagctctctcgttcgtgtacatacagagatcagatcagagagtagtagtttgcctcgctagctaggctaggctaggctttggtaattttcttctgagtgcgtactgaaattaatgtgcaagagcgaagtgtttgtctgagtaaaactaacaagaatctacggatgcgtgcatggaagctaagctagatgcagaggcttgcaccaccttctcaattcgcaatcgcaacaagttcttcctcgccgcggatgggaatactatacgga

SEQ ID NO: 200766 - DNA, 1138 bp, Zea Mays
gcattagcaccacaacacacgcgtgacatgactagcagcgctgagctgactacacagcagtacagtggcacacacagctgcagcagcactgatctgatgagcatcgtccatcgtcatggacaccacgtactggcggcttcaggaagatagtggcggacaggtgggagttcgccaacgagttcttcaggaagggcgccaagcacctcctcgccgagatccaccggaggaagtcgtcgcagccgctgccgacgccgctgccgccgcaccagccctaccaccaccacctccaccatctccaccaccacctcagcccgttctccccgccgccgctggcacagccggtgccgtcgtaccaccaccaccactttccaagaagagcccatcgccaccgccaccgcgccgcacggcggtgctcaagccgccgccgccggcggcaacaatgaaggcagcggcgccggctcccggcggggactttctggccgcgctgtcggaggacaaccggcagctgcggcggcgcaactcgctgctgctgtcggagctggcgcacatgaagaagctctacaacgacatcatctacttcctgcagaaccacgtggccccggtgacgagcccctcgtcggcggcgcacgcgtccctgcccagcgccggcggcggcggcgccgcggcgtcctcctgcaggctaatggagctggacccggcggactccccatccccgccgcggcggccggaggcggacgacggcacggacacggtgaagctgttcggcgtggccctgcagggcaagaagaagaagcgggcgcaccaggaggatggggacgacggcaaccatgagcagggaagcagcgacgtctagccgccggccggcttgcattgctagctctctcgttcgtgtacatacagagatcagatcagagagtagtagtttgcctcgctagctaggctaggctaggctttggtaattttcttctgagtgcgtactgaaattaatgtgcaagagcgaagtgtttgtctgagtaaaactaacaagaatctacggatgcgtgcatggaagctaagctagatgcagaggcttgcaccaccttctcaattcgcaatcgcaacaagttcttcctcgccgcggatgggaatactatacgga

SEQ ID NO: 200767 - DNA, 692 bp, Zea Mays
attgcagtagtacgccatctgcgtgcggtcgtgtggaactgtagtgctggacatcctcgccttccagccttctcgaaaatcgaaaccctagaccgcgcgccccctcgccctccggccttccacgtccgatccgatccaaaatgcataagctaggcagaggaagccgggacaaggtgcaacagttcatggcaattaccggcgcaagtgagaaagctgcccttcaggctcttaaagctagtgattggcacttggaaggagcttttgatgttttctacagccagccacaaattgctgttgctaatactcgacatctggaagagctctacaacagatataaagaaccagatgctgatatgataatggtggaaggcatatcacagatctgcaatgatttacaggcccgcacatcatttattttggttggctatcttgtcttcatctatgtgtcctgatataagattctgatacgcaaatcatgtgtgtttccctttgtcaggtggatcctcaggatattgttatgcttgtcatatcgtggcatatgaaagcttccactatgtgtgaattcactcgccaggagttcattggtggactgcagtcaataggagtggattcaatagagaagcttcaggcgaagttaccttcattgcgagctgagcttaaagatgatccttgttcagctaagggatgtacca

SEQ ID NO: 200768 - DNA, 514 bp, Zea Mays
catctgggaggagataagagatatgctagacaaacggctcatgggagaacggaggaggcctcgattctccaaggttctccttgtcgacttcgcgcgcgaatcggaattcgtcacatttttccagtatctccttgatcatgttcatgatttttccaggctatggtcacttcaggaatcaatcgacgacatcaaacaacccccatggttcgcccaacacatcatcaaaccagtccaaccgaccacctcactgatgttcttctgaacttggttatgagacatgtttatggcatacattggatgtttgtggacttatttctgtgagtacatgtgagttttgtgaactattttgtggtacatgtgacttttgtgatttttgtgaagaaacttgtgagatttgtggccttgtgagatatgtggtgtctatgatgtatgtgatgattctataatatatgtgatgtatatgtgataattctgtgatatattgtttggatggaataataaaaacaaataaaag

SEQ ID NO: 200769 - DNA, 545 bp, Zea Mays
agatattctacttccttccctccatcccggtggaacgtgaaaaataagagatatgaaactgtagatgaaagtttatagggataagtttgaaatttcatctgggaggagataagagatatgctagacaaacggctcatgggagaacggaggaggcctcgattctccaaggttctccttgtcgacttcgcgcgcgaatcggaattcaatcaatcgacgacatcaaacaacccccatggttcgcccaacacatcatcaaaccagtccaaccgaccacctcactgatgttcttctgaacttggttatgagacatgtttatggcatacattggatgtttgtggacttatttctgtgagtacatgtgagttttgtgaactattttgtggtacatgtgacttttgtgatttttgtgaagaaacttgtgagatttgtggccttgtgagatatgtggtgtctatgatgtatgtgatgattctataatatatgtgatgtatatgtgataattctgtgatatattgtttggatggaataataaaaacaaataaaag

SEQ ID NO: 200770 - DNA, 615 bp, Zea Mays
gagagctgatggagatagcttacttccttccctccacccgtaagattgtttgagctgatggagatattctacttccttccctccatcccggtggaacgtgaaaaataagagatatgaaactgtagatgaaagtttatagggataagtttgaaatttcatctgggaggagataagagatatgctagacaaacggctcatgggagaacggaggaggcctcgattctccaaggttctccttgtcgacttcgcgcgcgaatcggaattcgtcgctggcttctagcctcgtgcggtcgtgcccacgcaggttagttccaaaaaaaaagaggaaattcgctgacggtctataacaggtactctactgctccgtctaaaaaacgaaattgttgctggaggctgggtcaagtcatctgcagatggaccggatggtttggctagtcacattcacattcacatgactgaagcctctgaagggtgtctcgtcattttgttttgttttgttttgtttttggggttgttctgactgaagattgggggtcttttgttgatgaatgggaggatggaggggtttgtttggttgtgtacctaccttctcgctgaggacctcctggatgtggg

SEQ ID NO: 200771 - DNA, 4880 bp, Zea Mays
gaatgatctatctagatgtacacccacactctttcctggcttgaaaaattaaacagactacaataactcaataagattacccagcatccagaaaaacgaatgtgtaaaaacaaaagagcgagacagagctgaggcttgggtcgtttggattcgcatgtatctacctcaatccctatgtgttagtggtttggtgtatattttaaactaaattctacacaccaaaccacttcatcctgcttagattaagttgaatactatatgcagccaaacaagacctgaatgtaatccagtgttggatcatcgttcgaggagaaataacagcatgattgattggcatgaaatctggaacaggtccctctgttcctgatgcactctacggtcttcgtctccggcctggccttcgccacctacttctgctggaggctggccctggtttcgttccctctcgtcctgctgctcataatcccgggactcatctacggcaagtacctcctctacctgtcccgccggtcgcgccacgagtacgccaaggcgaactccctggtcgaccaggctctgggctccatcaagaccgtctactccttcacggccgagaagaggatcatccagaggtacacggcgatcctcgacaagacgatcaagctggggatcaagcagggcatcgccaagggtctcgctgtggggttcaccggcctttctttcgccatttgggccttccttgcgtggtatggtgggaggctggtggtgttccatcatgtgaccggtggaaggatatatgctgctgggatttccttcgtcttgggtggcctatcccttggaatggcactgcctgagctgaaacatttcgctgaggcgtctgttgctgccacaagaatccttgatcggataaaccgtgtcccccagattgatgctgaggacccaaaaggccttgtgctggaccaaatccggggagagctcgaatttgagtctgtccgtttcgagtacccatcaagaccaaacatgcccgtcctcaaaaacttcagcctccagattcccgctgggcagactattgctttggttgggtccagtggcagcggcaagtcaacagcgatagctttagtgcagcgcttctacgatgccagcgaagggactgtaaaagttgatggttttgacatcaaagaactccagctcaaatggatcaggagcaagatggggctagtcagccaagaccatgcgttgtttggcacttcaataaaagagaacatcttgtttggcaaaccagatgcaaccatggacgaggtctatgcggcagctatgacagcaaacgctcacaacttcataagggggcttccagaggaatatgagacaaagattggtgagcgtggagcactgttatcaggtggccagaagcagcgtattgccattgcgagggcggtaattaagaacactgctatactcttgctcgatgaagccacaagtgcacttgattcagaatcagagaagttggtacagcatgcacttgatcaagcatctatgggacgaacaacactggtagtagctcataagctctcaaccgtgaagaacgctgatcagatcgcggtagttgatgggggtacaatagctgaaattggtacacatgatgaactgatcagcaagggtggcccatactcgagacttgtgaaattgcagaagatggtaagctacatcgatcaagaaaatgatcagtttagggcttcctcagtggccaggaccagtaccagccgacacagcatgtccagagcaagtccaatgccactaacaccagctgccttaaaggaaaatgattctgatgttcatccacctgcaccatctttctccaggcttcttgcaatgaacgcacctgagtggaggcaggcagtcgtaggcagtttatccgcattggtatatggttccttgcagcctatctatgccataaccatcggaggaatgattgctgcattctttgttcaggaccaaaatgagatgaatgcaattatcagacgctatgccttgatcttctgctcactgtccttggtatccattgttgttaatctattgcagcactacaattttgcatacatgggggagcatcttgttaggcgcatccgggtccaagtacttgagaagatattaacttttgaggcagcatggtttgatgaagaaactaactcaagcggtgcattgtgctctcggctaagcaatgaggcttctcttgtcaaaacccttgttgcagacagaatatccttactgcttcaaacagcttctggaattataattgcagtgacaatgggcctgatggtagcttggaaacttgctcttgtcatgatagctgtacagccatctacaatgatgtgttattatgcaaaaaaaatggttctctcaaatgtgtcaagggacttggcaaaggctcagcatcaaagcacccagattgccatagaagctgtttacaaccacaggatggtaacctcctttggatgttcatcaaaggttcttcagctattcgagcatgcgcaagaggaacccttgaaaaaagcaaggaagaaatcatgggtagcagggatcaccacagggttgtcaccttgcctctcgttcttgtcatgggcactggacttctggtatggtgggaagctagcacagtctggggagatatcggcgggtgatgttttcaaaaccttcttcgtgctggtgagcacaggaaagcttattgctgatgctggtagcatgacttctgacctggcaaagggatcaaatgcagttgcttcagtatttgaggtgctagataggaaatccatctctccaaaaaattcacaggtagagaaggaggatcagaagaagaaaatagaaggtaggatagaattcaagaaggtagattttgcatatccaacaagaccagagtgccttatcctacaggattttagcttggacgtgaaagcaggaacaagtgttggcctggttggcagaagcggttgtggtaaatcaactatcataggtttgatccagaggttctatgatgttgataggggggctgtaagaattgatggtatggatgtgagggagatgaatattctctggtttcgaggatttacagctcttgttagtcaggagcctgcaatgttttcaggcagtgtcagggacaacattgcttttggtaaaccagaagctgatgaagatgagattgtggaagctgcgaaagctgcaaacgcacatgagttcatctcaactttgaaggatggatacgatactgattgtggagagcatggtatacagctctcaggggggcagaagcaaagaatcgcaattgcaagggcaataatccggaatcccacaatactactacttgatgaagcaacaagtgcgcttgatgcacagtcagagcaagtggtgcaggaagctcttgatcgaataatgtcagggaggaccacaattgtggtggcacatcggctaaacacaatcaagaatgtagactcgattgcttttctgggagagggtaaagtggtggagcgtggctcttacccgcagctcatgaacaagaagggggcattctataaccttgcaactcttcagaagtaactggttgtatgacatgtaaactattatacctaatgaaactccggcagtaattgatatgatagctaggttactatagcacagaagcagcactcctaagctagttttcaagcaactctttcaataatcagttaatatatatctgacacaatcctcgtccttcaagtttctggtgggctaacacaggcaaaaaatatatatataaaaagaaatgacaatatggcctagctaaaagaagcatgataagtaaaaacaagcattatgatgcatgaatcatcatgtcttgtcctctgataacatatgtgagcttcaacagaatgaaaaagaatgttcatgaaaggacttaccctgaagtgaccatagcctggaaaaatcatgaacatgatcaaggagatactggaaaaatgtgacctgccatgatcatgctgttattcgtgagtaaatactcagtaaagagcatggacatgatcaaggagatgatgtttggctgttacctgccataaggcatatttgtctatctgacggatatcataaaaagaaaaaaaatgctcaattgtataacccatatgaattgacctaactatttcctcaacgctagactatctccattcctatacaaaagagtgatccactatacgaacctgagagtgactacgcataagactattagctgtctctgttaatttatcgccactatgccctcccttcctacaaggaacgttacgataggacatgggagttattctaaattctccgtggcatgggaccaaactgccttctcaagtctcaacagcatctacaccgagaccatgaaaagcattctcccatagtatttgaaaataaaggaattcacccttccccctaaggccatgttcgtttgatcccaaaaccatagggattgaggtggattgaaagggattgaagaggattttgacttgtaggggatttgatcccctcaatccctatggatcagcacaaaacgaacagagcctaacagttgtcctccacatactttggctatccagtggtcagagacacgcgttaccagccctagtaatgccagggacaatgcctacctgccgttgccagcccgttgccctttttagttctgaattttctttttacatgaaacatgcctgaatctgaatcccatctgctagaagaagaaaatcgcagaacccactgacatgcacatgcatataatcttctgctcatccatcagtagcaacccgcaagggaacgggatggatgccagggtttcggccgggtcaacgatcgcagattcgcagttccccgcaaagctcacgggcgccagg

SEQ ID NO: 200772 - DNA, 3214 bp, Zea Mays
  misc_feature (3213)..(3214): n is a, c, g, or t
atcacttcaaaaagtaggaagctttactgagttctgacttctcgttatccgaaagatctttaccttctaatactggtgcttgtctgcttactgtagttgtcatcagcgaaacgagacatacaggaaatgggttcacttatatctctagaaaatgatagcttaacagaggaccttctgccttctagaaatgcgtttttggtccgccaatctcgatctggcagaaggcatggaaacatattactgagaggatcagttttccgaactttcagcattaatttcttcacttatggattcccggtcttgctgcttgccctttccttctggagtttcaacttcactagtatttgtgcttttggtctcctagcatacgttgggtacattttatatgcttttccttctttgttccaaatgcatcggctgaattggtcacttctagtgttcattctgctttgggcagccagcacatatgtcttcaatgtggcattcacattcttcaacaaaagatttcaaaaggatatgatgatttgggagactgttgggctttggcactattctattcctggattatttttacttgcccaattctgccttggagtttttgtggcactgtgtaatcttgttaacaattctgtttttctttacttgacttctgaagggggtccttcaacaagtgatgatcacctcattgatggtctctcaaataatgctacagcaaaggatttcatggagataggctcaatagtttgcttctgtgctgtgcatagccatggttttaagatgcttttttcattatcggcggttcttcggcatacaccttgtccacctgttggattcactattctaaaggctggtttgaacaagtcagttctactgtcagtttatagctcgcaaaattcacgagacggtgaagaccaccgtaatttacatgagaaaaaaatcgcatcatatctgagtaaaattggtcagaaatttctcttagtgtaccgctcatatggaacttatgtggcttttctcacaatacttttgactctatacttggtgacccctaattatatatcatttggttacctatttttccttctattttggattattggaaggcagcttgtggagaaaacaaaaaggcgactgtggtttcctctaaaagtatatgctacggttgtttttatttttacctacagcctgagtgtttcaccgatctttgcagaatcagtctcaaagttccttaaactataccctgatctgggatttgaccctgaagcttctttgctggaaaatgtttggcaatcattggccattctagtcgtaatgcaactttacagttatgaacgaagacaaaacagtgacaagaactttggtgtatctgatgcttcagaatctggacttctggggttcctaagaaggtttctaatttggcacagcgacaagatattatcagtttgtgtgttttatgcttgcttatcatcaatcagtttatctggcctaatttacctgttagggcttattgtgttttctacgttaccaaaagtttctcgaattccttccaaggtttaccttgtctacactggtttgcttgctgcatctgaatatctatttcaaatggtgtgcaaacctgcacagatgtgtcctcatcagcacttctatggtttgtctgtgtttcttggtctgaaatactatgattctgggttttggggtatcgaatacaggcttaggggaaaagttttagtgattgtggcctgtaccattcagtataatgttttccattggctagatttgatgccaacatctctagtacataagggtaaatgggaagagccctgtcaactttttatctcttccaacccaccttatagtcctgtcagaagcaacgaagaaagtcattcatctaataggtttacttcattgttttctaaagttcaaggtcttataggtagtagttcaagttcaagctcatcagtgggtccaggcagcattcaccagaaattagagtatgttgataatgccatcgaaggctcagatgaggacaaaagacactcatttgcaaagatttggggattgtcaaaagaaagccacaagtgggacaagaaaagggttatttttctgagaagagaaagattcgaaacccagaagacaacattcaaatgttacatgaaattctggatagaaaatcttttcaaactgcgaggtctggaaattaacatgattgtgttactattagcaagctttacactgttgaatgttgtatcgatcttctatatcatgtgccttgtcctttgcattcttatgaacagagatctaatccagaaattgtggcccctttttgtgtttctgtttgcttctgtcttaatacttgaatatgttgctctttggaatgatgagataacctggtatcatggtaccaatgacattgaagtccattgccgtgagtgctggaagaattcaaggattttttttgactactgctcaaaatgctggcttgggataattgctgatgatcctcgaatgctgattagctactatgttgtgtttatattttcctcttttaagcttcggtctgatcacttttcgagcttctcagactcggacacatatcggcagatgatgtcccaaaggaaaaatgcagtagtatggagggacctctcactggaaacaaaaagcttttggacattccttgactatgtgcggctttatgcctattgccatttattggacatagttttggcactaattgcaattaccggtactctagagtatgatgttctgcaccttggttatctcggatttgctctggttttctttagaatgagacttgaaatcttgaagaagaagaataggattttcaagtttctacggatgtataattttggtctcattgttttgtcacttgcttatcaatctccttatgttgggcaatttagctctggcaagtgcgatcaaattgactacctatatgagataattggattatacaaatatgactatgggtttaagataacatcacggtcagcttttgttgagatagtaatcttcctattggtatctgttcaatcatacatctttagctctagtgagttcgattatgtgtcaagatatcttgaagcagagcaaattggtgccatggtccgtgagcaggaaaaaaaagctttaaagaaaactgagcagctgcatcatcttcgcaggtctgaggagcataaacgtcagcggaatatgcann

SEQ ID NO: 200773 - DNA, 3516 bp, Zea Mays
  misc_feature (3515)..(3516): n is a, c, g, or t
atcacttcaaaaagtaggaagctttactgagttctgacttctcgttatccgaaagatctttaccttctaatactggtgcttgtctgcttactgtagttgtcatcagcgaaacgagacatacaggaaatgggttcacttatatctctagaaaatgatagcttaacagaggaccttctgccttctagaaatgcgtttttggtccgccaatctcgatctggcagaaggcatggaaacatattactgagaggatcagttttccgaactttcagcattaatttcttcacttatggattcccggtcttgctgcttgccctttccttctggagtttcaacttcactagtatttgtgcttttggtctcctagcatacgttgggtacattttatatgcttttccttctttgttccaaatgcatcggctgaattggtcacttctagtgttcattctgctttgggcagccagcacatatgtcttcaatgtggcattcacattcttcaacaaaagatttcaaaaggatatgatgatttgggagactgttgggctttggcactattctattcctggattatttttacttgcccaattctgccttggagtttttgtggcactgtgtaatcttgttaacaattctgtttttctttacttgacttctgaagggggtccttcaacaagtgatgatcacctcattgatggactgttctttacagagaaggaagatacaatggttctgattgtagcaacaatagcatggggtctacgcaaactttcacgtgcaattactttaacattactctttctacttgtgatgaaacgaggatttattcatgctgtttacatgtgctttttcttggtgtttctggtgaatcattcaatcgacaagagactgcgccagatcttagtattgttttgtgaggttcatttttcgatactgtacattctccagcttgatctagtgtccagtgctctggagcgcagtggttcattaacaatggaggtctctcaaataatgctacagcaaaggatttcatggagataggctcaatagtttgcttctgtgctgtgcatagccatggttttaagatgcttttttcattatcggcggttcttcggcatacaccttgtccacctgttggattcactattctaaaggctggtttgaacaagtcagttctactgtcagtttatagctcgcaaaattcacgagacggtgaagaccaccgtaatttacatgagaaaaaaatcgcatcatatctgagtaaaattggtcagaaatttctcttagtgtaccgctcatatggaacttatgtggcttttctcacaatacttttgactctatacttggtgacccctaattatatatcatttggttacctatttttccttctattttggattattggaaggcagcttgtggagaaaacaaaaaggcgactgtggtttcctctaaaagtatatgctacggttgtttttatttttacctacagcctgagtgtttcaccgatctttgcagaatcagtctcaaagttccttaaactataccctgatctgggatttgaccctgaagcttctttgctggaaaatgtttggcaatcattggccattctagtcgtaatgcaactttacagttatgaacgaagacaaaacagtgacaagaactttggtgtatctgatgcttcagaatctggacttctggggttcctaagaaggtttctaatttggcacagcgacaagatattatcagtttgtgtgttttatgcttgcttatcatcaatcagtttatctggcctaatttacctgttagggcttattgtgttttctacgttaccaaaagtttctcgaattccttccaaggtttaccttgtctacactggtttgcttgctgcatctgaatatctatttcaaatggtgtgcaaacctgcacagatgtgtcctcatcagcacttctatggtttgtctgtgtttcttggtctgaaatactatgattctgggttttggggtatcgaatacaggcttaggggaaaagttttagtgattgtggcctgtaccattcagtataatgttttccattggctagatttgatgccaacatctctagtacataagggtaaatgggaagagccctgtcaactttttatctcttccaacccaccttatagtcctgtcagaagcaacgaagaaagtcattcatctaataggtttacttcattgttttctaaagttcaaggtcttataggtagtagttcaagttcaagctcatcagtgggtccaggcagcattcaccagaaattagagtatgttgataatgccatcgaaggctcagatgaggacaaaagacactcatttgcaaagatttggggattgtcaaaagaaagccacaagtgggacaagaaaagggttatttttctgagaagagaaagattcgaaacccagaagacaacattcaaatgttacatgaaattctggatagaaaatcttttcaaactgcgaggtctggaaattaacatgattgtgttactattagcaagctttacactgttgaatgttgtatcgatcttctatatcatgtgccttgtcctttgcattcttatgaacagagatctaatccagaaattgtggcccctttttgtgtttctgtttgcttctgtcttaatacttgaatatgttgctctttggaatgatgagataacctggtatcatggtaccaatgacattgaagtccattgccgtgagtgctggaagaattcaaggattttttttgactactgctcaaaatgctggcttgggataattgctgatgatcctcgaatgctgattagctactatgttgtgtttatattttcctcttttaagcttcggtctgatcacttttcgagcttctcagactcggacacatatcggcagatgatgtcccaaaggaaaaatgcagtagtatggagggacctctcactggaaacaaaaagcttttggacattccttgactatgtgcggctttatgcctattgccatttattggacatagttttggcactaattgcaattaccggtactctagagtatgatgttctgcaccttggttatctcggatttgctctggttttctttagaatgagacttgaaatcttgaagaagaagaataggattttcaagtttctacggatgtataattttggtctcattgttttgtcacttgcttatcaatctccttatgttgggcaatttagctctggcaagtgcgatcaaattgactacctatatgagataattggattatacaaatatgactatgggtttaagataacatcacggtcagcttttgttgagatagtaatcttcctattggtatctgttcaatcatacatctttagctctagtgagttcgattatgtgtcaagatatcttgaagcagagcaaattggtgccatggtccgtgagcaggaaaaaaaagctttaaagaaaactgagcagctgcatcatcttcgcaggtctgaggagcataaacgtcagcggaatatgcann

SEQ ID NO: 200774 - DNA, 3512 bp, Zea Mays
  misc_feature (3511)..(3512): n is a, c, g, or t
atcacttcaaaaagtaggaagctttactgagttctgacttctcgttatccgaaagatctttaccttctaatactggtgcttgtctgcttactgtagttgtcatcagcgaaacgagacatacaggaaatgggttcacttatatctctagaaaatgatagcttaacagaggaccttctgccttctagaaatgcgtttttggtccgccaatctcgatctggcagaaggcatggaaacatattactgagaggatcagttttccgaactttcagcattaatttcttcacttatggattcccggtcttgctgcttgccctttccttctggagtttcaacttcactagtatttgtgcttttggtctcctagcatacgttgggtacattttatatgcttttccttctttgttccaaatgcatcggctgaattggtcacttctagtgttcattctgctttgggcagccagcacatatgtcttcaatgtggcattcacattcttcaacaaaagatttcaaaaggatatgatgatttgggagactgttgggctttggcactattctattcctggattatttttacttgcccaattctgccttggagtttttgtggcactgtgtaatcttgttaacaattctgtttttctttacttgacttctgaagggggtccttcaacaagtgatgatcacctcattgatgagaaggaagatacaatggttctgattgtagcaacaatagcatggggtctacgcaaactttcacgtgcaattactttaacattactctttctacttgtgatgaaacgaggatttattcatgctgtttacatgtgctttttcttggtgtttctggtgaatcattcaatcgacaagagactgcgccagatcttagtattgttttgtgaggttcatttttcgatactgtacattctccagcttgatctagtgtccagtgctctggagcgcagtggttcattaacaatggaggtactctcacagtctctcaaataatgctacagcaaaggatttcatggagataggctcaatagtttgcttctgtgctgtgcatagccatggttttaagatgcttttttcattatcggcggttcttcggcatacaccttgtccacctgttggattcactattctaaaggctggtttgaacaagtcagttctactgtcagtttatagctcgcaaaattcacgagacggtgaagaccaccgtaatttacatgagaaaaaaatcgcatcatatctgagtaaaattggtcagaaatttctcttagtgtaccgctcatatggaacttatgtggcttttctcacaatacttttgactctatacttggtgacccctaattatatatcatttggttacctatttttccttctattttggattattggaaggcagcttgtggagaaaacaaaaaggcgactgtggtttcctctaaaagtatatgctacggttgtttttatttttacctacagcctgagtgtttcaccgatctttgcagaatcagtctcaaagttccttaaactataccctgatctgggatttgaccctgaagcttctttgctggaaaatgtttggcaatcattggccattctagtcgtaatgcaactttacagttatgaacgaagacaaaacagtgacaagaactttggtgtatctgatgcttcagaatctggacttctggggttcctaagaaggtttctaatttggcacagcgacaagatattatcagtttgtgtgttttatgcttgcttatcatcaatcagtttatctggcctaatttacctgttagggcttattgtgttttctacgttaccaaaagtttctcgaattccttccaaggtttaccttgtctacactggtttgcttgctgcatctgaatatctatttcaaatggtgtgcaaacctgcacagatgtgtcctcatcagcacttctatggtttgtctgtgtttcttggtctgaaatactatgattctgggttttggggtatcgaatacaggcttaggggaaaagttttagtgattgtggcctgtaccattcagtataatgttttccattggctagatttgatgccaacatctctagtacataagggtaaatgggaagagccctgtcaactttttatctcttccaacccaccttatagtcctgtcagaagcaacgaagaaagtcattcatctaataggtttacttcattgttttctaaagttcaaggtcttataggtagtagttcaagttcaagctcatcagtgggtccaggcagcattcaccagaaattagagtatgttgataatgccatcgaaggctcagatgaggacaaaagacactcatttgcaaagatttggggattgtcaaaagaaagccacaagtgggacaagaaaagggttatttttctgagaagagaaagattcgaaacccagaagacaacattcaaatgttacatgaaattctggatagaaaatcttttcaaactgcgaggtctggaaattaacatgattgtgttactattagcaagctttacactgttgaatgttgtatcgatcttctatatcatgtgccttgtcctttgcattcttatgaacagagatctaatccagaaattgtggcccctttttgtgtttctgtttgcttctgtcttaatacttgaatatgttgctctttggaatgatgagataacctggtatcatggtaccaatgacattgaagtccattgccgtgagtgctggaagaattcaaggattttttttgactactgctcaaaatgctggcttgggataattgctgatgatcctcgaatgctgattagctactatgttgtgtttatattttcctcttttaagcttcggtctgatcacttttcgagcttctcagactcggacacatatcggcagatgatgtcccaaaggaaaaatgcagtagtatggagggacctctcactggaaacaaaaagcttttggacattccttgactatgtgcggctttatgcctattgccatttattggacatagttttggcactaattgcaattaccggtactctagagtatgatgttctgcaccttggttatctcggatttgctctggttttctttagaatgagacttgaaatcttgaagaagaagaataggattttcaagtttctacggatgtataattttggtctcattgttttgtcacttgcttatcaatctccttatgttgggcaatttagctctggcaagtgcgatcaaattgactacctatatgagataattggattatacaaatatgactatgggtttaagataacatcacggtcagcttttgttgagatagtaatcttcctattggtatctgttcaatcatacatctttagctctagtgagttcgattatgtgtcaagatatcttgaagcagagcaaattggtgccatggtccgtgagcaggaaaaaaaagctttaaagaaaactgagcagctgcatcatcttcgcaggtctgaggagcataaacgtcagcggaatatgcann

SEQ ID NO: 200775 - DNA, 4247 bp, Zea Mays
  misc_feature (4246)..(4247): n is a, c, g, or t
gctttttttaggttacaggctctgaagaatgtgatgcctgatggtaagaaaagggaacatggtaggaagtggttagtatgtttaaaggttacaggctctgaggctctgaagaatgtgatgcctgatgcttctttacttgattggagcttggtttctcttattaatatggtcatcttctttgctattcgatttgctgttccaagaagaggtctttacacctggaggctgcacattgtattgtggtgtacaattatttactcagtccttgctattttagcacaagttgcgtttcatataatctggtacattgagggcaagggatggtctgtggctcattcttggtgggcgaagctggtgggtttagcaagggaccagccatgggaatcaccatcagttatctattttcttgcattacagctatctgctgcaggccttgctttggtcgaagtccttggaggaaggcttcaagattcttgctggttgaacttctcttttgaggttgagcaaataggttaccatttgcgggtagcatgctgcttattactgcctgctgctcagttagttgtcggtattagccatccttcatggatttcattaccgttctttgtatttagctgcattggccttgtggattggtccttaacaagtaactttcttggccttttccgatggtggaggttacttgagatatactcggtgttcagtattcttctgctttatctctaccagttacctatgaaatttccctatattgcgttagcatttgctgacttcattggtcttttcaaaatttcctcgaaatcagaatggcctgagctgtcttctggaatttctcttctggtatattatttcatgttgtcatcagcgaaacgagacatacaggaaatgggttcacttatatctctagaaaatgatagcttaacagaggaccttctgccttctagaaatgcgtttttggtccgccaatctcgatctggcagaaggcatggaaacatattactgagaggatcagttttccgaactttcagcattaatttcttcacttatggattcccggtcttgctgcttgccctttccttctggagtttcaacttcactagtatttgtgcttttggtctcctagcatacgttggccagcacatatgtcttcaatgtggcattcacattcttcaacaaaagatttcaaaaggatatgatgatttgggagactgttgggctttggcactattctattcctggattatttttacttgcccaattctgccttggagtttttgtggcactgtgtaatcttgttaacaattctgtttttctttacttgacttctgaagggggtccttcaacaagtgatgatcacctcattgatgagaaggaagatacaatggttctgattgtagcaacaatagcatggggtctacgcaaactttcacgtgcaattactttaacattactctttctacttgtgatgaaacgaggatttattcatgctgtttacatgtgctttttcttggtgtttctggtgaatcattcaatcgacaagagactgcgccagatcttagtattgttttgtgaggttcatttttcgatactgtacattctccagcttgatctagtgtccagtgctctggagcgcagtggttcattaacaatggaggtactctcacagttaggtctctcaaataatgctacagcaaaggatttcatggagataggctcaatagtttgcttctgtgctgtgcatagccatggttttaagatgcttttttcattatcggcggttcttcggcatacaccttgtccacctgttggattcactattctaaaggctggtttgaacaagtcagttctactgtcagtttatagctcgcaaaattcacgagacggtgaagaccaccgtaatttacatgagaaaaaaatcgcatcatatctgagtaaaattggtcagaaatttctcttagtgtaccgctcatatggaacttatgtggcttttctcacaatacttttgactctatacttggtgacccctaattatatatcatttggttacctatttttccttctattttggattattggaaggcagcttgtggagaaaacaaaaaggcgactgtggtttcctctaaaagtatatgctacggttgtttttatttttacctacagcctgagtgtttcaccgatctttgcagaatcagtctcaaagttccttaaactataccctgatctgggatttgaccctgaagcttctttgctggaaaatgtttggcaatcattggccattctagtcgtaatgcaactttacagttatgaacgaagacaaaacagtgacaagaactttggtgtatctgatgcttcagaatctggacttctggggttcctaagaaggtttctaatttggcacagcgacaagatattatcagtttgtgtgttttatgcttgcttatcatcaatcagtttatctggcctaatttacctgttagggcttattgtgttttctacgttaccaaaagtttctcgaattccttccaaggtttaccttgtctacactggtttgcttgctgcatctgaatatctatttcaaatggtgtgcaaacctgcacagatgtgtcctcatcagcacttctatggtttgtctgtgtttcttggtctgaaatactatgattctgggttttggggtatcgaatacaggcttaggggaaaagttttagtgattgtggcctgtaccattcagtataatgttttccattggctagatttgatgccaacatctctagtacataagggtaaatgggaagagccctgtcaactttttatctcttccaacccaccttatagtcctgtcagaagcaacgaagaaagtcattcatctaataggtttacttcattgttttctaaagttcaaggtcttataggtagtagttcaagttcaagctcatcagtgggtccaggcagcattcaccagaaattagagtatgttgataatgccatcgaaggctcagatgaggacaaaagacactcatttgcaaagatttggggattgtcaaaagaaagccacaagtgggacaagaaaagggttatttttctgagaagagaaagattcgaaacccagaagacaacattcaaatgttacatgaaattctggatagaaaatcttttcaaactgcgaggtctggaaattaacatgattgtgttactattagcaagctttacactgttgaatgttgtatcgatcttctatatcatgtgccttgtcctttgcattcttatgaacagagatctaatccagaaattgtggcccctttttgtgtttctgtttgcttctgtcttaatacttgaatatgttgctctttggaatgatgagataacctggtatcatggtaccaatgacattgaagtccattgccgtgagtgctggaagaattcaaggattttttttgactactgctcaaaatgctggcttgttcggtacatcagaatatttatttaccaactatttctacatgaacatgatccagggataattgctgatgatcctcgaatgctgattagctactatgttgtgtttatattttcctcttttaagcttcggtctgatcacttttcgagcttctcagactcggacacatatcggcagatgatgtcccaaaggaaaaatgcagtagtatggagggacctctcactggaaacaaaaagcttttggacattccttgactatgtgcggctttatgcctattgccatttattggacatagttttggcactaattgcaattaccggtactctagagtatgatgttctgcaccttggttatctcggatttgctctggttttctttagaatgagacttgaaatcttgaagaagaagaataggattttcaagtttctacggatgtataattttggtctcattgttttgtcacttgcttatcaatctccttatgttgggcaatttagctctggcaagtgcgatcaaattgactacctatatgagataattggattatacaaatatgactatgggtttaagataacatcacggtcagcttttgttgagatagtaatcttcctattggtatctgttcaatcatacatctttagctctagtgagttcgattatgtgtcaagatatcttgaagcagagcaaattggtgccatggtccgtgagcaggaaaaaaaagctttaaagaaaactgagcagctgcatcatcttcgcaggtctgaggagcataaacgtcagcggaatatgcann

SEQ ID NO: 200776 - DNA, 4567 bp, Zea Mays
  misc_feature (4566)..(4567): n is a, c, g, or t
cacctctacggaaatggtctacgggctaaggcctaggatcgcggggccacacgagacggagcaatcgaatcacgggcgagctcgacggtcggtgcaggcagctgcacccagtccggctccggcccgtgcccgtcacgactcacgcgagacagcgaaacttttcccagcggcgaagcggagatcggagaaggaaccccaccctgcccagtgagatcttctcctagcagccgcaatctctcctccctcggcgcggaggacgagcagcgctgtagattcgatcgtgtgtgctcccgagatggcgatcgggtcggactaagccgaagcgaaagcgagagccgctgcccccgtcgtcactcgatgaccaggcggacgggtgggtgcgccggcggcttcctgctgccgttgctgctcctggcagcttctttacttgattggagcttggtttctcttattaatatggtcatcttctttgctattcgatttgctgttccaagaagaggtctttacacctggaggctgcacattgtattgtggtgtacaattatttactcagtccttgctattttagcacaagttgcgtttcatataatctggtacattgagggcaagggatggtctgtggctcattcttggtgggcgaagctggtgggtttagcaagggaccagccatgggaatcaccatcagttatctattttcttgcattacagctatctgctgcaggccttgctttggtcgaagtccttggaggaaggcttcaagattcttgctggttgaacttctcttttgaggttgagcaaataggttaccatttgcgggtagcatgctgcttattactgcctgctgctcagttagttgtcggtattagccatccttcatggatttcattaccgttctttgtatttagctgcattggccttgtggattggtccttaacaagtaactttcttggccttttccgatggtggaggttacttgagatatactcggtgttcagtattcttctgctttatctctaccagttacctatgaaatttccctatattgcgttagcatttgctgacttcattggtcttttcaaaatttcctcgaaatcagaatggcctgagctgtcttctggaatttctcttctggtatattatttcatgttgtcatcagcgaaacgagacatacaggaaatgggttcacttatatctctagaaaatgatagcttaacagaggaccttctgccttctagaaatgcgtttttggtccgccaatctcgatctggcagaaggcatggaaacatattactgagaggatcagttttccgaactttcagcattaatttcttcacttatggattcccggtcttgctgcttgccctttccttctggagtttcaacttcactagtatttgtgcttttggtctcctagcatacgttgggtacattttatatgcttttccttctttgttccaaatgcatcggctgaattggtcacttctagtgttcattctgctttgggcagccagcacatatgtcttcaatgtggcattcacattcttcaacaaaagatttcaaaaggatatgatgatttgggagactgttgggctttggcactattctattcctggattatttttacttgcccaattctgccttggagtttttgtggcactgtgtaatcttgttaacaattctgtttttctttacttgacttctgaagggggtccttcaacaagtgatgatcacctcattgatgagaaggaagatacaatggttctgattgtagcaacaatagcatggggtctacgcaaactttcacgtgcaattactttaacattactctttctacttgtgatgaaacgaggatttattcatgctgtttacatgtgctttttcttggtgtttctggtgaatcattcaatcgacaagagactgcgccagatcttagtattgttttgtgaggttcatttttcgatactgtacattctccagcttgatctagtgtccagtgctctggagcgcagtggttcattaacaatggaggtactctcacagttaggtctctcaaataatgctacagcaaaggatttcatggagataggctcaatagtttgcttctgtgctgtgcatagccatggttttaagatgcttttttcattatcggcggttcttcggcatacaccttgtccacctgttggattcactattctaaaggctggtttgaacaagtcagttctactgtcagtttatagctcgcaaaattcacgagacggtgaagaccaccgtaatttacatgagaaaaaaatcgcatcatatctgagtaaaattggtcagaaatttctcttagtgtaccgctcatatggaacttatgtggcttttctcacaatacttttgactctatacttggtgacccctaattatatatcatttggttacctatttttccttctattttggattattggaaggcagcttgtggagaaaacaaaaaggcgactgtggtttcctctaaaagtatatgctacggttgtttttatttttacctacagcctgagtgtttcaccgatctttgcagaatcagtctcaaagttccttaaactataccctgatctgggatttgaccctgaagcttctttgctggaaaatgtttggcaatcattggccattctagtcgtaatgcaactttacagttatgaacgaagacaaaacagtgacaagaactttggtgtatctgatgcttcagaatctggacttctggggttcctaagaaggtttctaatttggcacagcgacaagatattatcagtttgtgtgttttatgcttgcttatcatcaatcagtttatctggcctaatttacctgttagggcttattgtgttttctacgttaccaaaagtttctcgaattccttccaaggtttaccttgtctacactggtttgcttgctgcatctgaatatctatttcaaatggtgtgcaaacctgcacagatgtgtcctcatcagcacttctatggtttgtctgtgtttcttggtctgaaatactatgattctgggttttggggtatcgaatacaggcttaggggaaaagttttagtgattgtggcctgtaccattcagtataatgttttccattggctagatttgatgccaacatctctagtacataagggtaaatgggaagagccctgtcaactttttatctcttccaacccaccttatagtcctgtcagaagcaacgaagaaagtcattcatctaataggtttacttcattgttttctaaagttcaaggtcttataggtagtagttcaagttcaagctcatcagtgggtccaggcagcattcaccagaaattagagtatgttgataatgccatcgaaggctcagatgaggacaaaagacactcatttgcaaagatttggggattgtcaaaagaaagccacaagtgggacaagaaaagggttatttttctgagaagagaaagattcgaaacccagaagacaacattcaaatgttacatgaaattctggatagaaaatcttttcaaactgcgaggtctggaaattaacatgattgtgttactattagcaagctttacactgttgaatgttgtatcgatcttctatatcatgtgccttgtcctttgcattcttatgaacagagatctaatccagaaattgtggcccctttttgtgtttctgtttgcttctgtcttaatacttgaatatgttgctctttggaatgatgagataacctggtatcatggtaccaatgacattgaagtccattgccgtgagtgctggaagaattcaaggattttttttgactactgctcaaaatgctggcttgggataattgctgatgatcctcgaatgctgattagctactatgttgtgtttatattttcctcttttaagcttcggtctgatcacttttcgagcttctcagactcggacacatatcggcagatgatgtcccaaaggaaaaatgcagtagtatggagggacctctcactggaaacaaaaagcttttggacattccttgactatgtgcggctttatgcctattgccatttattggacatagttttggcactaattgcaattaccggtactctagagtatgatgttctgcaccttggttatctcggatttgctctggttttctttagaatgagacttgaaatcttgaagaagaagaataggattttcaagtttctacggatgtataattttggtctcattgttttgtcacttgcttatcaatctccttatgttgggcaatttagctctggcaagtgcgatcaaattgactacctatatgagataattggattatacaaatatgactatgggtttaagataacatcacggtcagcttttgttgagatagtaatcttcctattggtatctgttcaatcatacatctttagctctagtgagttcgattatgtgtcaagatatcttgaagcagagcaaattggtgccatggtccgtgagcaggaaaaaaaagctttaaagaaaactgagcagctgcatcatcttcgcaggtctgaggagcataaacgtcagcggaatatgcann

SEQ ID NO: 200777 - DNA, 1239 bp, Zea Mays
gagttgtcaaacaagcgctgtgccgatgtccagctaggctggcacggcaccttatccggctccagaatcctagccacccaatcagaatccagagcaggcggtcgcagcagaagctccggtgatcagcgccctcacaatgcgagcgtgattcctcccctccatcccggctcgagctccccgcggcagcaatggagaccctcctctccccctccacattgttcacgctaccactccgtggctccagcaggagaccgtctctggctgctagcgtctcgtccaggcccaccgtgtcctgctccagcgcgctcaagaggccacaggccggcgccgtcgctgcctcctcccatggagacggcgtcggcaggaactggatgtcgttcctgcaccacggcctggcggcggccgcgctgtcgctggccatcggcctgaccccggcgcccgcgccggcggtggcgtcggagttcgacgtgctgaacgacggggcccccgtggactcctacgtggtggacgacgccggcgtgctgagccgcgtcaccaagtccgacgtcaagcggcttgcccgcgacctcgaggcccgcaagaacatccgcctcaacttcatcaccgtccgcaagctcacgagtgtcgcagagcaaggctgacgcgttcgagtacgcggaccaagtcctggagaagtggtaccccacgattgaggagggcaacaacaagggcatcgtggtgctcgtcacaagccagaaggagggcgccgtcaccggggggcccgccttcatccaggccgtcggcgaccagattctcgacgccaccgtgtctgagaacctcccagtcctcgcgaccgacgagaagtacaacgaggcgatcttgagcacggcgaagcggctggcggcggcgatcgacgggctgccggacactggtggcccgtcgttcaaggagaacaagcgggagtccaacttcaagaccaaggaggagacggaggagaagcgcgggcagttcacgctcgtcgtcggcggcctgctcgtcatcgccgtcgtcgtgcccatggcgcagtactacgcctacgtgtccaagaagtgagcgaaccatgaatatggcgtgctgtgtacagtaaatcagtaatgttataccgaagagggttttttttttaatctcccaggttgaagttcttcgatctgttggaattcatagaaatggacggaaaaaaatgattattatgcttttacattgggttcattaaaatcgaca

SEQ ID NO: 200778 - DNA, 375 bp, Zea Mays
gaatgtctaaggagggcactttaccactaggagcaagaaggttggtcttgcatcaggagaggggaattacactgatatcgtcagggaggctcagagaaacatcaagcttcctaacgtagttcttgtagacgcgataggattgcccctccgcgacgaccaactacacctctccacagaagcccaactccggctgggtgacatgctcggacaagcctttttgaaatttaactcgtccatggattcgagacaatgacatcgatattataccggtactggacctgttgttgggtgtagagctaaatgacaaataccattcttttggaatgttccattgtaaagtgtagagcattgtacaagaggagtgagttctgtcca

SEQ ID NO: 200779 - DNA, 2252 bp, Zea Mays
cacagacgcacggttctgccatcgcgcgattcccctcttccatcccgattcctccgcccgtgactccccgcgcccgcagcccccgccgccgtcctcgcgacctgcctaggacagctgtcacgcccgcaaatcacgtgaccatgcccttccatgtcctcgcgtcctccactccgcccgcgattcccctccccgcacccgcagcccccgccgtcgtcctcgcggccagccgaggacagccaccgcgcccgcaaatcacacgaccatgcccttccatgcccgcaaatcacgtcaccccttccatccatggcagtcgcgctccctctgcgcccttccatccatggtcgcggatccctacgcgccgcgattcttcccatacgctccctctgcgcccttccatccatggccgcggatccccgatgttgagatctgggagctgaagctggagatctcgcggatgcgggtgcggctgacggcggacgacggacggcgcaagaattgcggcggccggagctcccagtgctccgacggcaaggcccgcaggcggtagaaggcatccttcgcctatgactgatgcttcgctgctggcgtcgacagtggaggcgcgacaggcggtgatcgtggatggatgcggtctcagcgtctggaggatcggtcggagctaagcagggacggtggctgctgacagctgagtgatacgtgtatttctaggaagatcaagcccagagctgtcgcagagccagaagtgcatctacttccacggcaccgtcagcaaggacctcctcacacacaagttggtcatccagctctctaggaagatcaaggacgacatatgaagactggagtactttgaagtttgatgaacaacaaggacatcctcacgcacaagtttgatgaacagtcaacaaaattcttgagccagttcactccaacccaatgggacaaggatcagtggcatcctttcatggggccactgcggtccatccaagtgttgttcatttgtgttgtcttcatgatcgtggagatcaacacattcttccttaagcttgtgtcctgttgccgagttcctcaaaaggacaaagtcgttactgtggttcagtctctacttgaatgatattagtgacaagcatgctcggactaaccaacgaaaaaggtgaagtgggatggtataccatttgcaattgacatttatggtttttgctacgctggcactcagtgtttccaaatatctattagtcaatgtgcgatcgtaccaaattcaacagggctctctacatatggtatgtataactatctcaatttgaactgcattctggtgggagtcgctcttattgtttagtaatcatttttctcaatgttatgtctaaccgtgttattcaattttgcaatatgcacggcaatttatggtgctatatctattataggctacctcatgtttggagacaagatgctctcataaataactttcaatcttctgaaagattcatttgcagcaaaagttgcacgatggaccacgataactattattgtcggtttctctgattcaattaagtgggaacccttggtagtgattcaattaagtgagaagtgagaaccctcattgtgctatttttttgtttcagggttgttatctatctttgtagccgaagaaacaatcctgagaaagaatggaaagctccttggctaggaataatgtttctaagtggaatcacctgggttatgcgagaagcacatcaatggattccactggtcctctgttagctggtaggagaagtagcagacatggctcaagtgagatgggggactgcatattcagctcaatgagacattttcttcagttggcgaatcaattactaggagaatttgttagatattaagattaatagtaacatgtattaattcaattttatataatcgttgtgcaccaacattttatttgaaagggagaaataaatcctagcaaaattgactatgggagaagggatataggaacaaaaatggaatatgggagagggaacaaactcatcggcctatgcgccttgattagaatgtctcctaaaagttttaggtattgaaaatatgataggacatttattgtaatatgtttattttctgaaatactaattttgatgtatagaatattgacaaaatcttcatgtcagtttcccttcccaagtaagaatagagcaatgcacttgttctgcccgtaaggtggttgtgtgataagtcaatttactccagtgcttgaagcttgc

SEQ ID NO: 200780 - DNA, 2393 bp, Zea Mays
cagacgcacggttctgccatcgcgcgattcccctcttccatcccgattcctccgcccgtgactccccgcgcccgcagcccccgccgccgtcctcgcgacctgcctaggacagctgtcacgcccgcaaatcacgtgaccatgcccttccatgtcctcgcgtcctccactccgcccgcgattcccctccccgcacccgcagcccccgccgtcgtcctcgcggccagccgaggacagccaccgcgcccgcaaatcacacgaccatgcccttccatgcccgcaaatcacgtcaccccttccatccatggcagtcgcgctccctctgcgcccttccatccatggtcgcggatccctacgcgccgcgattcttcccatacgctccctctgcgcccttccatccatggccgcggatccccgatgttgagatctgggagctgaagctggagatctcgcggatgcgggtgcggctgacggcggacgacggacggcgcaagaattgcggcggccggagctcccagtgctccgacggcaaggcccgcaggcggtagaaggcatccttcgcctatgactgatgcttcgctgctggcgtcgacagtggaggcgcgacaggcggtgatcgtggatggatgcggtctcagcgtctggaggatcggtcggagctaagcagggacggtggctgctgacagctgagtgatacgtgtatttctaggaagatcaagcccagagctgtcgcagagccagaagtgcatctacttccacggcaccgtcagcaaggacctcctcacacacaagttggtcatccagctctctaggaagatcaaggacgacatatgaagactggagtactttgaagtttgatgaacaacaaggacatcctcacgcacaagtttgatgaacagtcaacaaaattcttgagccagttcactccaacccaatgggacaaggatcagtggcatcctttcatggggccactgcggtccatccaagtgttgttcatttgtgttgtcttcatgatcgtggagatcaacacattcttccttaagcttgtgtcctgttgccgagttcctcaaaaggacaaagtcgttactgtggttcagtctctacttgaatgatattagtgacaagaggtcctcaaaatctacaccaagttatgtcagggactatatctccactcaactcattttaaccttgtacatttcaatcaaatccaaatacatgtgaaataaatgtagtaggttactctgaccagtgttgcgctcgcgcgccagcatgctcggactaaccaacgaaaaaggtgaagtgggatggtataccatttgcaattgacatttatggtttttgctacgctggcactcagtgtttccaaatatctattagtcaatgtgcgatcgtaccaaattcaacagggctctctacatatggtatgtataactatctcaatttgaactgcattctggtgggagtcgctcttattgtttagtaatcatttttctcaatgttatgtctaaccgtgttattcaattttgcaatatgcacggcaatttatggtgctatatctattataggctacctcatgtttggagacaagatgctctcataaataactttcaatcttctgaaagattcatttgcagcaaaagttgcacgatggaccacgataactattattgtcggtttctctgattcaattaagtgggaacccttggtagtgattcaattaagtgagaagtgagaaccctcattgtgctatttttttgtttcagggttgttatctatctttgtagccgaagaaacaatcctgagaaagaatggaaagctccttggctaggaataatgtttctaagtggaatcacctgggttatgcgagaagcacatcaatggattccactggtcctctgttagctggtaggagaagtagcagacatggctcaagtgagatgggggactgcatattcagctcaatgagacattttcttcagttggcgaatcaattactaggagaatttgttagatattaagattaatagtaacatgtattaattcaattttatataatcgttgtgcaccaacattttatttgaaagggagaaataaatcctagcaaaattgactatgggagaagggatataggaacaaaaatggaatatgggagagggaacaaactcatcggcctatgcgccttgattagaatgtctcctaaaagttttaggtattgaaaatatgataggacatttattgtaatatgtttattttctgaaatactaattttgatgtatagaatattgacaaaatcttcatgtcagtttcccttcccaagtaagaatagagcaatgcacttgttctgcccgtaaggtggttgtgtgataagtcaatttactccagtgcttgaagcttgc

SEQ ID NO: 200781 - DNA, 2247 bp, Zea Mays
cgcgattcccctcttccatcccgattcctccgcccgtgactccccgcgcccgcagcccccgccgccgtcctcgcgacctgcctaggacagctgtcacgcccgcaaatcacgtgaccatgcccttccatgtcctcgcgtcctccactccgcccgcgattcccctccccgcacccgcagcccccgccgtcgtcctcgcggccagccgaggacagccaccgcgcccgcaaatcacacgaccatgcccttccatgcccgcaaatcacgtcaccccttccatccatggcagtcgcgctccctctgcgcccttccatccatggtcgcggatccctacgcgccgcgattcttcccatacgctccctctgcgcccttccatccatggccgcggatccccgatgttgagatctgggagctgaagctggagatctcgcggatgcgggtgcggctgacggcggacgacggacggcgcaagaattgcggcggccggagctcccagtgctccgacggcaaggcccgcaggcggtagaaggcatccttcgcctatgactgatgcttcgctgctggcgtcgacagtggaggcgcgacaggcggtgatcgtggatggatgcggtctcagcgtctggaggatcggtcggagctaagcagggacggtggctgctgacagctgagtgatacgtgtatttctaggaagatcaagcccagagctgtcgcagagccagaagtgcatctacttccacggcaccgtcagcaaggacctcctcacacacaagttggtcatccagctctctaggaagatcaaggacgacatatgaagactggagtactttgaagtttgatgaacaacaaggacatcctcacgcacaagtttgatgaacagtcaacaaaattcttgagccagttcactccaacccaatgggacaaggatcagtggcatcctttcatggggccactgcggtccatccaagtgttgttcatttgtgttgtcttcatgatcgtggagatcaacacattcttccttaagcttgtgtcctgttgccgagttcctcaaaaggacaaagtcgttactgtggttcagtctctacttgaatgatattagtgacaagtgttgcgctcgcgcgccagcatgctcggactaaccaacgaaaaaggtgaagtgggatggtataccatttgcaattgacatttatggtttttgctacgctggcactcagtgtttccaaatatctattagtcaatgtgcgatcgtaccaaattcaacagggctctctacatatggtatgtataactatctcaatttgaactgcattctggtgggagtcgctcttattgtttagtaatcatttttctcaatgttatgtctaaccgtgttattcaattttgcaatatgcacggcaatttatggtgctatatctattataggctacctcatgtttggagacaagatgctctcataaataactttcaatcttctgaaagattcatttgcagcaaaagttgcacgatggaccacgataactattattgtcggtttctctgattcaattaagtgggaacccttggtagtgattcaattaagtgagaagtgagaaccctcattgtgctatttttttgtttcagggttgttatctatctttgtagccgaagaaacaatcctgagaaagaatggaaagctccttggctaggaataatgtttctaagtggaatcacctgggttatgcgagaagcacatcaatggattccactggtcctctgttagctggtaggagaagtagcagacatggctcaagtgagatgggggactgcatattcagctcaatgagacattttcttcagttggcgaatcaattactaggagaatttgttagatattaagattaatagtaacatgtattaattcaattttatataatcgttgtgcaccaacattttatttgaaagggagaaataaatcctagcaaaattgactatgggagaagggatataggaacaaaaatggaatatgggagagggaacaaactcatcggcctatgcgccttgattagaatgtctcctaaaagttttaggtattgaaaatatgataggacatttattgtaatatgtttattttctgaaatactaattttgatgtatagaatattgacaaaatcttcatgtcagtttcccttcccaagtaagaatagagcaatgcacttgttctgcccgtaaggtggttgtgtgataagtcaatttactccagtgcttgaagcttgc

SEQ ID NO: 200782 - DNA, 2341 bp, Zea Mays
cgcgattcccctcttccatcccgattcctccgcccgtgactccccgcgcccgcagcccccgccgccgtcctcgcgacctgcctaggacagctgtcacgcccgcaaatcacgtgaccatgcccttccatgtcctcgcgtcctccactccgcccgcgattcccctccccgcacccgcagcccccgccgtcgtcctcgcggccagccgaggacagccaccgcgcccgcaaatcacacgaccatgcccttccatgcccgcaaatcacgtcaccccttccatccatggcagtcgcgctccctctgcgcccttccatccatggtcgcggatccctacgcgccgcgattcttcccatacgctccctctgcgcccttccatccatggccgcggatccccgatgttgagatctgggagctgaagctggagatctcgcggatgcgggtgcggctgacggcggacgacggacggcgcaagaattgcggcggccggagctcccagtgctccgacggcaaggcccgcaggcggtagaaggcatccttcgcctatgactgatgcttcgctgctggcgtcgacagtggaggcgcgacaggcggtgatcgtggatggatgcggtctcagcgtctggaggatcggtcggagctaagcagggacggtggctgctgacagctgagtgatacgtgtatttctaggaagatcaagcccagagctgtcgcagagccagaagtgcatctacttccacggcaccgtcagcaaggacctcctcacacacaagttggtcatccagctctctaggaagatcaaggacgacatatgaagactggagtactttgaagtttgatgaacaacaaggacatcctcacgcacaagtttgatgaacagtcaacaaaattcttgagccagttcactccaacccaatgggacaaggatcagtggcatcctttcatggggccactgcggtccatccaagtgttgttcatttgtgttgtcttcatgatcgtggagatcaacacattcttccttaagcttgtgtcctgttgccgagttcctcaaaaggacaaagtcgttactgtggttcagtctctacttgaatgatattagtgacaaggctacctcatgtttggagacaagatgctctcataaataactttcaatcttctgaaagattcatttgcagcaaaagttgcacgatggaccacgataactattattgtcggtttctctgattcaattaagtgggaacccttggtagtgattcaattaagtgagaagtgagaaccctcattgtgctatttttttgtttcaggtgatcattcctttcacaaaatattctttagtgataaaaccattagcttagagtatggaagggttgtgtccagcaaggtttatgacggatagtcttcgctgttatgctgcgtactcgatgtgttgcctttctcctaccattctttggtacataactaacacattatgcttaaacatggagtcattatcttataaattctttttctatcactaatcattgttttggttcctatttggcataaattgtctaaatacttataaatgtgttgtcctatattttttgttctggacattgtttggttcccctgcttccagaatttatatgacttgtgaattttaaatgaaagaaaagaaaggaaaattatgaatcatggattattgattcatgccataacattgacttttgtgcagggttgttatctatctttgtagccgaagaaacaatcctgagaaagaatggaaagctccttggctaggaataatgtttctaagtggaatcacctgggttatgcgagaagcacatcaatggattccactggtcctctgttagctggtaggagaagtagcagacatggctcaagtgagatgggggactgcatattcagctcaatgagacattttcttcagttggcgaatcaattactaggagaatttgttagatattaagattaatagtaacatgtattaattcaattttatataatcgttgtgcaccaacattttatttgaaagggagaaataaatcctagcaaaattgactatgggagaagggatataggaacaaaaatggaatatgggagagggaacaaactcatcggcctatgcgccttgattagaatgtctcctaaaagttttaggtattgaaaatatgataggacatttattgtaatatgtttattttctgaaatactaattttgatgtatagaatattgacaaaatcttcatgtcagtttcccttcccaagtaagaatagagcaatgcacttgttctgcccgtaaggtggttgtgtgataagtcaatttactccagtgcttgaagcttgc

SEQ ID NO: 200783 - DNA, 2249 bp, Zea Mays
cgcgattcccctcttccatcccgattcctccgcccgtgactccccgcgcccgcagcccccgccgccgtcctcgcgacctgcctaggacagctgtcacgcccgcaaatcacgtgaccatgcccttccatgtcctcgcgtcctccactccgcccgcgattcccctccccgcacccgcagcccccgccgtcgtcctcgcggccagccgaggacagccaccgcgcccgcaaatcacacgaccatgcccttccatgcccgcaaatcacgtcaccccttccatccatggcagtcgcgctccctctgcgcccttccatccatggtcgcggatccctacgcgccgcgattcttcccatacgctccctctgcgcccttccatccatggccgcggatccccgatgttgagatctgggagctgaagctggagatctcgcggatgcgggtgcggctgacggcggacgacggacggcgcaagaattgcggcggccggagctcccagtgctccgacggcaaggcccgcaggcggtagaaggcatccttcgcctatgactgatgcttcgctgctggcgtcgacagtggaggcgcgacaggcggtgatcgtggatggatgcggtctcagcgtctggaggatcggtcggagctaagcagggacggtggctgctgacagctgagtgatacgtgtatttctaggaagatcaagcccagagctgtcgcagagccagaagtgcatctacttccacggcaccgtcagcaaggacctcctcacacacaagttggtcatccagctctctaggaagatcaaggacgacatatgaagactggagtactttgaagtttgatgaacaacaaggacatcctcacgcacaagtttgatgaacagtcaacaaaattcttgagccagttcactccaacccaatgggacaaggatcagtggcatcctttcatggggccactgcggtccatccaagtgttgttcatttgtgttgtcttcatgatcgtggagatcaacacattcttccttaagcttgtgtcctgttgccgagttcctcaaaaggacaaagtcgttactgtggttcagtctctacttgaatgatattagtgacaagtgttgcgctcgcgcgccagcatgctcggactaaccaacgaaaaaggtgaagtgggatggtataccatttgcaattgacatttatggtttttgctacgctggcactcagtgtttccaaatatctattagtcaatgtgcgatcgtaccaaattcaacagggctctctacatatggctacctcatgtttggagacaagatgctctcataaataactttcaatcttctgaaagattcatttgcagcaaaagttgcacgatggaccacgataactattattgtcggtttctctgattcaattaagtgggaacccttggtagtgattcaattaagtgagaagtgagaaccctcattgtgctatttttttgtttcaggtgatcattcctttcacaaaatattctttagtgataaaaccattagcttagagtatggaagggttgtgtccagcaaggtttatgacggatagtcttcgctgttatgctgcgtactcgatgtgttgcctttctcctaccattctttgggttgttatctatctttgtagccgaagaaacaatcctgagaaagaatggaaagctccttggctaggaataatgtttctaagtggaatcacctgggttatgcgagaagcacatcaatggattccactggtcctctgttagctggtaggagaagtagcagacatggctcaagtgagatgggggactgcatattcagctcaatgagacattttcttcagttggcgaatcaattactaggagaatttgttagatattaagattaatagtaacatgtattaattcaattttatataatcgttgtgcaccaacattttatttgaaagggagaaataaatcctagcaaaattgactatgggagaagggatataggaacaaaaatggaatatgggagagggaacaaactcatcggcctatgcgccttgattagaatgtctcctaaaagttttaggtattgaaaatatgataggacatttattgtaatatgtttattttctgaaatactaattttgatgtatagaatattgacaaaatcttcatgtcagtttcccttcccaagtaagaatagagcaatgcacttgttctgcccgtaaggtggttgtgtgataagtcaatttactccagtgcttgaagcttgc

SEQ ID NO: 200784 - DNA, 1882 bp, Zea Mays
ctgcatccacacacacttgagccccacccgtgccgccgccccgcatcccttagcgctgccgctgccgctgccgctgccgccgcccatgtccgccgccccgccccgccgcgtggtcatctgcggcggcggcgtggtgggcgcgtgcacggcctacttcctcgccacccacgccgcgtcccccaccgtcccgacgctcgtcgagaggtgcgccccggcgtgcgccgcctcggggaaagccggcggcttcctggcgctggactggtgcgactccaccccggcgctctccaggctcgcgcgggcctccttcgcgctgcaccgccgcctggccgacgccctcggcggcgccgacgcctacggcttccgccccgtccacaccctctccgtcctgctccccccgcaccccgccgcctcctcctcgccgccgcacccgctgctcccgccctgggtcgacccctccgcgtccgccgccccgccgagggagcccgggacccccgacaccaccgcgcaggtccacccgggcctcttcaccaaggccgtcctcgccgcgtcgggagccgaggtcgtcatcggcgaggtggagcgcgtcgccgtggcctgggacggccgcgtcgccggcgtcgtggtcaaggggcgcgacggcgtgctggacgccgacgccgtcgtgctcgcgctcggcccgtggtccggccgcctcgaggtggtcagcgaggtgttcgacgtgtccgggctcaaggcgcacagcatcgtgctccggccgcgcgagcccgagaaggtcacgccgcactgcctcttcctcagctaccagccggagcccggcgccaagatgctcgaccccgaggtgtacccgcggcccaccggggaggtgtacatatgtgggatgagcaaggacgagaacccgccagatgacccagcaacgataacaggcgagccagactcgattgcaatgctgcataagatcgcagggaaagtgtccagccagctgaagaaggaggagggcgctgaggtggtcgcggagcaggcgtgctacctgccgtgcaccgccgacgggctgccggtcatcggggagataccaggcgtgaaggggtgctatgtggccacgggccacagctgctggggtatcctcaatggtccggccaccggcgcagccctcgccgagctcatccttgacggcaaggccaagatcgttgatctcgaacctttcagcccggcaaggtttctcaagagaaggagcaggcgtggagtctgacagtgtgaatgttcagattcaagctcgctactgaataaaacactcttgacggacaacttgccaacacccatgatcagattcagatgttcatttagctgaggttgagctcgacaagctgttgcatctgcagctattctacgtacaccatgtctacgcaatgtttccttgtggtcaagtgacacaagtaaccttataaaaaagagtgaggaagttgaggaggaaggagagtgcgggttctgcctcttcatgaaggccggcggctgcagagacaccttcgtggcgtgggaggagtgcgtggaggcggcgcagaaggagggcgccgacatggtcgagcgttgccacgaggccaccgccaacctcaagaagtgcatggacgcgcacgccgactactacgcgcccgtgctcatggccgaggaggccgtcaacgagcgcgccgaggccgaggccgctgcagctgcagctgcagctgctgctgagactgcgaaggccaagggatgggagccagcgaccgaaggagagattaaggaagaggccgtgccccagccggccgccggcgaggagaagaaagaagaaacaattgctcagaaggagaagaaagaagaagcggtttctgagaaggttcatattagttcgtga

SEQ ID NO: 200785 - DNA, 2109 bp, Zea Mays
ctccttcaagcttagcggtaagatcgtacgtctggaaatagcccatacaatctgaagcccgtacaaaatagcccagcaagagaaataaaggccgaaacggcccatttgtctaggtgtctcgtctctaggccctggccgctaattgagcacacgttcgtcttcctccttccgtcccccggcgtccttatccccacacaagcgccgcttaccgccgggacaggactgttggaagtccccagacggcagcgatggcggaactatcgacatcttcggatggattggtggacgaagaagcgaggcagcaggaaccaggttcaatttggcaagggatgctcctgtagtcctgttctctttggcttttatatgctaattgcttgtgctgctaaccgttagggtttcatcgccttgcctgttcgaagggttaggggttcctactgtccaaattcacctgatccaacctcgtccgttcataccgtttcctgatacgtactacaccacatcccggagatgtgttcactttcaattttgaaggcctgtactgtactgtaccctagttactaaaccttgggtttccctcgtctctcgcttcatttaggatacgtacgacgcttaagtcattcagatcggctaacctatccggtggaatgagtactgtctgcgaatctacatcatgcctttgtgaattttccttcaactttagtagtattattaaattatacccgttttgagcccatacgcttaaaagaggggaaacagtaatattatagctttaacgaacacacgattggagtgtcaagcatggatcatatttcctctgttcctgtttatatagtaccatccgtgatgccgttatagtatttatggaagtcaaactttttttgctggactgcatacaggacaaggaagcgctgaaggtagccatggtctgcaagacacaaaggagcaggacataaaaaagggaaaggcggctcttgtttccactgaactgctgagggaggatctggttcagagtgctgttagttttctgaaacacccgaaagtagtagcctcttcagatggacagaggcgatctttccttgtaaataaaggactcaccatggatgaaatagatgaagcatttcgacgtctacaaagcccgtcatcgaattctgcgagctcaaatatgtgcacatctcaaggattactgaggtcagcacaaactacaaataatagtattggccaggcatgactggtatctatgctgcaaattttaagctactgccattttcttcaatgcagcaggaaattaaagtcgatagaaagtgtatgaatggtttagtcattttggctttttaggtatgtagattttgctgtgcacctaactctaagcctagacacatagtaaaaacaatatatctagaaaagccaaaatgacttacaatttgaaaaaggagggagtactttcatttatagagagggtggaacctgaagctggacctgtggcccctgtggtacctcgtcatccaaaatcatatatggagatcatggaaatgatacaaaggggtgagcggccagacgatatacaggatattaacgatgaccctccaaatcctgatcaaccaatctcagaacctcgtatggcaccgaaaccaaagccatgggaaaagcaaggtcaagggagtttggcctgtgatttgaaatcgctgccaagggaatccgacgtgctgaggtcagaagttcagcacgacgacggcaccaaccaggttacggagtccgccgatggcgccaaccaagcggactcattgctgcaggcaggcgtagctgctggatctgaatctcctggggttccagatgacgccgcttcttcgcttgagtaaccaccgcgaaaataaatgaatgacgccgtaatcagacgcgaaaacaaacgacctcattaccacaacactgttctgatatttttgggtcctgagagagccacttgagttcacaataaatgtagtacccatcactggatgatcttttttagttgctggaaccatatgatatgagcattgttggcacttgctctcagcagcaaggaagccaacaagggtgaacggtggtgacaacagggttacgcgcacgggggca

SEQ ID NO: 200786 - DNA, 1213 bp, Zea Mays
gtctaggtgtctcgtctctaggccctggccgctaattgagcacacgttcgtcttcctccttccgtcccccggcgtccttatccccacacaagcgccgcttaccgccgggacaggactgttggaagtccccagacggcagcgatggcggaactatcgacatcttcggatggattggtggacgaagaagcgaggcagcaggaaccaggacaaggaagcgctgaaggtagccatggtctgcaagacacaaaggagcaggacataaaaaagggaaaggcggctcttgtttccactgaactgctgagggaggatctggttcagagtgctgttagttttctgaaacacccgaaagtagtagcctcttcagatggacagaggcgatctttccttgtaaataaaggactcaccatggatgaaatagatgaagcatttcgacgtctacaaagcccgtcatcgaattctgcgagctcaaatatgtgcacatctcaaggggtgtttgatcattcatgcaggattactgaggaaattaaagtcgatagaaagtgtatgaatggtttagagagggtggaacctgaagctggacctgtggcccctgtggtacctcgtcatccaaaatcatatatggagatcatggaaatgatacaaaggggtgagcggccagacgatatacaggatattaacgatgaccctccaaatcctgatcaaccaatctcagaacctcgtatggcaccgaaaccaaagccatgggaaaagcaaggtcaagggagtttggcctgtgatttgaaatcgctgccaagggaatccgacgtgctgaggtcagaagttcagcacgacgacggcaccaaccaggttacggagtccgccgatggcgccaaccaagcggactcattgctgcaggcaggcgtagctgctggatctgaatctcctggggttccagatgacgccgcttcttcgcttgagtaaccaccgcgaaaataaatgaatgacgccgtaatcagacgcgaaaacaaacgacctcattaccacaacactgttctgatatttttgggtcctgagagagccacttgagttcacaataaatgtagtacccatcactggatgatcttttttagttgctggaaccatatgatatgagcattgttggcacttgctctcagcagcaaggaagccaacaagggtgaacggtggtgacaacagggttacgcgcacgggggca

SEQ ID NO: 200787 - DNA, 1866 bp, Zea Mays
ctaggtgtctcgtctctaggccctggccgctaattgagcacacgttcgtcttcctccttccgtcccccggcgtccttatccccacacaagcgccgcttaccgccgggacaggactgttggaagtccccagacggcagcgatggcggaactatcgacatcttcggatggattggtggacgaagaagcgaggcagcaggaaccaggttcaatttggcaagggatgctcctgtagtcctgttctctttggcttttatatgctaattgcttgtgctgctaaccgttagggtttcatcgccttgcctgttcgaagggttaggggttcctactgtccaaattcacctgatccaacctcgtccgttcataccgtttcctgatacgtactacaccacatcccggagatgtgttcactttcaattttgaaggcctgtactgtactgtaccctagttactaaaccttgggtttccctcgtctctcgcttcatttaggatacgtacgacgcttaagtcattcagatcggctaacctatccggtggaatgagtactgtctgcgaatctacatcatgcctttgtgaattttccttcaactttagtagtattattaaattatacccgttttgagcccatacgcttaaaagaggggaaacagtaatattatagctttaacgaacacacgattggagtgtcaagcatggatcatatttcctctgttcctgtttatatagtaccatccgtgatgccgttatagtatttatggaagtcaaactttttttgctggactgcatacaggacaaggaagcgctgaaggtagccatggtctgcaagacacaaaggagcaggacataaaaaagggaaaggcggctcttgtttccactgaactgctgagggaggatctggttcagagtgctgttagttttctgaaacacccgaaagtagtagcctcttcagatggacagaggcgatctttccttgtaaataaaggactcaccatggatgaaatagatgaagcatttcgacgtctacaaagcccgtcatcgaattctgcgagctcaaatatgtgcacatctcaaggattactgaggtcagcacaaactacaaataatagtattggccaggcatgactggtatctatgctgcaaattttaagctactgccattttcttcaatgcagcaggaaattaaagtcgatagaaagtgtatgaatggtttagagagggtggaacctgaagctggacctgtggcccctgtggtacctcgtcatccaaaatcatatatggagatcatggaaatgatacaaaggggtgagcggccagacgatatacaggatattaacgatgaccctccaaatcctgatcaaccaatctcagaacctcgtatggcaccgaaaccaaagccatgggaaaagcaaggtcaagggagtttggcctgtgatttgaaatcgctgccaagggaatccgacgtgctgaggtcagaagttcagcacgacgacggcaccaaccaggttacggagtccgccgatggcgccaaccaagcggactcattgctgcaggcaggcgtagctgctggatctgaatctcctggggttccagatgacgccgcttcttcgcttgagtaaccaccgcgaaaataaatgaatgacgccgtaatcagacgcgaaaacaaacgacctcattaccacaacactgttctgatatttttgggtcctgagagagccacttgagttcacaataaatgtagtacccatcactggatgatcttttttagttgctggaaccatatgatatgagcattgttggcacttgctctcagcagcaaggaagccaacaagggtgaacggtggtgacaacagggttacgcgcacgggggca

SEQ ID NO: 200788 - DNA, 1320 bp, Zea Mays
ggtgtctcgtctctaggccctggccgctaattgagcacacgttcgtcttcctccttccgtcccccggcgtccttatccccacacaagcgccgcttaccgccgggacaggactgttggaagtccccagacggcagcgatggcggaactatcgacatcttcggatggattggtggacgaagaagcgaggcagcaggaaccaggacaaggaagcgctgaaggtagccatggtctgcaagacacaaaggagcaggacataaaaaagggaaaggcggctcttgtttccactgaactgctgagggaggatctggttcagagtgctgttagttttctgaaacacccgaaagtagtagcctcttcagatggacagaggcgatctttccttgtaaataaaggactcaccatggatgaaatagatgaagcatttcgacgtctacaaagcccgtcatcgaattctgcgagctcaaatatgtgcacatctcaaggattactgaggaaattaaagtcgatagaaagtgtatgaatggtttagtcattttggctttttaggtatgtagattttgctgtgcacctaactctaagcctagacacatagtaaaaacaatatatctagaaaagccaaaatgacttacaatttgaaaaaggagggagtactttcatttatagagagggtggaacctgaagctggacctgtggcccctgtggtacctcgtcatccaaaatcatatatggagatcatggaaatgatacaaaggggtgagcggccagacgatatacaggatattaacgatgaccctccaaatcctgatcaaccaatctcagaacctcgtatggcaccgaaaccaaagccatgggaaaagcaaggtcaagggagtttggcctgtgatttgaaatcgctgccaagggaatccgacgtgctgaggtcagaagttcagcacgacgacggcaccaaccaggttacggagtccgccgatggcgccaaccaagcggactcattgctgcaggcaggcgtagctgctggatctgaatctcctggggttccagatgacgccgcttcttcgcttgagtaaccaccgcgaaaataaatgaatgacgccgtaatcagacgcgaaaacaaacgacctcattaccacaacactgttctgatatttttgggtcctgagagagccacttgagttcacaataaatgtagtacccatcactggatgatcttttttagttgctggaaccatatgatatgagcattgttggcacttgctctcagcagcaaggaagccaacaagggtgaacggtggtgacaacagggttacgcgcacgggggca

SEQ ID NO: 200789 - DNA, 1274 bp, Zea Mays
ctcgtctctaggccctggccgctaattgagcacacgttcgtcttcctccttccgtcccccggcgtccttatccccacacaagcgccgcttaccgccgggacaggactgttggaagtccccagacggcagcgatggcggaactatcgacatcttcggatggattggtggacgaagaagcgaggcagcaggaaccaggacaaggaagcgctgaaggtagccatggtctgcaagacacaaaggagcaggacataaaaaagggaaaggcggctcttgtttccactgaactgctgagggaggatctggttcagagtgctgttagttttctgaaacacccgaaagtagtagcctcttcagatggacagaggcgatctttccttgtaaataaaggactcaccatggatgaaatagatgaagcatttcgacgtctacaaagcccgtcatcgaattctgcgagctcaaatatgtgcacatctcaaggattactgaggtcagcacaaactacaaataatagtattggccaggcatgactggtatctatgctgcaaattttaagctactgccattttcttcaatgcagcaggaaattaaagtcgatagaaagtgtatgaatggtttagagagggtggaacctgaagctggacctgtggcccctgtggtacctcgtcatccaaaatcatatatggagatcatggaaatgatacaaaggggtgagcggccagacgatatacaggatattaacgatgaccctccaaatcctgatcaaccaatctcagaacctcgtatggcaccgaaaccaaagccatgggaaaagcaaggtcaagggagtttggcctgtgatttgaaatcgctgccaagggaatccgacgtgctgaggtcagaagttcagcacgacgacggcaccaaccaggttacggagtccgccgatggcgccaaccaagcggactcattgctgcaggcaggcgtagctgctggatctgaatctcctggggttccagatgacgccgcttcttcgcttgagtaaccaccgcgaaaataaatgaatgacgccgtaatcagacgcgaaaacaaacgacctcattaccacaacactgttctgatatttttgggtcctgagagagccacttgagttcacaataaatgtagtacccatcactggatgatcttttttagttgctggaaccatatgatatgagcattgttggcacttgctctcagcagcaaggaagccaacaagggtgaacggtggtgacaacagggttacgcgcacgggggca

SEQ ID NO: 200790 - DNA, 1706 bp, Zea Mays
ctcgtctctaggccctggccgctaattgagcacacgttcgtcttcctccttccgtcccccggcgtccttatccccacacaagcgccgcttaccgccgggacaggactgttggaagtccccagacggcagcgatggcggaactatcgacatcttcggatggattggtggacgaagaagcgaggcagcaggaaccagggtttcatcgccttgcctgttcgaagggttaggggttcctactgtccaaattcacctgatccaacctcgtccgttcataccgtttcctgatacgtactacaccacatcccggagatgtgttcactttcaattttgaaggcctgtactgtactgtaccctagttactaaaccttgggtttccctcgtctctcgcttcatttaggatacgtacgacgcttaagtcattcagatcggctaacctatccggtggaatgagtactgtctgcgaatctacatcatgcctttgtgaattttccttcaactttagtagtattattaaattatacccgttttgagcccatacgcttaaaagaggggaaacagtaatattatagctttaacgaacacacgattggagtgtcaagcatggatcatatttcctctgttcctgtttatatagtaccatccgtgatgccgttatagtatttatggaagtcaaactttttttgctggactgcatacaggacaaggaagcgctgaaggtagccatggtctgcaagacacaaaggagcaggacataaaaaagggaaaggcggctcttgtttccactgaactgctgagggaggatctggttcagagtgctgttagttttctgaaacacccgaaagtagtagcctcttcagatggacagaggcgatctttccttgtaaataaaggactcaccatggatgaaatagatgaagcatttcgacgtctacaaagcccgtcatcgaattctgcgagctcaaatatgtgcacatctcaaggggtgtttgatcattcatgcaggattactgaggaaattaaagtcgatagaaagtgtatgaatggtttagagagggtggaacctgaagctggacctgtggcccctgtggtacctcgtcatccaaaatcatatatggagatcatggaaatgatacaaaggggtgagcggccagacgatatacaggatattaacgatgaccctccaaatcctgatcaaccaatctcagaacctcgtatggcaccgaaaccaaagccatgggaaaagcaaggtcaagggagtttggcctgtgatttgaaatcgctgccaagggaatccgacgtgctgaggtcagaagttcagcacgacgacggcaccaaccaggttacggagtccgccgatggcgccaaccaagcggactcattgctgcaggcaggcgtagctgctggatctgaatctcctggggttccagatgacgccgcttcttcgcttgagtaaccaccgcgaaaataaatgaatgacgccgtaatcagacgcgaaaacaaacgacctcattaccacaacactgttctgatatttttgggtcctgagagagccacttgagttcacaataaatgtagtacccatcactggatgatcttttttagttgctggaaccatatgatatgagcattgttggcacttgctctcagcagcaaggaagccaacaagggtgaacggtggtgacaacagggttacgcgcacgggggca

SEQ ID NO: 200791 - DNA, 1852 bp, Zea Mays
ctcgtctctaggccctggccgctaattgagcacacgttcgtcttcctccttccgtcccccggcgtccttatccccacacaagcgccgcttaccgccgggacaggactgttggaagtccccagacggcagcgatggcggaactatcgacatcttcggatggattggtggacgaagaagcgaggcagcaggaaccaggttcaatttggcaagggatgctcctgtagtcctgttctctttggcttttatatgctaattgcttgtgctgctaaccgttagggtttcatcgccttgcctgttcgaagggttaggggttcctactgtccaaattcacctgatccaacctcgtccgttcataccgtttcctgatacgtactacaccacatcccggagatgtgttcactttcaattttgaaggcctgtactgtactgtaccctagttactaaaccttgggtttccctcgtctctcgcttcatttaggatacgtacgacgcttaagtcattcagatcggctaacctatccggtggaatgagtactgtctgcgaatctacatcatgcctttgtgaattttccttcaactttagtagtattattaaattatacccgttttgagcccatacgcttaaaagaggggaaacagtaatattatagctttaacgaacacacgattggagtgtcaagcatggatcatatttcctctgttcctgtttatatagtaccatccgtgatgccgttatagtatttatggaagtcaaactttttttgctggactgcatacaggacaaggaagcgctgaaggtagccatggtctgcaagacacaaaggagcaggacataaaaaagggaaaggcggctcttgtttccactgaactgctgagggaggatctggttcagagtgctgttagttttctgaaacacccgaaagtagtagcctcttcagatggacagaggcgatctttccttgtaaataaaggactcaccatggatgaaatagatgaagcatttcgacgtctacaaagcccgtcatcgaattctgcgagctcaaatatgtgcacatctcaagtcattttggctttttaggtatgtagattttgctgtgcacctaactctaagcctagacacatagtaaaaacaatatatctagaaaagccaaaatgacttacaatttgaaaaaggagggagtactttcatttatagagagggtggaacctgaagctggacctgtggcccctgtggtacctcgtcatccaaaatcatatatggagatcatggaaatgatacaaaggggtgagcggccagacgatatacaggatattaacgatgaccctccaaatcctgatcaaccaatctcagaacctcgtatggcaccgaaaccaaagccatgggaaaagcaaggtcaagggagtttggcctgtgatttgaaatcgctgccaagggaatccgacgtgctgaggtcagaagttcagcacgacgacggcaccaaccaggttacggagtccgccgatggcgccaaccaagcggactcattgctgcaggcaggcgtagctgctggatctgaatctcctggggttccagatgacgccgcttcttcgcttgagtaaccaccgcgaaaataaatgaatgacgccgtaatcagacgcgaaaacaaacgacctcattaccacaacactgttctgatatttttgggtcctgagagagccacttgagttcacaataaatgtagtacccatcactggatgatcttttttagttgctggaaccatatgatatgagcattgttggcacttgctctcagcagcaaggaagccaacaagggtgaacggtggtgacaacagggttacgcgcacgggggca

SEQ ID NO: 200792 - DNA, 1337 bp, Zea Mays
ctcgtctctaggccctggccgctaattgagcacacgttcgtcttcctccttccgtcccccggcgtccttatccccacacaagcgccgcttaccgccgggacaggactgttggaagtccccagacggcagcgatggcggaactatcgacatcttcggatggattggtggacgaagaagcgaggcagcaggaaccaggacaaggaagcgctgaaggtagccatggtctgcaagacacaaaggagcaggacataaaaaagggaaaggcggctcttgtttccactgaactgctgagggaggatctggttcagagtgctgttagttttctgaaacacccgaaagtagtagcctcttcagatggacagaggcgatctttccttgtaaataaaggactcaccatggatgaaatagatgaagcatttcgacgtctacaaagcccgtcatcgaattctgcgagctcaaatatgtgcacatctcaaggggtgtttgatcattcatgcaggattactgaggaaattaaagtcgatagaaagtgtatgaatggtttagtcattttggctttttaggtatgtagattttgctgtgcacctaactctaagcctagacacatagtaaaaacaatatatctagaaaagccaaaatgacttacaatttgaaaaaggagggagtactttcatttatagagagggtggaacctgaagctggacctgtggcccctgtggtacctcgtcatccaaaatcatatatggagatcatggaaatgatacaaaggggtgagcggccagacgatatacaggatattaacgatgaccctccaaatcctgatcaaccaatctcagaacctcgtatggcaccgaaaccaaagccatgggaaaagcaaggtcaagggagtttggcctgtgatttgaaatcgctgccaagggaatccgacgtgctgaggtcagaagttcagcacgacgacggcaccaaccaggttacggagtccgccgatggcgccaaccaagcggactcattgctgcaggcaggcgtagctgctggatctgaatctcctggggttccagatgacgccgcttcttcgcttgagtaaccaccgcgaaaataaatgaatgacgccgtaatcagacgcgaaaacaaacgacctcattaccacaacactgttctgatatttttgggtcctgagagagccacttgagttcacaataaatgtagtacccatcactggatgatcttttttagttgctggaaccatatgatatgagcattgttggcacttgctctcagcagcaaggaagccaacaagggtgaacggtggtgacaacagggttacgcgcacgggggca

SEQ ID NO: 200793 - DNA, 1999 bp, Zea Mays
ctggccgctaattgagcacacgttcgtcttcctccttccgtcccccggcgtccttatccccacacaagcgccgcttaccgccgggacaggactgttggaagtccccagacggcagcgatggcggaactatcgacatcttcggatggattggtggacgaagaagcgaggcagcaggaaccaggttcaatttggcaagggatgctcctgtagtcctgttctctttggcttttatatgctaattgcttgtgctgctaaccgttagggtttcatcgccttgcctgttcgaagggttaggggttcctactgtccaaattcacctgatccaacctcgtccgttcataccgtttcctgatacgtactacaccacatcccggagatgtgttcactttcaattttgaaggcctgtactgtactgtaccctagttactaaaccttgggtttccctcgtctctcgcttcatttaggatacgtacgacgcttaagtcattcagatcggctaacctatccggtggaatgagtactgtctgcgaatctacatcatgcctttgtgaattttccttcaactttagtagtattattaaattatacccgttttgagcccatacgcttaaaagaggggaaacagtaatattatagctttaacgaacacacgattggagtgtcaagcatggatcatatttcctctgttcctgtttatatagtaccatccgtgatgccgttatagtatttatggaagtcaaactttttttgctggactgcatacaggacaaggaagcgctgaaggtagccatggtctgcaagacacaaaggagcaggacataaaaaagggaaaggcggctcttgtttccactgaactgctgagggaggatctggttcagagtgctgttagttttctgaaacacccgaaagtagtagcctcttcagatggacagaggcgatctttccttgtaaataaaggactcaccatggatgaaatagatgaagcatttcgacgtctacaaagcccgtcatcgaattctgcgagctcaaatatgtgcacatctcaaggtatggcagagtccatttactaagttagctttttatatgatattttagttctatatgttcgtggatcatataatgatgtttcattgtttatgtgtgttttccgctgtaaatgatggtgattccatatgaaattacccattcagagtttcagacctaaatggcttcatcatgacaaatctaacttagtaacttcattgccttattattgcctgcattttgtcaggggtgtttgatcattcatgcaggattactgagcaggaaattaaagtcgatagaaagtgtatgaatggtttagagagggtggaacctgaagctggacctgtggcccctgtggtacctcgtcatccaaaatcatatatggagatcatggaaatgatacaaaggggtgagcggccagacgatatacaggatattaacgatgaccctccaaatcctgatcaaccaatctcagaacctcgtatggcaccgaaaccaaagccatgggaaaagcaaggtcaagggagtttggcctgtgatttgaaatcgctgccaagggaatccgacgtgctgaggtcagaagttcagcacgacgacggcaccaaccaggttacggagtccgccgatggcgccaaccaagcggactcattgctgcaggcaggcgtagctgctggatctgaatctcctggggttccagatgacgccgcttcttcgcttgagtaaccaccgcgaaaataaatgaatgacgccgtaatcagacgcgaaaacaaacgacctcattaccacaacactgttctgatatttttgggtcctgagagagccacttgagttcacaataaatgtagtacccatcactggatgatcttttttagttgctggaaccatatgatatgagcattgttggcacttgctctcagcagcaaggaagccaacaagggtgaacggtggtgacaacagggttacgcgcacgggggca

SEQ ID NO: 200794 - DNA, 1526 bp, Zea Mays
gccgctaattgagcacacgttcgtcttcctccttccgtcccccggcgtccttatccccacacaagcgccgcttaccgccgggacaggactgttggaagtccccagacggcagcgatggcggaactatcgacatcttcggatggattggtggacgaagaagcgaggcagcaggaaccaggacaaggaagcgctgaaggtagccatggtctgcaagacacaaaggagcaggacataaaaaagggaaaggcggctcttgtttccactgaactgctgagggaggatctggttcagagtgctgttagttttctgaaacacccgaaagtagtagcctcttcagatggacagaggcgatctttccttgtaaataaaggactcaccatggatgaaatagatgaagcatttcgacgtctacaaagcccgtcatcgaattctgcgagctcaaatatgtgcacatctcaaggtatggcagagtccatttactaagttagctttttatatgatattttagttctatatgttcgtggatcatataatgatgtttcattgtttatgtgtgttttccgctgtaaatgatggtgattccatatgaaattacccattcagagtttcagacctaaatggcttcatcatgacaaatctaacttagtaacttcattgccttattattgcctgcattttgtcaggggtgtttgatcattcatgcaggattactgaggtcagcacaaactacaaataatagtattggccaggcatgactggtatctatgctgcaaattttaagctactgccattttcttcaatgcagcaggaaattaaagtcgatagaaagtgtatgaatggtttaggtttgccaatgcttctcatctatgagagggtggaacctgaagctggacctgtggcccctgtggtacctcgtcatccaaaatcatatatggagatcatggaaatgatacaaaggggtgagcggccagacgatatacaggatattaacgatgaccctccaaatcctgatcaaccaatctcagaacctcgtatggcaccgaaaccaaagccatgggaaaagcaaggtcaagggagtttggcctgtgatttgaaatcgctgccaagggaatccgacgtgctgaggtcagaagttcagcacgacgacggcaccaaccaggttacggagtccgccgatggcgccaaccaagcggactcattgctgcaggcaggcgtagctgctggatctgaatctcctggggttccagatgacgccgcttcttcgcttgagtaaccaccgcgaaaataaatgaatgacgccgtaatcagacgcgaaaacaaacgacctcattaccacaacactgttctgatatttttgggtcctgagagagccacttgagttcacaataaatgtagtacccatcactggatgatcttttttagttgctggaaccatatgatatgagcattgttggcacttgctctcagcagcaaggaagccaacaagggtgaacggtggtgacaacagggttacgcgcacgggggca

SEQ ID NO: 200795 - DNA, 1323 bp, Zea Mays
gccgctaattgagcacacgttcgtcttcctccttccgtcccccggcgtccttatccccacacaagcgccgcttaccgccgggacaggactgttggaagtccccagacggcagcgatggcggaactatcgacatcttcggatggattggtggacgaagaagcgaggcagcaggaaccaggacaaggaagcgctgaaggtagccatggtctgcaagacacaaaggagcaggacataaaaaagggaaaggcggctcttgtttccactgaactgctgagggaggatctggttcagagtgctgttagttttctgaaacacccgaaagtagtagcctcttcagatggacagaggcgatctttccttgtaaataaaggactcaccatggatgaaatagatgaagcatttcgacgtctacaaagcccgtcatcgaattctgcgagctcaaatatgtgcacatctcaaggggtgtttgatcattcatgcaggattactgagcaggaaattaaagtcgatagaaagtgtatgaatggtttagtcattttggctttttaggtatgtagattttgctgtgcacctaactctaagcctagacacatagtaaaaacaatatatctagaaaagccaaaatgacttacaatttgaaaaaggagggagtactttcatttatagagagggtggaacctgaagctggacctgtggcccctgtggtacctcgtcatccaaaatcatatatggagatcatggaaatgatacaaaggggtgagcggccagacgatatacaggatattaacgatgaccctccaaatcctgatcaaccaatctcagaacctcgtatggcaccgaaaccaaagccatgggaaaagcaaggtcaagggagtttggcctgtgatttgaaatcgctgccaagggaatccgacgtgctgaggtcagaagttcagcacgacgacggcaccaaccaggttacggagtccgccgatggcgccaaccaagcggactcattgctgcaggcaggcgtagctgctggatctgaatctcctggggttccagatgacgccgcttcttcgcttgagtaaccaccgcgaaaataaatgaatgacgccgtaatcagacgcgaaaacaaacgacctcattaccacaacactgttctgatatttttgggtcctgagagagccacttgagttcacaataaatgtagtacccatcactggatgatcttttttagttgctggaaccatatgatatgagcattgttggcacttgctctcagcagcaaggaagccaacaagggtgaacggtggtgacaacagggttacgcgcacgggggca

SEQ ID NO: 200796 - DNA, 1990 bp, Zea Mays
gccgctaattgagcacacgttcgtcttcctccttccgtcccccggcgtccttatccccacacaagcgccgcttaccgccgggacaggactgttggaagtccccagacggcagcgatggcggaactatcgacatcttcggatggattggtggacgaagaagcgaggcagcaggaaccagggtttcatcgccttgcctgttcgaagggttaggggttcctactgtccaaattcacctgatccaacctcgtccgttcataccgtttcctgatacgtactacaccacatcccggagatgtgttcactttcaattttgaaggcctgtactgtactgtaccctagttactaaaccttgggtttccctcgtctctcgcttcatttaggatacgtacgacgcttaagtcattcagatcggctaacctatccggtggaatgagtactgtctgcgaatctacatcatgcctttgtgaattttccttcaactttagtagtattattaaattatacccgttttgagcccatacgcttaaaagaggggaaacagtaatattatagctttaacgaacacacgattggagtgtcaagcatggatcatatttcctctgttcctgtttatatagtaccatccgtgatgccgttatagtatttatggaagtcaaactttttttgctggactgcatacaggacaaggaagcgctgaaggtagccatggtctgcaagacacaaaggagcaggacataaaaaagggaaaggcggctcttgtttccactgaactgctgagggaggatctggttcagagtgctgttagttttctgaaacacccgaaagtagtagcctcttcagatggacagaggcgatctttccttgtaaataaaggactcaccatggatgaaatagatgaagcatttcgacgtctacaaagcccgtcatcgaattctgcgagctcaaatatgtgcacatctcaaggtatggcagagtccatttactaagttagctttttatatgatattttagttctatatgttcgtggatcatataatgatgtttcattgtttatgtgtgttttccgctgtaaatgatggtgattccatatgaaattacccattcagagtttcagacctaaatggcttcatcatgacaaatctaacttagtaacttcattgccttattattgcctgcattttgtcaggggtgtttgatcattcatgcaggattactgaggtcagcacaaactacaaataatagtattggccaggcatgactggtatctatgctgcaaattttaagctactgccattttcttcaatgcagcaggaaattaaagtcgatagaaagtagagggtggaacctgaagctggacctgtggcccctgtggtacctcgtcatccaaaatcatatatggagatcatggaaatgatacaaaggggtgagcggccagacgatatacaggatattaacgatgaccctccaaatcctgatcaaccaatctcagaacctcgtatggcaccgaaaccaaagccatgggaaaagcaaggtcaagggagtttggcctgtgatttgaaatcgctgccaagggaatccgacgtgctgaggtcagaagttcagcacgacgacggcaccaaccaggttacggagtccgccgatggcgccaaccaagcggactcattgctgcaggcaggcgtagctgctggatctgaatctcctggggttccagatgacgccgcttcttcgcttgagtaaccaccgcgaaaataaatgaatgacgccgtaatcagacgcgaaaacaaacgacctcattaccacaacactgttctgatatttttgggtcctgagagagccacttgagttcacaataaatgtagtacccatcactggatgatcttttttagttgctggaaccatatgatatgagcattgttggcacttgctctcagcagcaaggaagccaacaagggtgaacggtggtgacaacagggttacgcgcacgggggca

SEQ ID NO: 200797 - DNA, 1403 bp, Zea Mays
gccgctaattgagcacacgttcgtcttcctccttccgtcccccggcgtccttatccccacacaagcgccgcttaccgccgggacaggactgttggaagtccccagacggcagcgatggcggaactatcgacatcttcggatggattggtggacgaagaagcgaggcagcaggaaccaggacaaggaagcgctgaaggtagccatggtctgcaagacacaaaggagcaggacataaaaaagggaaaggcggctcttgtttccactgaactgctgagggaggatctggttcagagtgctgttagttttctgaaacacccgaaagtagtagcctcttcagatggacagaggcgatctttccttgtaaataaaggactcaccatggatgaaatagatgaagcatttcgacgtctacaaagcccgtcatcgaattctgcgagctcaaatatgtgcacatctcaagagtttcagacctaaatggcttcatcatgacaaatctaacttagtaacttcattgccttattattgcctgcattttgtcaggggtgtttgatcattcatgcaggattactgagcaggaaattaaagtcgatagaaagtgtatgaatggtttagtcattttggctttttaggtatgtagattttgctgtgcacctaactctaagcctagacacatagtaaaaacaatatatctagaaaagccaaaatgacttacaatttgaaaaaggagggagtactttcatttatagagagggtggaacctgaagctggacctgtggcccctgtggtacctcgtcatccaaaatcatatatggagatcatggaaatgatacaaaggggtgagcggccagacgatatacaggatattaacgatgaccctccaaatcctgatcaaccaatctcagaacctcgtatggcaccgaaaccaaagccatgggaaaagcaaggtcaagggagtttggcctgtgatttgaaatcgctgccaagggaatccgacgtgctgaggtcagaagttcagcacgacgacggcaccaaccaggttacggagtccgccgatggcgccaaccaagcggactcattgctgcaggcaggcgtagctgctggatctgaatctcctggggttccagatgacgccgcttcttcgcttgagtaaccaccgcgaaaataaatgaatgacgccgtaatcagacgcgaaaacaaacgacctcattaccacaacactgttctgatatttttgggtcctgagagagccacttgagttcacaataaatgtagtacccatcactggatgatcttttttagttgctggaaccatatgatatgagcattgttggcacttgctctcagcagcaaggaagccaacaagggtgaacggtggtgacaacagggttacgcgcacgggggca

SEQ ID NO: 200798 - DNA, 1543 bp, Zea Mays
gccgctaattgagcacacgttcgtcttcctccttccgtcccccggcgtccttatccccacacaagcgccgcttaccgccgggacaggactgttggaagtccccagacggcagcgatggcggaactatcgacatcttcggatggattggtggacgaagaagcgaggcagcaggaaccaggacaaggaagcgctgaaggtagccatggtctgcaagacacaaaggagcaggacataaaaaagggaaaggcggctcttgtttccactgaactgctgagggaggatctggttcagagtgctgttagttttctgaaacacccgaaagtagtagcctcttcagatggacagaggcgatctttccttgtaaataaaggactcaccatggatgaaatagatgaagcatttcgacgtctacaaagcccgtcatcgaattctgcgagctcaaatatgtgcacatctcaaggtatggcagagtccatttactaagttagctttttatatgatattttagttctatatgttcgtggatcatataatgatgtttcattgtttatgtgtgttttccgctgtaaatgatggtgattccatatgaaattacccattcagagtttcagacctaaatggcttcatcatgacaaatctaacttagtaacttcattgccttattattgcctgcattttgtcaggggtgtttgatcattcatgcaggattactgaggaaattaaagtcgatagaaagtgtatgaatggtttagtcattttggctttttaggtatgtagattttgctgtgcacctaactctaagcctagacacatagtaaaaacaatatatctagaaaagccaaaatgacttacaatttgaaaaaggagggagtactttcatttatagagagggtggaacctgaagctggacctgtggcccctgtggtacctcgtcatccaaaatcatatatggagatcatggaaatgatacaaaggggtgagcggccagacgatatacaggatattaacgatgaccctccaaatcctgatcaaccaatctcagaacctcgtatggcaccgaaaccaaagccatgggaaaagcaaggtcaagggagtttggcctgtgatttgaaatcgctgccaagggaatccgacgtgctgaggtcagaagttcagcacgacgacggcaccaaccaggttacggagtccgccgatggcgccaaccaagcggactcattgctgcaggcaggcgtagctgctggatctgaatctcctggggttccagatgacgccgcttcttcgcttgagtaaccaccgcgaaaataaatgaatgacgccgtaatcagacgcgaaaacaaacgacctcattaccacaacactgttctgatatttttgggtcctgagagagccacttgagttcacaataaatgtagtacccatcactggatgatcttttttagttgctggaaccatatgatatgagcattgttggcacttgctctcagcagcaaggaagccaacaagggtgaacggtggtgacaacagggttacgcgcacgggggca

SEQ ID NO: 200799 - DNA, 1920 bp, Zea Mays
gccgctaattgagcacacgttcgtcttcctccttccgtcccccggcgtccttatccccacacaagcgccgcttaccgccgggacaggactgttggaagtccccagacggcagcgatggcggaactatcgacatcttcggatggattggtggacgaagaagcgaggcagcaggaaccagggtttcatcgccttgcctgttcgaagggttaggggttcctactgtccaaattcacctgatccaacctcgtccgttcataccgtttcctgatacgtactacaccacatcccggagatgtgttcactttcaattttgaaggcctgtactgtactgtaccctagttactaaaccttgggtttccctcgtctctcgcttcatttaggatacgtacgacgcttaagtcattcagatcggctaacctatccggtggaatgagtactgtctgcgaatctacatcatgcctttgtgaattttccttcaactttagtagtattattaaattatacccgttttgagcccatacgcttaaaagaggggaaacagtaatattatagctttaacgaacacacgattggagtgtcaagcatggatcatatttcctctgttcctgtttatatagtaccatccgtgatgccgttatagtatttatggaagtcaaactttttttgctggactgcatacaggacaaggaagcgctgaaggtagccatggtctgcaagacacaaaggagcaggacataaaaaagggaaaggcggctcttgtttccactgaactgctgagggaggatctggttcagagtgctgttagttttctgaaacacccgaaagtagtagcctcttcagatggacagaggcgatctttccttgtaaataaaggactcaccatggatgaaatagatgaagcatttcgacgtctacaaagcccgtcatcgaattctgcgagctcaaatatgtgcacatctcaagtcaggggtgtttgatcattcatgcaggattactgaggtcagcacaaactacaaataatagtattggccaggcatgactggtatctatgctgcaaattttaagctactgccattttcttcaatgcagcaggaaattaaagtcgatagaaagtgtatgaatggtttagtcattttggctttttaggtatgtagattttgctgtgcacctaactctaagcctagacacatagtaaaaacaatatatctagaaaagccaaaatgacttacaatttgaaaaaggagggagtactttcatttatagagagggtggaacctgaagctggacctgtggcccctgtggtacctcgtcatccaaaatcatatatggagatcatggaaatgatacaaaggggtgagcggccagacgatatacaggatattaacgatgaccctccaaatcctgatcaaccaatctcagaacctcgtatggcaccgaaaccaaagccatgggaaaagcaaggtcaagggagtttggcctgtgatttgaaatcgctgccaagggaatccgacgtgctgaggtcagaagttcagcacgacgacggcaccaaccaggttacggagtccgccgatggcgccaaccaagcggactcattgctgcaggcaggcgtagctgctggatctgaatctcctggggttccagatgacgccgcttcttcgcttgagtaaccaccgcgaaaataaatgaatgacgccgtaatcagacgcgaaaacaaacgacctcattaccacaacactgttctgatatttttgggtcctgagagagccacttgagttcacaataaatgtagtacccatcactggatgatcttttttagttgctggaaccatatgatatgagcattgttggcacttgctctcagcagcaaggaagccaacaagggtgaacggtggtgacaacagggttacgcgcacgggggca

SEQ ID NO: 200800 - DNA, 1776 bp, Zea Mays
gccgctaattgagcacacgttcgtcttcctccttccgtcccccggcgtccttatccccacacaagcgccgcttaccgccgggacaggactgttggaagtccccagacggcagcgatggcggaactatcgacatcttcggatggattggtggacgaagaagcgaggcagcaggaaccagggtttcatcgccttgcctgttcgaagggttaggggttcctactgtccaaattcacctgatccaacctcgtccgttcataccgtttcctgatacgtactacaccacatcccggagatgtgttcactttcaattttgaaggacaaggaagcgctgaaggtagccatggtctgcaagacacaaaggagcaggacataaaaaagggaaaggcggctcttgtttccactgaactgctgagggaggatctggttcagagtgctgttagttttctgaaacacccgaaagtagtagcctcttcagatggacagaggcgatctttccttgtaaataaaggactcaccatggatgaaatagatgaagcatttcgacgtctacaaagcccgtcatcgaattctgcgagctcaaatatgtgcacatctcaaggtatggcagagtccatttactaagttagctttttatatgatattttagttctatatgttcgtggatcatataatgatgtttcattgtttatgtgtgttttccgctgtaaatgatggtgattccatatgaaattacccattcagagtttcagacctaaatggcttcatcatgacaaatctaacttagtaacttcattgccttattattgcctgcattttgtcaggggtgtttgatcattcatgcaggattactgaggaaattaaagtcgatagaaagtgtatgaatggtttaggtttgccaatgcttctcatctatggtaaatattgactattccctgattaccttttttttgctaacgtttctactccctccatcccaaattgtaagtcattttggctttttaggtatgtagattttgctgtgcacctaactctaagcctagacacatagtaaaaacaatatatctagaaaagccaaaatgacttacaatttgaaaaaggagggagtactttcatttatagagagggtggaacctgaagctggacctgtggcccctgtggtacctcgtcatccaaaatcatatatggagatcatggaaatgatacaaaggggtgagcggccagacgatatacaggatattaacgatgaccctccaaatcctgatcaaccaatctcagaacctcgtatggcaccgaaaccaaagccatgggaaaagcaaggtcaagggagtttggcctgtgatttgaaatcgctgccaagggaatccgacgtgctgaggtcagaagttcagcacgacgacggcaccaaccaggttacggagtccgccgatggcgccaaccaagcggactcattgctgcaggcaggcgtagctgctggatctgaatctcctggggttccagatgacgccgcttcttcgcttgagtaaccaccgcgaaaataaatgaatgacgccgtaatcagacgcgaaaacaaacgacctcattaccacaacactgttctgatatttttgggtcctgagagagccacttgagttcacaataaatgtagtacccatcactggatgatcttttttagttgctggaaccatatgatatgagcattgttggcacttgctctcagcagcaaggaagccaacaagggtgaacggtggtgacaacagggttacgcgcacgggggca

SEQ ID NO: 200801 - DNA, 1556 bp, Zea Mays
gccgctaattgagcacacgttcgtcttcctccttccgtcccccggcgtccttatccccacacaagcgccgcttaccgccgggacaggactgttggaagtccccagacggcagcgatggcggaactatcgacatcttcggatggattggtggacgaagaagcgaggcagcaggaaccagggtttcatcgccttgcctgttcgaagggttaggggttcctactgtccaaattcacctgatccaacctcgtccgttcataccgtttcctgatacgtactacaccacatcccggagatgtgttcactttcaattttgaaggacaaggaagcgctgaaggtagccatggtctgcaagacacaaaggagcaggacataaaaaagggaaaggcggctcttgtttccactgaactgctgagggaggatctggttcagagtgctgttagttttctgaaacacccgaaagtagtagcctcttcagatggacagaggcgatctttccttgtaaataaaggactcaccatggatgaaatagatgaagcatttcgacgtctacaaagcccgtcatcgaattctgcgagctcaaatatgtgcacatctcaaggggtgtttgatcattcatgcaggattactgagcaggaaattaaagtcgatagaaagtgtatgaatggtttaggtttgccaatgcttctcatctatggtaaatattgactattccctgattaccttttttttgctaacgtttctactccctccatcccaaattgtaagtcattttggctttttaggtatgtagattttgctgtgcacctaactctaagcctagacacatagtaaaaacaatatatctagaaaagccaaaatgacttacaatttgaaaaaggagggagtactttcatttatagagagggtggaacctgaagctggacctgtggcccctgtggtacctcgtcatccaaaatcatatatggagatcatggaaatgatacaaaggggtgagcggccagacgatatacaggatattaacgatgaccctccaaatcctgatcaaccaatctcagaacctcgtatggcaccgaaaccaaagccatgggaaaagcaaggtcaagggagtttggcctgtgatttgaaatcgctgccaagggaatccgacgtgctgaggtcagaagttcagcacgacgacggcaccaaccaggttacggagtccgccgatggcgccaaccaagcggactcattgctgcaggcaggcgtagctgctggatctgaatctcctggggttccagatgacgccgcttcttcgcttgagtaaccaccgcgaaaataaatgaatgacgccgtaatcagacgcgaaaacaaacgacctcattaccacaacactgttctgatatttttgggtcctgagagagccacttgagttcacaataaatgtagtacccatcactggatgatcttttttagttgctggaaccatatgatatgagcattgttggcacttgctctcagcagcaaggaagccaacaagggtgaacggtggtgacaacagggttacgcgcacgggggca

SEQ ID NO: 200802 - DNA, 2535 bp, Zea Mays
ggccacaccccaaccagggccaccacccacgaccaggccaccacttcgccatcgccacggctccacccacgtctcggcttttgcttgcttgcttcctcctctcccgtcgggcactcgggctcgtcagactgcgcccgggcgccgaatctccagacgggatcgcgccccccatctgacgccaccggcgccggagcccacggcgaccgcgcgcctctgcctccgatctaaaagaaacattggagaaccgtactgaacaaaataagtactggtatttcatcatttgtctcggtattccaataatgtggaaactcaatccctttggaggagatccaggttatgaacctcctcaaagggcatcctaatgtggtcacacttgttgcccatgatgtttttgacatgggtcgtacaaaagaggcacttcttgtaatggagttctgtgagaagtctttggttagtgcaatggagagcagaggtagtggttactatgaggagaagaaggtgcttttgattttcagagatgtctgcaatgctgtctttgctatgcatggacaatcaccgccaattgcacatagggatctgaaagctgaaaatgttcttcttggttgtgacggtgtatggaaaatatgtgattttggaagcacatcaactaatcacaaatgctttaacaaaccagaagagatgggcattgaggaagatgtcatcaggaagcatacaaccccagcctacaggcccccagagatgtgggatctctacagaagagaagttattagcgaaaaagttgacatttgggctttggggtgccttctatatagaatatgctacttcaagtctgcatttgatggagaatccaagttgcagatactcaatggcaattatcgtatccctgagcaacccaagtatagcactgctgtcacagggttgatcaaagatatgctggaagcctctccaaattcccgaccagacatcacacaggcaagagtttgattgattggccattcatctccatggtactaggtctggtttcgtgttaatgagctactgccgcttgagttacaaaaaagtttacctgacggaccttcgccagccgtttccttgagtttgcaagatgaaggtgctcataaaagggcacatgtgatgcctagaaggaaccctcctccacctccaagagagcaatctaatagttctctatcgcatggaagctcaaaggcaggagatgcacccttaggtgcattttgggcaacacagcatgcacaaggtgctcaagctgcagataataggaatcctttgtttgacgaggagccaagtaaggtatcattgtcatcaaagcagaaccaaagtcgggtggacaccagcatcagtattcctggtgataggcatggtcattctggtcagacgtcacgaataagcaaaacaccgaataactccttgtccaatgatggtttcagaggtgtctctgacacggagatacataattctgtgaaaactaaagtgcaacaacctcaacccaagccaaaatgtgataaagatccattcaacatctttgttgcagattttgacactcacaatctcaacattgccgttggtaaggcatccgaacttgaacttgaagtgtccagtctgaaggagcagttgaagaaaaccacattagaaaaggctgagatgacagccaagtatgaaaagttatctgcaatctgccgatcacagcgtcaggagatccaagagctgaagcgcacccttgctgaggcaacgcctccctcaaacaaagtcagctcaaggacacaagactctggatctcagcgaaaggaaaagatccaaggaaccttgtgggagcttgaacaagggatgcttgctagcaatacctcatcagccagttctgacgtcaaaacatggcaggctttccctgatacacagactcaggcccgaccaaaggtcgatcatggaactaacggaagccaaaacataaccaagaacacaacatcaggtgcttcccccgacgcgtggggttttggtactgatagtttcagaacatcgtcagcaccagtaaaggctgctacacagatcaacagggctgcccaagggagctcatcccaaagatttaattctggtgtggccaagaaggtagagcaaccatctggatgggctggtttttaactccacatcgacatgcgttaaccatcattctggtcaaaatttgcaatctgcgttacgcaacagttgccgacggagttgtgatccttggccggcccctgggcgtcaaaatcggttatcttgagcgtgttcatcattttggttgaaccaacttagacattggttcatgggatcactttacccgttaataagtaaatgtgtattgacagtattgtgagtgtttctgtgtatggtgattatgaacatgaacggatgaatgtaatgtctaaatgccaagatataccgtctcataacaaagacttgagccttctgagctcaaaacagagagctagtcatatttgtcttttttggaaccagtccattttaaccattatcattgacgcccaa

SEQ ID NO: 200803 - DNA, 2514 bp, Zea Mays
ccacaccccaaccagggccaccacccacgaccaggccaccacttcgccatcgccacggctccacccacgtctcggcttttgcttgcttgcttcctcctctcccgtcgggcactcgggctcgtcagactgcgcccgggcgccgaatctccagacgggatcgcgccccccatctgacgccaccggcgccggagcccacggcgaccgcgcgcctctgcctccgatctaaaagaaacattggagaaccgtactgaacaaaataagtactggtatttcatcatttgtctcggtattccaataatgtggaaactcaatccctttggagaatcgcttgatcttgtcatgaaggagatccaggttatgaacctcctcaaagggcatcctaatgtggtcacacttgttgcccatgatgtttttgacatgggtcgtacaaaagaggcacttcttgtaatggagttctgtgagaagtctttggttagtgcaatggagagcagaggtagtggttactatgaggagaagaaggtgcttttgattttcagagatgtctgcaatgctgtctttgctatgcatggacaatcaccgccaattgcacatagggatctgaaagctgaaaatgttcttcttggttgtgacggtgtatggaaaatatgtgattttggaagcacatcaactaatcacaaatgctttaacaaaccagaagagatgggcattgaggaagatgtcatcaggaagcatacaaccccagcctacaggcccccagagatgtgggatctctacagaagagaagttattagcgaaaaagttgacatttgggctttggggtgccttctatatagaatatgctacttcaagtctgcatttgatggagaatccaagttgcagatactcaatggcaattatcgtatccctgagcaacccaagtatagcactgctgtcacagggttgatcaaagatatgctggaagcctctccaaattcccgaccagacatcacacaggtctggtttcgtgttaatgagctactgccgcttgagttacaaaaaagtttacctgacggaccttcgccagccgtttccttgagtttgcaagatgaaggtgctcataaaagggcacatgtgatgcctagaaggaaccctcctccacctccaagagagcaatctaatagttctctatcgcatggaagctcaaaggcaggagatgcacccttaggtgcattttgggcaacacagcatgcacaaggtgctcaagctgcagataataggaatcctttgtttgacgaggagccaagtaaggtatcattgtcatcaaagcagaaccaaagtcgggtggacaccagcatcagtattcctggtgataggcatggtcattctggtcagacgtcacgaataagcaaaacaccgaataactccttgtccaatgatggtttcagaggtgtctctgacacggagatacataattctgtgaaaactaaagtgcaacaacctcaacccaagccaaaatgtgataaagatccattcaacatctttgttgcagattttgacactcacaatctcaacattgccgttggtaaggcatccgaacttgaacttgaagtgtccagtctgaaggagcagttgaagaaaaccacattagaaaaggctgagatgacagccaagtatgaaaagttatctgcaatctgccgatcacagcgtcaggagatccaagagctgaagcgcacccttgctgaggcaacgcctccctcaaacaaagtcagctcaaggacacaagactctggatctcagcgaaaggaaaagatccaaggaaccttgtgggagcttgaacaagggatgcttgctagcaatacctcatcagccagttctgacgtcaaaacatggcaggctttccctgatacacagactcaggcccgaccaaaggtcgatcatggaactaacggaagccaaaacataaccaagaacacaacatcaggtgcttcccccgacgcgtggggttttggtactgatagtttcagaacatcgtcagcaccagtaaaggctgctacacagatcaacagggctgcccaagggagctcatcccaaagatttaattctggtgtggccaagaaggtagagcaaccatctggatgggctggtttttaactccacatcgacatgcgttaaccatcattctggtcaaaatttgcaatctgcgttacgcaacagttgccgacggagttgtgatccttggccggcccctgggcgtcaaaatcggttatcttgagcgtgttcatcattttggttgaaccaacttagacattggttcatgggatcactttacccgttaataagtaaatgtgtattgacagtattgtgagtgtttctgtgtatggtgattatgaacatgaacggatgaatgtaatgtctaaatgccaagatataccgtctcataacaaagacttgagccttctgagctcaaaacagagagctagtcatatttgtcttttttggaaccagtccattttaaccattatcattgacgcccaa

SEQ ID NO: 200804 - DNA, 2616 bp, Zea Mays
ccaaccagggccaccacccacgaccaggccaccacttcgccatcgccacggctccacccacgtctcggcttttgcttgcttgcttcctcctctcccgtcgggcactcgggctcgtcagactgcgcccgggcgccgaatctccagacgggatcgcgccccccatctgacgccaccggcgccggagcccacggcgaccgcgcgcctctgcctccgatctaaaagaaacattggagaaccgtactgaacaaaataagtactggtatttcatcatttgtctcggtattccaataatgtggaaactcaatccctttggaggtaaagcacagagtgggttggatggtcgtactattgatgttggaaatttgaagatcacagtacaaaatgccattgcacaaggaggtttctcttgtgtatatctggcatgtgacacagtacatccatcaaagatgtatgcactaaagcacattatttgcaatgactcagaatcgcttgatcttgtcatgaaggagatccaggttatgaacctcctcaaagggcatcctaatgtggtcacacttgttgcccatgatgtttttgacatgggtcgtacaaaagaggcacttcttgtaatggagttctgtgagaagtctttggttagtgcaatggagagcagaggtagtggttactatgaggagaagaaggtgcttttgattttcagagatgtctgcaatgctgtctttgctatgcatggacaatcaccgccaattgcacatagaagagatgggcattgaggaagatgtcatcaggaagcatacaaccccagcctacaggcccccagagatgtgggatctctacagaagagaagttattagcgaaaaagttgacatttgggctttggggtgccttctatatagaatatgctacttcaagtctgcatttgatggagaatccaagttgcagatactcaatggcaattatcgtatccctgagcaacccaagtatagcactgctgtcacagggttgatcaaagatatgctggaagcctctccaaattcccgaccagacatcacacaggcaagagtttgattgattggccattcatctccatggtactaggtctggtttcgtgttaatgagctactgccgcttgagttacaaaaaagtttacctgacggaccttcgccagccgtttccttgagtttgcaagatgaaggtgctcataaaagggcacatgtgatgcctagaaggaaccctcctccacctccaagagagcaatctaatagttctctatcgcatggaagctcaaaggcaggagatgcacccttaggtgcattttgggcaacacagcatgcacaaggtgctcaagctgcagataataggaatcctttgtttgacgaggagccaagtaaggtatcattgtcatcaaagcagaaccaaagtcgggtggacaccagcatcagtattcctggtgataggcatggtcattctggtcagacgtcacgaataagcaaaacaccgaataactccttgtccaatgatggtttcagaggtgtctctgacacggagatacataattctgtgaaaactaaagtgcaacaacctcaacccaagccaaaatgtgataaagatccattcaacatctttgttgcagattttgacactcacaatctcaacattgccgttggtaaggcatccgaacttgaacttgaagtgtccagtctgaaggagcagttgaagaaaaccacattagaaaaggctgagatgacagccaagtatgaaaagttatctgcaatctgccgatcacagcgtcaggagatccaagagctgaagcgcacccttgctgaggcaacgcctccctcaaacaaagtcagctcaaggacacaagactctggatctcagcgaaaggaaaagatccaaggaaccttgtgggagcttgaacaagggatgcttgctagcaatacctcatcagccagttctgacgtcaaaacatggcaggctttccctgatacacagactcaggcccgaccaaaggtcgatcatggaactaacggaagccaaaacataaccaagaacacaacatcaggtgcttcccccgacgcgtggggttttggtactgatagtttcagaacatcgtcagcaccagtaaaggctgctacacagatcaacagggctgcccaagggagctcatcccaaagatttaattctggtgtggccaagaaggtagagcaaccatctggatgggctggtttttaactccacatcgacatgcgttaaccatcattctggtcaaaatttgcaatctgcgttacgcaacagttgccgacggagttgtgatccttggccggcccctgggcgtcaaaatcggttatcttgagcgtgttcatcattttggttgaaccaacttagacattggttcatgggatcactttacccgttaataagtaaatgtgtattgacagtattgtgagtgtttctgtgtatggtgattatgaacatgaacggatgaatgtaatgtctaaatgccaagatataccgtctcataacaaagacttgagccttctgagctcaaaacagagagctagtcatatttgtcttttttggaaccagtccattttaaccattatcattgacgcccaa

SEQ ID NO: 200805 - DNA, 2390 bp, Zea Mays
cccacgaccaggccaccacttcgccatcgccacggctccacccacgtctcggcttttgcttgcttgcttcctcctctcccgtcgggcactcgggctcgtcagactgcgcccgggcgccgaatctccagacgggatcgcgccccccatctgacgccaccggcgccggagcccacggcgaccgcgcgcctctgcctccgatctaaaagaaacattggagaaccgtactgaacaaaataagtactggtatttcatcatttgtctcggtattccaataatgtggaaactcaatccctttggagaatcgcttgatcttgtcatgaaggagatccaggttatgaacctcctcaaagggcatcctaatgtggtcacacttgttgcccatgatgtttttgacatgggtcgtacaaaagaggcacttcttgtaatggagttctgtgagaagtctttggttagtgcaatggagagcagaggtagtggttactatgaggagaagaaggtgcttttgattttcagagatgtctgcaatgctgtctttgctatgcatggacaatcaccgccaattgcacatagaagagatgggcattgaggaagatgtcatcaggaagcatacaaccccagcctacaggcccccagagatgtgggatctctacagaagagaagttattagcgaaaaagttgacatttgggctttggggtgccttctatatagaatatgctacttcaagtctgcatttgatggagaatccaagttgcagatactcaatggcaattatcgtatccctgagcaacccaagtatagcactgctgtcacagggttgatcaaagatatgctggaagcctctccaaattcccgaccagacatcacacaggtctggtttcgtgttaatgagctactgccgcttgagttacaaaaaagtttacctgacggaccttcgccagccgtttccttgagtttgcaagatgaaggtgctcataaaagggcacatgtgatgcctagaaggaaccctcctccacctccaagagagcaatctaatagttctctatcgcatggaagctcaaaggcaggagatgcacccttaggtgcattttgggcaacacagcatgcacaaggtgctcaagctgcagataataggaatcctttgtttgacgaggagccaagtaaggtatcattgtcatcaaagcagaaccaaagtcgggtggacaccagcatcagtattcctggtgataggcatggtcattctggtcagacgtcacgaataagcaaaacaccgaataactccttgtccaatgatggtttcagaggtgtctctgacacggagatacataattctgtgaaaactaaagtgcaacaacctcaacccaagccaaaatgtgataaagatccattcaacatctttgttgcagattttgacactcacaatctcaacattgccgttggtaaggcatccgaacttgaacttgaagtgtccagtctgaaggagcagttgaagaaaaccacattagaaaaggctgagatgacagccaagtatgaaaagttatctgcaatctgccgatcacagcgtcaggagatccaagagctgaagcgcacccttgctgaggcaacgcctccctcaaacaaagtcagctcaaggacacaagactctggatctcagcgaaaggaaaagatccaaggaaccttgtgggagcttgaacaagggatgcttgctagcaatacctcatcagccagttctgacgtcaaaacatggcaggctttccctgatacacagactcaggcccgaccaaaggtcgatcatggaactaacggaagccaaaacataaccaagaacacaacatcaggtgcttcccccgacgcgtggggttttggtactgatagtttcagaacatcgtcagcaccagtaaaggctgctacacagatcaacagggctgcccaagggagctcatcccaaagatttaattctggtgtggccaagaaggtagagcaaccatctggatgggctggtttttaactccacatcgacatgcgttaaccatcattctggtcaaaatttgcaatctgcgttacgcaacagttgccgacggagttgtgatccttggccggcccctgggcgtcaaaatcggttatcttgagcgtgttcatcattttggttgaaccaacttagacattggttcatgggatcactttacccgttaataagtaaatgtgtattgacagtattgtgagtgtttctgtgtatggtgattatgaacatgaacggatgaatgtaatgtctaaatgccaagatataccgtctcataacaaagacttgagccttctgagctcaaaacagagagctagtcatatttgtcttttttggaaccagtccattttaaccattatcattgacgcccaa

SEQ ID NO: 200806 - DNA, 2533 bp, Zea Mays
cccacgaccaggccaccacttcgccatcgccacggctccacccacgtctcggcttttgcttgcttgcttcctcctctcccgtcgggcactcgggctcgtcagactgcgcccgggcgccgaatctccagacgggatcgcgccccccatctgacgccaccggcgccggagcccacggcgaccgcgcgcctctgcctccgatctaaaagaaacattggagaaccgtactgaacaaaataagtactggtatttcatcatttgtctcggtattccaataatgtggaaactcaatccctttggagaatcgcttgatcttgtcatgaaggagatccaggttatgaacctcctcaaagggcatcctaatgtggtcacacttgttgcccatgatgtttttgacatgggtcgtacaaaagaggcacttcttgtaatggagttctgtgagaagtctttggttagtgcaatggagagcagaggtagtggttactatgaggagaagaaggtgcttttgattttcagagatgtctgcaatgctgtctttgctatgcatggacaatcaccgccaattgcacatagggatctgaaagctgaaaatgttcttcttggttgtgacggtgtatggaaaatatgtgattttggaagcacatcaactaatcacaaatgctttaacaaaccagaagagatgggcattgaggaagatgtcatcaggaagcatacaaccccagcctacaggcccccagagatgtgggatctctacagaagagaagttattagcgaaaaagttgacatttgggctttggggtgccttctatatagaatatgctacttcaagtctgcatttgatggagaatccaagttgcagatactcaatggcaattatcgtatccctgagcaacccaagtatagcactgctgtcacagggttgatcaaagatatgctggaagcctctccaaattcccgaccagacatcacacaggcaagagtttgattgattggccattcatctccatggtactaggtctggtttcgtgttaatgagctactgccgcttgagttacaaaaaagtttacctgacggaccttcgccagccgtttccttgagtttgcaagatgaaggtgctcataaaagggcacatgtgatgcctagaaggaaccctcctccacctccaagagagcaatctaatagttctctatcgcatggaagctcaaaggcaggagatgcacccttaggtgcattttgggcaacacagcatgcacaaggtgctcaagctgcagataataggaatcctttgtttgacgaggagccaagtaaggtatcattgtcatcaaagcagaaccaaagtcgggtggacaccagcatcagtattcctggtgataggcatggtcattctggtcagacgtcacgaataagcaaaacaccgaataactccttgtccaatgatggtttcagaggtgtctctgacacggagatacataattctgtgaaaactaaagtgcaacaacctcaacccaagccaaaatgtgataaagatccattcaacatctttgttgcagattttgacactcacaatctcaacattgccgttggtaaggcatccgaacttgaacttgaagtgtccagtctgaaggagcagttgaagaaaaccacattagaaaaggctgagatgacagccaagtatgaaaagttatctgcaatctgccgatcacagcgtcaggagatccaagagctgaagcgcacccttgctgaggcaacgcctccctcaaacaaagtcagctcaaggacacaagactctggatctcagcgaaaggaaaagatccaaggaaccttgtgggagcttgaacaagggatgcttgctagcaatacctcatcagccagttctgacgtcaaaacatggcaggctttccctgatacacagactcaggcccgaccaaaggtcgatcatggaactaacggaagccaaaacataaccaagaacacaacatcaggtgcttcccccgacgcgtggggttttggtactgatagtttcagaacatcgtcagcaccagtaaaggctgctacacagatcaacagggctgcccaagggagctcatcccaaagatttaattctggtgtggccaagaaggtagagcaaccatctggatgggctggtttttaactccacatcgacatgcgttaaccatcattctggtcaaaatttgcaatctgcgttacgcaacagttgccgacggagttgtgatccttggccggcccctgggcgtcaaaatcggttatcttgagcgtgttcatcattttggttgaaccaacttagacattggttcatgggatcactttacccgttaataagtaaatgtgtattgacagtattgtgagtgtttctgtgtatggtgattatgaacatgaacggatgaatgtaatgtctaaatgccaagatataccgtctcataacaaagacttgagccttctgagctcaaaacagagagctagtcatatttgtcttttttggaaccagtccattttaaccattatcattgacgcccaa

SEQ ID NO: 200807 - DNA, 2606 bp, Zea Mays
gccttcttaccgagattcggcgagcttcagtagcaaggaacgagggacatcggggcagtggttagattggcttgcctgggagggatcggagccggacctgcattttgcgtgaaacattggagaaccgtactgaacaaaataagtactggtatttcatcatttgtctcggtattccaataatgtggaaactcaatccctttggaggtaaagcacagagtgggttggatggtcgtactattgatgttggaaatttgaagatcacagtacaaaatgccattgcacaaggaggtttctcttgtgtatatctggcatgtgacacagtacatccatcaaagatgtatgcactaaagcacattatttgcaatgactcagaatcgcttgatcttgtcatgaaggagatccaggttatgaacctcctcaaagggcatcctaatgtggtcacacttgttgcccatgatgtttttgacatgggtcgtacaaaagaggcacttcttgtaatggagttctgtgagaagtctttggttagtgcaatggagagcagaggtagtggttactatgaggagaagaaggtgcttttgattttcagagatgtctgcaatgctgtctttgctatgcatggacaatcaccgccaattgcacatagggatctgaaagctgaaaatgttcttcttggttgtgacggtgtatggaaaatatgtgattttggaagcacatcaactaatcacaaatgctttaacaaaccagaagagatgggcattgaggaagatgtcatcaggaagcatacaaccccagcctacaggcccccagagatgtgggatctctacagaagagaagttattagcgaaaaagttgacatttgggctttggggtgccttctatatagaatatgctacttcaagtctgcatttgatggagaatccaagttgcagatactcaatggcaattatcgtatccctgagcaacccaagtatagcactgctgtcacagggttgatcaaagatatgctggaagcctctccaaattcccgaccagacatcacacaggcaagagtttgattgattggccattcatctccatggtactaggtctggtttcgtgttaatgagctactgccgcttgagttacaaaaaagtttacctgacggaccttcgccagccgtttccttgagtttgcaagatgaaggtgctcataaaagggcacatgtgatgcctagaaggaaccctcctccacctccaagagagcaatctaatagttctctatcgcatggaagctcaaaggcaggagatgcacccttaggtgcattttgggcaacacagcatgcacaaggtgctcaagctgcagataataggaatcctttgtttgacgaggagccaagtaaggtatcattgtcatcaaagcagaaccaaagtcgggtggacaccagcatcagtattcctggtgataggcatggtcattctggtcagacgtcacgaataagcaaaacaccgaataactccttgtccaatgatggtttcagaggtgtctctgacacggagatacataattctgtgaaaactaaagtgcaacaacctcaacccaagccaaaatgtgataaagatccattcaacatctttgttgcagattttgacactcacaatctcaacattgccgttggtaaggcatccgaacttgaacttgaagtgtccagtctgaaggagcagttgaagaaaaccacattagaaaaggctgagatgacagccaagtatgaaaagttatctgcaatctgccgatcacagcgtcaggagatccaagagctgaagcgcacccttgctgaggcaacgcctccctcaaacaaagtcagctcaaggacacaagactctggatctcagcgaaaggaaaagatccaaggaaccttgtgggagcttgaacaagggatgcttgctagcaatacctcatcagccagttctgacgtcaaaacatggcaggctttccctgatacacagactcaggcccgaccaaaggtcgatcatggaactaacggaagccaaaacataaccaagaacacaacatcaggtgcttcccccgacgcgtggggttttggtactgatagtttcagaacatcgtcagcaccagtaaaggctgctacacagatcaacagggctgcccaagggagctcatcccaaagatttaattctggtgtggccaagaaggtagagcaaccatctggatgggctggtttttaactccacatcgacatgcgttaaccatcattctggtcaaaatttgcaatctgcgttacgcaacagttgccgacggagttgtgatccttggccggcccctgggcgtcaaaatcggttatcttgagcgtgttcatcattttggttgaaccaacttagacattggttcatgggatcactttacccgttaataagtaaatgtgtattgacagtattgtgagtgtttctgtgtatggtgattatgaacatgaacggatgaatgtaatgtctaaatgccaagatataccgtctcataacaaagacttgagccttctgagctcaaaacagagagctagtcatatttgtcttttttggaaccagtccattttaaccattatcattgacgcccaa

SEQ ID NO: 200808 - DNA, 2479 bp, Zea Mays
tcggagccggacctgcattttgcgtgaaacattggagaaccgtactgaacaaaataagtactggtatttcatcatttgtctcggtattccaataatgtggaaactcaatccctttggaggtaaagcacagagtgggttggatggtcgtactattgatgttggaaatttgaagatcacagtacaaaatgccattgcacaaggaggtttctcttgtgtatatctggcatgtgacacagtacatccatcaaagatgtatgcactaaagcacattatttgcaatgactcagaatcgcttgatcttgtcatgaaggagatccaggttatgaacctcctcaaagggcatcctaatgtggtcacacttgttgcccatgatgtttttgacatgggtcgtacaaaagaggcacttcttgtaatggagttctgtgagaagtctttggttagtgcaatggagagcagaggtagtggttactatgaggagaagaaggtgcttttgattttcagagatgtctgcaatgctgtctttgctatgcatggacaatcaccgccaattgcacatagggatctgaaagctgaaaatgttcttcttggttgtgacggtgtatggaaaatatgtgattttggaagcacatcaactaatcacaaatgctttaacaaaccagaagagatgggcattgaggaagatgtcatcaggaagcatacaaccccagcctacaggcccccagagatgtgggatctctacagaagagaagttattagcgaaaaagttgacatttgggctttggggtgccttctatatagaatatgctacttcaagtctgcatttgatggagaatccaagttgcagatactcaatggcaattatcgtatccctgagcaacccaagtatagcactgctgtcacagggttgatcaaagatatgctggaagcctctccaaattcccgaccagacatcacacaggtctggtttcgtgttaatgagctactgccgcttgagttacaaaaaagtttacctgacggaccttcgccagccgtttccttgagtttgcaagatgaaggtgctcataaaagggcacatgtgatgcctagaaggaaccctcctccacctccaagagagcaatctaatagttctctatcgcatggaagctcaaaggcaggagatgcacccttaggtgcattttgggcaacacagcatgcacaaggtgctcaagctgcagataataggaatcctttgtttgacgaggagccaagtaaggtatcattgtcatcaaagcagaaccaaagtcgggtggacaccagcatcagtattcctggtgataggcatggtcattctggtcagacgtcacgaataagcaaaacaccgaataactccttgtccaatgatggtttcagaggtgtctctgacacggagatacataattctgtgaaaactaaagtgcaacaacctcaacccaagccaaaatgtgataaagatccattcaacatctttgttgcagattttgacactcacaatctcaacattgccgttggtaaggcatccgaacttgaacttgaagtgtccagtctgaaggagcagttgaagaaaaccacattagaaaaggctgagatgacagccaagtatgaaaagttatctgcaatctgccgatcacagcgtcaggagatccaagagctgaagcgcacccttgctgaggcaacgcctccctcaaacaaagtcagctcaaggacacaagactctggatctcagcgaaaggaaaagatccaaggaaccttgtgggagcttgaacaagggatgcttgctagcaatacctcatcagccagttctgacgtcaaaacatggcaggctttccctgatacacagactcaggcccgaccaaaggtcgatcatggaactaacggaagccaaaacataaccaagaacacaacatcaggtgcttcccccgacgcgtggggttttggtactgatagtttcagaacatcgtcagcaccagtaaaggctgctacacagatcaacagggctgcccaagggagctcatcccaaagatttaattctggtgtggccaagaaggtagagcaaccatctggatgggctggtttttaactccacatcgacatgcgttaaccatcattctggtcaaaatttgcaatctgcgttacgcaacagttgccgacggagttgtgatccttggccggcccctgggcgtcaaaatcggttatcttgagcgtgttcatcattttggttgaaccaacttagacattggttcatgggatcactttacccgttaataagtaaatgtgtattgacagtattgtgagtgtttctgtgtatggtgattatgaacatgaacggatgaatgtaatgtctaaatgccaagatataccgtctcataacaaagacttgagccttctgagctcaaaacagagagctagtcatatttgtcttttttggaaccagtccattttaaccattatcattgacgcccaa

SEQ ID NO: 200809 - DNA, 508 bp, Zea Mays
ccggacacgagcaagcggcacctcactgcctctccctccctcactcagccaaacctgacatcagcctattacaagcgtcagtagagatcttccagatggccatggccaagcccccacttcagacggccgcgatcatccttttcgtgctcctcgcgaccgtgtcgtgcctccacaccgtcgacaccgccgctttagggttttgctggggcaagtgcagcgctcggtgcgcgcgggcaagcgcgcggcgggcgtgggccgcgtgcatgagctcatgcggcctctgctgcgaggagtgcaactgcgtgccgcgcgacatccatgactgcccctgctacagcaacatgttcaccaccggccccaagaagatgcccaagtgcccctgagactgagactgtgaggccggctcacactgcgactgctgcctacaactacgatctgatccatgctggaccagacaaccagaatgaacagtgcggaagggtgtgaacagtgaaatgctatatctaga

SEQ ID NO: 200810 - DNA, 608 bp, Zea Mays
gtcaagcagcagctgctagagcaaacctaagagccaagcggcagcagccagctaataattaagcagccaaattaagtgcgacgatggcgtcgtccatcgccagaaccgcatgtctcctcgtgctcacactgttcgtcgtctccgcggcgatcatcttgcccagctccctgtgccatggagcccgcggcgtcggtatcggcggcggcgctttggaccctgaccgtccagcgtgcgtcggggtcggggcatgcccagttcgtgggcgcccctttcctatcgtcaaaccgtcccccccatccaacggaggggacccacatcactgatgcctgcctcggatcacgcgccctccgtcgtatcggtctgtctacgatggaacgatgcaccgtgcacgagcacgactgcatgctactagctactagctatctcgtgtacctgtacagtcgtcgtgcttatgtacgtacgtatggtcaattaataaaactggagtgggatgatgatggtgagaatttcttgtactggatgatgacatgcatatgtcgttggttcatatagacgaccacttgcaaaataaatgaatatatggtgatatgggaacgctgccatgtgag

SEQ ID NO: 200811 - DNA, 1133 bp, Zea Mays
cactagtagtacaatactaatcacttgcccaatgccccaccccattcccgtcttacctagcgctagggttagtacgcgtccacggcgacgacctctgcgcggagtgtgctccgattggctggcctcctcgatcctccttcccgcgaacgcacgcgcgcgcgagggagaggttgagacttgagagatagacgaaagacgaaacaagggaaggagacgccgtgctcgcctattggccgccgcctccgctccttcgcgcccaatggcttctgcagcatatcaatatcatgcagcatagcagtactcagacccttactacgcaggcgttgttgctccctatggaagtcaagatgtgtgtccgaggagcctgtctatgtgaacgccaagcagtaccgcggcattctaagacggcggcagtcacgtgccaaggccgagcttgagagaaagcgctggtcaaagcaagaaaggttagtgtactagcaatattatatcactcacaccatgcctcctctgtacgtacttcccttgtgcctttcaagatcgatcgaggatcagcgactatttcagcttgttttcttggcaaactagtatgtatgtatcttgcagtggttgatggtagtttgctaagctaagaacgacatgcgtgttgattgatactcactctgccagccgtatcttcacgagtccccgtcatcagcacgcgatgacgaggagggcgagagggaacggtggacgcttcctaaacacgaagaagagtgaccgtgtccctcctgatgacttgatacagctacgacgacacaacgaggcttgaagaggtagcggtctggctggcatcctagagcagcggtttctgtccacaggcacgtgcatctgagaccggatccgtagctccactccacagcatatgcgcagcccatccatctcgtgcacacttgtgtagctgctgtgttgtaacttgtaagtggaaaactgagcttgtgtccgattgctatacacaacctaagtttcctgtgacctagctctgatgtggctctgattgaactgcaccaaatcatatgaaatccctacagagttctcgtggaattcataggtcaacttctgtaccgccgtacgtgcgtccttttcgtcagtttcgt

SEQ ID NO: 200812 - DNA, 1057 bp, Zea Mays
gatcccaagaatcttctactctaccggccgtccactcgtccgcccatccgtatcccccgcccctcgagaatctgttcatttgttaaactaatccatcccgtcgtggcgtcgtccacctgtccgagacactagtagtacaatactaatcacttgcccaatgccccaccccattcccgtcttacctagcgctagggttagtacgcgtccacggcgacgacctctgcgcggagtgtgctccgattggctggcctcctcgatcctccttcccgcgaacgcacgcgcgcgcgagggagaggttgagacttgagagatagacgaaagacgaaacaagggaaggagacgccgtgctcgcctattggccgccgcctccgctccttcgcgcccaatggcttctgcagcatatcaatatcatgcagcatagcagtactcagacccttactacgcaggcgttgttgctccctatggaagtcaagatgtgtgtccgaggagcctgtctatgtgaacgccaagcagtaccgcggcattctaagacggcggcagtcacgtgccaaggccgagcttgagagaaagcgctggtcaaagcaagaaagccgtatcttcacgagtccccgtcatcagcacgcgatgacgaggagggcgagagggaacggtggacgcttcctaaacacgaagaagagtgaccgtgtccctcctgatgacttgatacagctacgacgacacaacgaggcttgaagaggtagcggtctggctggcatcctagagcagcggtttctgtccacaggcacgtgcatctgagaccggatccgtagctccactccacagcatatgcgcagcccatccatctcgtgcacacttgtgtagctgctgtgttgtaacttgtaagtggaaaactgagcttgtgtccgattgctatacacaacctaagtttcctgtgacctagctctgatgtggctctgattgaactgcaccaaatcatatgaaatccctacagagttctcgtggaattcataggtcaacttctgtaccgccgtacgtgcgtccttttcgtcagtttcgt

SEQ ID NO: 200813 - DNA, 2052 bp, Zea Mays
caacaaagcagacctcccgtcccgatccccccaaactgtttggatttcggaccggacgcgtttctgaacttcttgcgccggaagaaagagaaaccgagaagaggagtcgcggctcccgacatatgtggcggcgggcggcgacagcggcgctgtcgctgggcgccggtgccggcgcggtctcgatcgccacctccgaggaccccgccgcgacgttcaaggtctgcgcgcacctgcctccgcgcctcctccgcgactctgtcacggccgccaccatcgcgtttgactacaagtggtccctctggggcctcgagccgggcacccccgtgtggcagagcgccaagcaccatgcccacctccgttccgccaaccgactccaggagctctgcttccgcaacggtggcatctacatcaagctcggccagcacatcgctcagctggagtatgtcgtgccggaggagtatgtgcaaacaatgagggaatccatgctgaagaggtgcccggtctcatcgtacgagcaggtccgcggggtgtttaccaaggatctcggtgaatcgccagaaactgtttttgcagaatttgatcctgctccatttgcaagtgcttcccttgcacaagtccatgttgcccgaacgcacgatgggcaaaaagttgctgttaaggttcaacatgaccacctcacaaatactggtgttgtagatatagccactgtggatttgttagtgaatgctctgcattatattttccctacatttgactacagtgctcttgaatggttcgcctcgtaaccatatttcttaccggagaggtcttcggcagggagatcctttatctcccatattatttgtgttggttatggatgttcttagcagcatttagcgctgctgaaaaatagaggactgctgcaaagcctgggaggagctgctgtccgtagtagagtttccatttatgcggatgatgtggtcctttttatcaaaccaattgaagaagatctgaattgtgctaaaatgatattgaattgctttggttcagcctctggtctggtaacaaatatgcacaagagctgtgccattccaataagatgtgatggtcaagttgtgcaggctggatgcagtatgttgcaatgcagtcccacttcttttccttgcaagtatttggggctgcccatctctgataagaaattgaggaagactgatcttatgctgtggattgagaagattgcagatcgcctccctaattggaaggctcggcacctcaatctggctggacggacaacattggtgaagtttgttctttcagccataccaatctatcttcttattgctataaatatcccttagtgggtgattaaatcaattgacaaaattcaacgggggtttctttggaaagggagaaaagaggttactagtggaagttgtcttgtatcctgggaaataattacgaggcctctaagctatggtggtcttggtgtccctaacttgcaatttaaaagctgggctttacagtcaaaatggttatggctggaaaagacggacccgaacaggccctggcatgggatgtccctcccagtgcagcggcaggttagacagttctttgagttgtctgtgtttaccgtgataggaaatggggctactactctcttctggtcggatagatgggtgtatgggaatactatccatgacattgcccctgatgtggtacagatggttggtcgtagggccttttcttccagaactgtggcacaggctctagataactggcaatgggtcagcgacattgaaaaccctctttctttaaaagggataaaacaatatttgttgttatgggatactttgagaggggttttgctttctcaagatactgataagtatgtatggatgcacacttcttctggcagttctcttcaaaatcttgctataaggcattttcatgggatccatttcctttgagccatggaaacgattgtggaagacttgggctcccccaaaatgtaagttctttttgtggttggcaataaggaactagtgttggactgctgatagacttagaaggagg

SEQ ID NO: 200814 - DNA, 1798 bp, Zea Mays
aactgtttggatttcggaccggacgcgtttctgaacttcttgcgccggaagaaagagaaaccgagaagaggagtcgcggctcccgacatatgtggcggcgggcggcgacagcggcgctgtcgctgggcgccggtgccggcgcggtctcgatcgccacctccgaggaccccgccgcgacgttcaaggtctgcgcgcacctgcctccgcgcctcctccgcgactctgtcacggccgccaccatcgcgtttgactacaagtggtccctctggggcctcgagccgggcacccccgtgtggcagagcgccaagcaccatgcccacctccgttccgccaaccgactccaggagctctgcttccgcaacggtggcatctacatcaagctcggccagcacatcgctcagctggagtatgtcgtgccggaggagtatgtgcaaacaatgagggaatccatgctgaagaggtgcccggtctcatcgtacgagcaggtccgcggggtgtttaccaaggatctcggtgaatcgccagaaactgtttttgcagaatttgatcctgctccatttgcaagtgcttcccttgcacaagtccatgttgcccgaacgcacgatgggcaaaaagttgctgttaaggttcaacatgaccacctcacaaatactggtgttgtagatatagccactgtggatttgttagtgaatgctctgcattatattttccctacatttgactacaggtggttagttgatgaagttcgagaaagtgcccctaaggaattggatttcttgaatgaagccaaaaacagcgaaagatgtttgaataactttagaaagctgtctcctcagattgctggtagcatatatgcccccaaggtttattggaatctcagcacatctagaattctcaccatggagtttatggatgccaaggaggatggaaaaggccacagctggttcttcttgaccacggcctctacaaagagcttgattataatactaggataagctacgcttctctttggaaggcacttgtttttgctgatgcaaaagcaattaaggagaacagtgccaaactgggtgctggggaggatcttcatgcactctttgctggtgttctcactatgagaccatggaaaagggtgattgacccatctcctgatcatcttgtactaggaaaaaatactgattattcagaattacagaattacgcctccttatattttactgagatctccgagctactgaggagattaccaagggttatattgttgatgcttaaaacaaatgactgtttacgtgcagtcagtcatgccctggttgggggcagttccttggagtcgtttatgattattggacgggtatcttctgaagctgtgctggatgctaaaaggatgaacaggaggtcctttctcgatggattgaagatatggctggaggaagccctgctggaagctcgattctttactttgaagctgatgctatgtgttatgcaacttaggaagttgttgcctggctaaaagcagttaggcgtatcagcagcctttttgaccggtagaactgcggagttgacatctagttccatatattttcttgagggcgaaacttgacattttgcttagaagattgcctttcttttcgtatacataattcttctgtcgatcattttctcaccatgagtggccatttttcatggtcgatacttgataccttcattgggtgaatacaagtatacaaactgctgacgtggacaaatgtaagagcaaaactgttttctttttggaagggaatcaacattgacgtgtagcaaa

SEQ ID NO: 200815 - DNA, 1982 bp, Zea Mays
gtttggatttcggaccggacgcgtttctgaacttcttgcgccggaagaaagagaaaccgagaagaggagtcgcggctcccgacatatgtggcggcgggcggcgacagcggcgctgtcgctgggcgccggtgccggcgcggtctcgatcgccacctccgaggaccccgccgcgacgttcaaggtctgcgcgcacctgcctccgcgcctcctccgcgactctgtcacggccgccaccatcgcgtttgactacaagtggtccctctggggcctcgagccgggcacccccgtgtggcagagcgccaagcaccatgcccacctccgttccgccaaccgactccaggagctctgcttccgcaacggtggcatctacatcaagctcggccagcacatcgctcagctggagtatgtcgtgccggaggagtatgtgcaaacaatgagggaatccatgctgaagaggtgcccggtctcatcgtacgagcaggtccgcggggtgtttaccaaggatctcggtgaatcgccagaaactgtttttgcagaatttgatcctgctccatttgcaagtgcttcccttgcacaagtccatgttgcccgaacgcacgatgggcaaaaagttgctgttaaggttgcacaacattgtggttcaacatgaccacctcacaaatactggtgttgtagatatagccactgtggatttgttagtgaatgctctgcattatattttccctacatttgactacaggtggttagttgatgaagttcgagaaagtgcccctaaggaattggatttcttgaatgaagccaaaaacagcgaaagatgtttgaataactttagaaagctgtctcctcagattgctggtagcatatatgcccccaaggtttattggaatctcagcacatctagaattctcaccatggagtttatggatgccaaggaggtaactgatgttagtggcattaaatcaattggagttcaccctgttgatgtttcaaacctagtcagtaaagcatttgctgagatgattttcaagcatggctttgttcattgtgatccccatgctgccaatatgatggtccgaccaatgccacaagacagcagaaaactttttggatggaaaaggccacagctggttcttcttgaccacggcctctacaaagagcttgattataatactaggataagctacgcttctctttggaaggcacttgtttttgctgatgcaaaagcaattaaggagaacagtgccaaactgggtgctggggaggatcttcatgcactctttgctggtgttctcactatgagaccatggaaaagggtgattgacccatctcctgatcatcttgtactaggaaaaaatactgattattcagaattacagaattacgcctccttatattttactgagatctccgagctactgaggagattaccaagggttatattgttgatgcttaaaacaaatgactgtttacgtgcagtcagtcatgccctggttgggggcagttccttggagtcgtttatgattattggacgggtatcttctgaagctgtgctggatgctaaaaggatgaacaggaggtcctttctcgatggattgaagatatggctggaggaagccctgctggaagctcgattctttactttgaagctgatgctatgtgttatgcaacttaggaagttgttgcctggctaaaagcagttaggcgtatcagcagcctttttgaccggtagaactgcggagttgacatctagttccatatattttcttgagggcgaaacttgacattttgcttagaagattgcctttcttttcgtatacataattcttctgtcgatcattttctcaccatgagtggccatttttcatggtcgatacttgataccttcattgggtgaatacaagtatacaaactgctgacgtggacaaatgtaagagcaaaactgttttctttttggaagggaatcaacattgacgtgtagcaaa

SEQ ID NO: 200816 - DNA, 1824 bp, Zea Mays
caggggctaacctccgagcggcgaggatgaggggcggcggcaggatgattgacgatgaagagcgggtgggccacgcggagatcccgaccagcttcggccccgagctgcgcgcctgcctccgatgccgcctcgtcaagacctacgactaggaacccttctccgctggcgccgctcccctcccccctcctcacgcctaggcctgcggtctaggttcaccagccttccgttgaagggacggttcgaggactgggggtttcgtttctcctggtgcggtccgttctcggcggcggctaagaattatctctttgatggaccccagtaggagttgggcagctcgttggttgagaattggtgacccttgttctcgtgtatcctgcagtttgtttgcctcttcaatctagtgcgttcattccgggttgctacacacttgctgtttcggaggaacttcaagaagagtatcaggggatttgccaagacaacaacgtgtagtatgtgccacccaagcgatgtctagagctcctgaagcagtatgaataatttagcttatataaaatggtgcatgtgcttgttgccaagcgaactgccctgctttgttgtatctgagtgctaatcaggacccctaattaaccctttcgtgctacgaatgggttttttagccaagatggcataaaacattagcacaaatgtcagacacatgaccaagacaagttcataggccagcaattctgttcaacaaacacctcgtcttcgtcgtacacggatgtggataccaatttgcagattgcgagccacgagcccatctaccagtagcctctccagtgtccatactgagaaatttatcgcaccagcaccactgtcacaatacaatggtacaggtactgcaccgtgcacgtgcccacaagctttcgacatctgcgtgtcagcatcggttatcatcaatcaccaagaatgactggaccgtggcgcgctggtcctctgcgctggtcctccgggaggtcagatgatacgggcgtaacttatctaagaacaatcaaataaataatttaattcggctgagcacaaagtaacatttgacccgattaataatccaacagtcaatgtttaccagtactttaaagagaagaacacagcactaccaaatgctgaagtaattcacacaaacagatcaaaagctagtcttacaaaaccatcggtagttacacagcttgatcggtcgacggactccacaaatgacacggtacgaagtctttgcggcaaatcatcagcattcagatccaggtcaatcgaccagtcagcgattctgttgctagaacctctcccacgccttctattgctgaagaagggtaacgagcaccaaaaaatacaaatactcgcatgcggcatgcaatcatacctttcctactctagatgcattagtgcagtatttcatgcaaaacatgaaccattaacttgcaagcctacgtgggtatgttcaaagaacagttggggtagccagataaggatacccttttatgaccataagcatgtcaataaacttgaattgcgtcacaagtgtgtatacagctttaatactcacctgcttaagacatgcgcttatgcattctcgataagacatgtttggcaaaccgcagaaatgaattgacagcacatccagtgcatgcaacgattaattgtgcacatgcagaccttatgatccaaaaacccaaaacaggactatgatagatcagtgcagacacatctaaatccaaatactataatgggggttaacacctatagcatgtagatgcatggggcgatgcataaatcattggaatcttacttgtc

SEQ ID NO: 200817 - DNA, 1841 bp, Zea Mays
ccggaagcaggaagcaggggctaacctccgagcggcgaggatgaggggcggcggcaggatgattgacgatgaagagcgggtgggccacgcggagatcccgaccagcttcggccccgagctgcgcgcctgcctccgatgccgcctcgtcaagacctacgactaggaacccttctccgctggcgccgctcccctcccccctcctcacgcctaggcctgcggtctaggttcaccagccttccgttgaagggacggttcgaggactgggggtttcgtttctcctggtgcggtccgttctcggcggcggctaagttcaggcagaacggctgaacgtcgtcaactgcaccacccccaacttcaccagaattatctctttgatggaccccagtaggagttgggcagctcgttggttgagaattggtaggttcattccgggttgctacacacttgctgtttcggaggaacttcaagaagagtatcaggggatttgccaagacaacaacgtgtagtatgtgccacccaagcgatgtctagagctcctgaagcagtatgaataatttagcttatataaaatggtgcatgtgcttgttgccaagcgaactgccctgctttgttgtatctgagtgctaatcaggacccctaattaaccctttcgtgctacgaatgggttttttagccaagatggcataaaacattagcacaaatgtcagacacatgaccaagacaagttcataggccagcaattctgttcaacaaacacctcgtcttcgtcgtacacggatgtggataccaatttgcagattgcgagccacgagcccatctaccagtagcctctccagtgtccatactgagaaatttatcgcaccagcaccactgtcacaatacaatggtacaggtactgcaccgtgcacgtgcccacaagctttcgacatctgcgtgtcagcatcggttatcatcaatcaccaagaatgactggaccgtggcgcgctggtcctctgcgctggtcctccgggaggtcagatgatacgggcgtaacttatctaagaacaatcaaataaataatttaattcggctgagcacaaagtaacatttgacccgattaataatccaacagtcaatgtttaccagtactttaaagagaagaacacagcactaccaaatgctgaagtaattcacacaaacagatcaaaagctagtcttacaaaaccatcggtagttacacagcttgatcggtcgacggactccacaaatgacacggtacgaagtctttgcggcaaatcatcagcattcagatccaggtcaatcgaccagtcagcgattctgttgctagaacctctcccacgccttctattgctgaagaagggtaacgagcaccaaaaaatacaaatactcgcatgcggcatgcaatcatacctttcctactctagatgcattagtgcagtatttcatgcaaaacatgaaccattaacttgcaagcctacgtgggtatgttcaaagaacagttggggtagccagataaggatacccttttatgaccataagcatgtcaataaacttgaattgcgtcacaagtgtgtatacagctttaatactcacctgcttaagacatgcgcttatgcattctcgataagacatgtttggcaaaccgcagaaatgaattgacagcacatccagtgcatgcaacgattaattgtgcacatgcagaccttatgatccaaaaacccaaaacaggactatgatagatcagtgcagacacatctaaatccaaatactataatgggggttaacacctatagcatgtagatgcatggggcgatgcataaatcattggaatcttacttgtc

SEQ ID NO: 200818 - DNA, 3363 bp, Zea Mays
caaaaccttccgcatttttggttcagatcggcagccactccttcaccttcgaccatgtctacggcagcacaggcacgccgtcggcggccatgttcgacgagtgcgtggcgccgctggtcgacggcctcttccagggctacaacgctacggtgctggcatacggccagaccggatcagggaagacgtacaccatgggcactgcctgcaaggaggggtcgcatatcgggatcatcccacgagccatggctgcgctgtttgacaaaattgagaacctgaaaacccaagtggagttccagttacgagtatcgttcatcgagattctgaaagaagaggtgagggatctacttgaccccactgctggtaccgtgggcaaagcagagaatggcaatggccacgcaaaactgtctgtgccagggaaaccccctgtgcagatccgagaggcgtcgaatggagtcataacgctagctggatccactgaggtgcatgtcaccactcagaaggaaatggccgcatgcctcgaacaaggttccctcagtcgcgcaactggaagtaccaacatgaacaaccagtcaagatgcgcaaaatagaccccatcatgactgcagatggaatgcctattgaagagatgaatgaagactatctctgtgccaaactacacttagtagatcttgctggatcagaacgggctaagagaactggttcagatggcctgcgcttcaaggaaggtgttcacatcaaccgaggacttctcgctctcggcaatgtcataagtgctcttggagatgagaaaaaaagaaaagaaggtgctcacgttccttatcgggacagcaagctcacccgtcttttgcaggactccctaggtggaaatagtaagactgtcatgatagcttgcataagtccagcagatattaatgctgaagagacattaaacactttgaaatatgctaaccgggcacgtaatatccaaaacaagccgattgtcaatagaaatcctatcgctgatgagatgaaaagaatgcgccagcagattgaatacttgcaggcagagcttgtttcggctcgaggaggagccacatcagatgatgttcagggtctcagagagaggatttcatggcttgaacaaacgaatgaagacctctgcagggaactatatgatagtcgcaaccggtctcaaaatgatccatgtgaacctgaaatacaaaggactttaaacggctttaccaaaagcgaagggctcaaaagaagcttgcaaagtacagatccatttgatgttccaatggctgactcagtaagaggcaaccctaaggatattgaagatgaagtagctaaagaatgggaacacacaatgctgcaggatagcatgggcaaggagttgaatgaattaaatcgacaacttgagcgaaaagagtctgagatgaaaatgtatggatgtgatactgttgcacttaagcagcacttcggaaagaaacttatggagcttgaagaagagaaaaaagcagtacagcaagagagggatagattgttggctgaagttgaaagcctaagtgctgatggccaaacacataaactccgagatgcgcagctgcagaaactaaaatcccttgaagcccagattctagacctaaagaaaaagcacgagaaccaaattcagattttgaaggaaaagcagaagagtgatgaagctgctaagaaactgcaagaagaaattcattttataaaagcgcaaaaggttcaactacaacacaaaattaaacaggaagcagaacagttcaggcaatggaaagctacccgcgagaaggaacttcttcagttacgcaaggagggacggagaaatgagtatgaacgccacaagcttcaggcacttaatcagcggcagaaattggttttgcaaaggaagaccgaagaggctgctatggctacaaaaaggctgaaagagatattagaagctaggaaatcttccgcccgtgacagttccgctggcagcaatggtacatctcaaggctataatatgggtgagagatcgctgcaaaaatggtttgatcaagagcttgaagttatggtgcatgtgcatgaagtccgaaatgagtacgaaaaacaaagccaactgcgtgctgcgcttggtgaggagcttgccattttgaaacaagaagatatacgggctggtggatctagtccccaaagagggaagaatggaaactctaggacaaataccttgtcaccaaatgcaagacaagctaggatagcatcacttgagagcatggtgacaatctcttcaaacactcttgttgcaatggcttctcaactctcagaagctgaagaaagagagcgtgccttctctgggcgtagtcgttggaatcaattgcgatcaatgggggaggcaaagagcttactgcaatatgtctttaatgttgctgctgatgccagatgccaagtaaaggagaaggaagtggagatcaaggaaatgaaggaacaaatgacagagctggtgggcattcttcgacacagtgaatcacgcagaagagaaatggagaagcagctcaagcaaagagaacagacaactccaatggccactacacctccgaaaagtggaaatggcacgacgaagcactctgctgatgaccccaacacaccactgtcccctgtcgccgttcctgcacagaagcagctcaagtattctgctggaattgtaaatagccccagcaaaggagttgctgcgataaaaaaagagcaacttaagatggttccaattgcacagttgtctgcggggaagagagtttcaatagcagggcattcaggaaagctctggaggtggaaaagaagccatcaccagtggctgatgcagttcaagtggaagtggcagaagccgtggaagttgtctgaggtgatacgacacagtgatgaaacaatcacgaggattaggcccagacctccacttcttccacataaacctcataactgatgtgaaacggacttgtttttgtctcaacaagaactgacacggtttgcaaacctacacagctaactgcctgcacaagccttcactgacggtgacatgtcaatagttggtgttcgtcttcacaaaggaatctgtcaaaggaaggcgccttgtaaagtctttcttgtgctgttgtgtgatagttttgtgtgaagggtaactgaaagttgaatgggttttgtgctcgagtgatagtctattttcccctcttcttttgtttgttgatactaaaatgagaaaagacaagtgatattggtttggtttgctaggagtattgtgatgtaatgcagaaacttgttcccctatatcagtacacccttttaatctatgtattgtggagtactgattgctgactactgttgatgtcc

SEQ ID NO: 200819 - DNA, 3419 bp, Zea Mays
aaaaaaagtgtcggcagggcaaaaccttccgcatttttggttcagatcggcagccactccttcaccttcgaccatgtctacggcagcacaggcacgccgtcggcggccatgttcgacgagtgcgtggcgccgctggtcgacggcctcttccagggctacaacgctacggtgctggcatacggccagaccggatcagggaagacgtacaccatgggcactgcctgcaaggaggggtcgcatatcgggatcatcccacgagccatggctgcgctgtttgacaaaattgagaacctgaaaacccaagtggagttccagttacgagtatcgttcatcgagattctgaaagaagaggtgagggatctacttgaccccactgctggtaccgtgggcaaagcagagaatggcaatggccacgcaaaactgtctgtgccagggaaaccccctgtgcagatccgagaggcgtcgaatggagtcataacgctagctggatccactgaggtgcatgtcaccactcagaaggaaatggccgcatgcctcgaacaaggttccctcagtcgcgcaactggaagtaccaacatgaacaaccagtcaagtcgttcccatgccatcttcacaatcacattggagcagatgcgcaaaatagaccccatcatgactgcagatggaatgcctattgaagagatgaatgaagactatctctgtgccaaactacacttagtagatcttgctggatcagaacgggctaagagaactggttcagatggcctgcgcttcaaggaaggtgttcacatcaaccgaggacttctcgctctcggcaatgtcataagtgctcttggagatgagaaaaaaagaaaagaaggtgctcacgttccttatcgggacagcaagctcacccgtcttttgcaggactccctaggtggaaatagtaagactgtcatgatagcttgcataagtccagcagatattaatgctgaagagacattaaacactttgaaatatgctaaccgggcacgtaatatccaaaacaagccgattgtcaatagaaatcctatcgctgatgagatgaaaagaatgcgccagcagattgaatacttgcaggcagagcttgtttcggctcgaggaggagccacatcagatgatgttcagggtctcagagagaggatttcatggcttgaacaaacgaatgaagacctctgcagggaactatatgatagtcgcaaccggtctcaaaatgatccatgtgaacctgaaatacaaaggactttaaacggctttaccaaaagcgaagggctcaaaagaagcttgcaaagtacagatccatttgatgttccaatggctgactcagtaagaggcaaccctaaggatattgaagatgaagtagctaaagaatgggaacacacaatgctgcaggatagcatgggcaaggagttgaatgaattaaatcgacaacttgagcgaaaagagtctgagatgaaaatgtatggatgtgatactgttgcacttaagcagcacttcggaaagaaacttatggagcttgaagaagagaaaaaagcagtacagcaagagagggatagattgttggctgaagttgaaagcctaagtgctgatggccaaacacataaactccgagatgcgcagctgcagaaactaaaatcccttgaagcccagattctagacctaaagaaaaagcacgagaaccaaattcagattttgaaggaaaagcagaagagtgatgaagctgctaagaaactgcaagaagaaattcattttataaaagcgcaaaaggttcaactacaacacaaaattaaacaggaagcagaacagttcaggcaatggaaagctacccgcgagaaggaacttcttcagttacgcaaggagggacggagaaatgagtatgaacgccacaagcttcaggcacttaatcagcggcagaaattggttttgcaaaggaagaccgaagaggctgctatggctacaaaaaggctgaaagagatattagaagctaggaaatcttccgcccgtgacagttccgctggcagcaatggtacatctcaaggctataatatgggtgagagatcgctgcaaaaatggtttgatcaagagcttgaagttatggtgcatgtgcatgaagtccgaaatgagtacgaaaaacaaagccaactgcgtgctgcgcttggtgaggagcttgccattttgaaacaagaagatatacgggctggtggatctagtccccaaagagggaagaatggaaactctaggacaaataccttgtcaccaaatgcaagacaagctaggatagcatcacttgagagcatggtgacaatctcttcaaacactcttgttgcaatggcttctcaactctcagaagctgaagaaagagagcgtgccttctctgggcgtagtcgttggaatcaattgcgatcaatgggggaggcaaagagcttactgcaatatgtctttaatgttgctgctgatgccagatgccaagtaaaggagaaggaagtggagatcaaggaaatgaaggaacaaatgacagagctggtgggcattcttcgacacagtgaatcacgcagaagagaaatggagaagcagctcaagcaaagagaacagacaactccaatggccactacacctccgaaaagtggaaatggcacgacgaagcactctgctgatgaccccaacacaccactgtcccctgtcgccgttcctgcacagaagcagctcaagtattctgctggaattgtaaatagccccagcaaaggagttgctgcgataaaaaaagagcaacttaagatggttccaattgcacagttgtctgcggggaagagagtttcaatagcagggcattcaggaaagctctggaggtggaaaagaagccatcaccagtggctgatgcagttcaagtggaagtggcagaagccgtggaagttgtctgaggtgatacgacacagtgatgaaacaatcacgaggattaggcccagacctccacttcttccacataaacctcataactgatgtgaaacggacttgtttttgtctcaacaagaactgacacggtttgcaaacctacacagctaactgcctgcacaagccttcactgacggtgacatgtcaatagttggtgttcgtcttcacaaaggaatctgtcaaaggaaggcgccttgtaaagtctttcttgtgctgttgtgtgatagttttgtgtgaagggtaactgaaagttgaatgggttttgtgctcgagtgatagtctattttcccctcttcttttgtttgttgatactaaaatgagaaaagacaagtgatattggtttggtttgctaggagtattgtgatgtaatgcagaaacttgttcccctatatcagtacacccttttaatctatgtattgtggagtactgattgctgactactgttgatgtcc

SEQ ID NO: 200820 - DNA, 4488 bp, Zea Mays
accccccacacccacaggccatccttcaccagcacacactcatctcccacacctagcctagccttgctttgtcctcctccgtctcgctctcgctctccgtctccattcccacccaccaccaaacaccaggcccaaaggaccccccgccttcccaactaagagcaccagcgcagcggggagggggaatcagggcagcaagatccgagcagcaggagtggcaagcagcatttgtagccacagctcgctcactcaattgcagctagccgcggttgcggttggactggatcggcggcagggcagggcagggcagggcgcgcggcggtggtggtagttgcagaagtgacggtcaagttttcctcgctccttgcttcggccgagactccgcctgacgctactaccaacatctccacctgaatccatctctatctacctcgcacgaacgaacagagacaggggaggggagggggggaattgaagtgtaacccaaggaaaggaaccatgatggtgtggcaggcggaggaggaggattgatccatccgtcaacccatcagacccgtccatccatcggtggtggtggtggtggctgctgttactcgctatcaccatctgctgctgcctgctttagtcttttgcttcacttctcttctttctatccttcctccccctgtctgtttgtctgtcttattgccctccctgttcttgttgctgcttgcattgagaaaagagagagagagagacagagagagatagaaagtggttgctagttgtatggtcgtccggtgggcgcgatgaccatggagcacggcgaggattgctgcgtcaaggtggcggtccacgcgcgccccctcatcggcgacgagaagctgcagggctgtaaggactgcgtcgccgtcgtgccgggcaagccgcaggttcagatcggcagccactccttcaccttcgaccatgtctacggcagcacaggcacgccgtcggcggccatgttcgacgagtgcgtggcgccgctggtcgacggcctcttccagggctacaacgctacggtgctggcatacggccagaccggatcagggaagacgtacaccatgggcactgcctgcaaggaggggtcgcatatcgggatcatcccacgagccatggctgcgctgtttgacaaaattgagaacctgaaaacccaagtggagttccagttacgagtatcgttcatcgagattctgaaagaagaggtgagggatctacttgaccccactgctggtaccgtgggcaaagcagagaatggcaatggccacgcaaaactgtctgtgccagggaaaccccctgtgcagatccgagaggcgtcgaatggagtcataacgctagctggatccactgaggtgcatgtcaccactcagaaggaaatggccgcatgcctcgaacaaggttccctcagtcgcgcaactggaagtaccaacatgaacaaccagtcaagatgcgcaaaatagaccccatcatgactgcagatggaatgcctattgaagagatgaatgaagactatctctgtgccaaactacacttagtagatcttgctggatcagaacgggctaagagaactggttcagatggcctgcgcttcaaggaaggtgttcacatcaaccgaggacttctcgctctcggcaatgtcataagtgctcttggagatgagaaaaaaagaaaagaaggtgctcacgttccttatcgggacagcaagctcacccgtcttttgcaggactccctaggtggaaatagtaagactgtcatgatagcttgcataagtccagcagatattaatgctgaagagacattaaacactttgaaatatgctaaccgggcacgtaatatccaaaacaagccgattgtcaatagaaatcctatcgctgatgagatgaaaagaatgcgccagcagattgaatacttgcaggcagagcttgtttcggctcgaggaggagccacatcagatgatgttcagggtctcagagagaggatttcatggcttgaacaaacgaatgaagacctctgcagggaactatatgatagtcgcaaccggtctcaaaatgatccatgtgaacctgaaatacaaaggactttaaacggctttaccaaaagcgaagggctcaaaagaagcttgcaaagtacagatccatttgatgttccaatggctgactcagtaagaggcaaccctaaggatattgaagatgaagtagctaaagaatgggaacacacaatgctgcaggatagcatgggcaaggagttgaatgaattaaatcgacaacttgagcgaaaagagtctgagatgaaaatgtatggatgtgatactgttgcacttaagcagcacttcggaaagaaacttatggagcttgaagaagagaaaaaagcagtacagcaagagagggatagattgttggctgaagttgaaagcctaagtgctgatggccaaacacataaactccgagatgcgcagctgcagaaactaaaatcccttgaagcccagattctagacctaaagaaaaagcacgagaaccaaattcagattttgaaggaaaagcagaagagtgatgaagctgctaagaaactgcaagaagaaattcattttataaaagcgcaaaaggttcaactacaacacaaaattaaacaggaagcagaacagttcaggcaatggaaagctacccgcgagaaggaacttcttcagttacgcaaggagggacggagaaatgagtatgaacgccacaagcttcaggcacttaatcagcggcagaaattggttttgcaaaggaagaccgaagaggctgctatggctacaaaaaggctgaaagagatattagaagctaggaaatcttccgcccgtgacagttccgtgatacctaaagccattcttgatataacacagatgggtgagagatcgctgcaaaaatggtttgatcaagagcttgaagttatggtgcatgtgcatgaagtccgaaatgagtacgaaaaacaaagccaactgcgtgctgcgcttggtgaggagcttgccattttgaaacaagaagatatacgggctggtggatctagtccccaaagagggaagaatggaaactctaggacaaataccttgtcaccaaatgcaagacaagctaggatagcatcacttgagagcatggtgacaatctcttcaaacactcttgttgcaatggcttctcaactctcagaagctgaagaaagagagcgtgccttctctgggcgtagtcgttggaatcaattgcgatcaatgggggaggcaaagagcttactgcaatatgtctttaatgttgctgctgatgccagatgccaagtaaaggagaaggaagtggagatcaaggaaatgaaggaacaaatgacagagctggtgggcattcttcgacacagtgaatcacgcagaagagaaatggagaagcagctcaagcaaagagaacagacaactccaatggccactacacctccgaaaagtggaaatggcacgacgaagcactctgctgatgaccccaacacaccactgtcccctgtcgccgttcctgcacagaagcagctcaagtattctgctggaattgtaaatagccccagcaaaggagttgctgcgataaaaaaagagcaacttaagatggttccaattgcacagttgtctgcggggaagagagtttcaatagcagggcattcaggaaagctctggaggtggaaaagaagccatcaccagtggctgatgcagttcaagtggaagtggcagaagccgtggaagttgtctgaggtgatacgacacagtgatgaaacaatcacgaggattaggcccagacctccacttcttccacataaacctcataactgatgtgaaacggacttgtttttgtctcaacaagaactgacacggtttgcaaacctacacagctaactgcctgcacaaggtaacaatgcagttaatactccatgagatctccttcgtgcttgtttttacttggccacgggatcgacaagtatgtgttcatgggtgactcttgtctatggatagatgtaaattccctgtgggttggtataaagtgagatgtcaacgtagagaaagaaaatagttagtgggtgagtgagcagagtgaatgggcattctttcatgcaaatactgagcacaatgcttaatgtttcagccttcactgacggtgacatgtcaatagttggtgttcgtcttcacaaaggaatctgtcaaaggaaggcgccttgtaaagtctttcttgtgctgttgtgtgatagttttgtgtgaagggtaactgaaagttgaatgggttttgtgctcgagtgatagtctattttcccctcttcttttgtttgttgatactaaaatgagaaaagacaagtgatattggtttggtttgctaggagtattgtgatgtaatgcagaaacttgttcccctatatcagtacacccttttaatctatgtattgtggagtactgattgctgactactgttgatgtcc

SEQ ID NO: 200821 - DNA, 4379 bp, Zea Mays
caccccccacacccacaggccatccttcaccagcacacactcatctcccacacctagcctagccttgctttgtcctcctccgtctcgctctcgctctccgtctccattcccacccaccaccaaacaccaggcccaaaggaccccccgccttcccaactaagagcaccagcgcagcggggagggggaatcagggcagcaagatccgagcagcaggagtggcaagcagcatttgtagccacagctcgctcactcaattgcagctagccgcggttgcggttggactggatcggcggcagggcagggcagggcagggcgcgcggcggtggtggtagttgcagaagtgacggtcaagttttcctcgctccttgcttcggccgagactccgcctgacgctactaccaacatctccacctgaatccatctctatctacctcgcacgaacgaacagagacaggggaggggagggggggaattgaagtgtaacccaaggaaaggaaccatgatggtgtggcaggcggaggaggaggattgatccatccgtcaacccatcagacccgtccatccatcggtggtggtggtggtggctgctgttactcgctatcaccatctgctgctgcctgctttagtcttttgcttcacttctcttctttctatccttcctccccctgtctgtttgtctgtcttattgccctccctgttcttgttgctgcttgcattgagaaaagagagagagagagacagagagagatagaaagtggttgctagttgtatggtcgtccggtgggcgcgatgaccatggagcacggcgaggattgctgcgtcaaggtggcggtccacgcgcgccccctcatcggcgacgagaagctgcagggctgtaaggactgcgtcgccgtcgtgccgggcaagccgcagaccggatcagggaagacgtacaccatgggcactgcctgcaaggaggggtcgcatatcgggatcatcccacgagccatggctgcgctgtttgacaaaattgagaacctgaaaacccaagtggagttccagttacgagtatcgttcatcgagattctgaaagaagaggtgagggatctacttgaccccactgctggtaccgtgggcaaagcagagaatggcaatggccacgcaaaactgtctgtgccagggaaaccccctgtgcagatccgagaggcgtcgaatggagtcataacgctagctggatccactgaggtgcatgtcaccactcagaaggaaatggccgcatgcctcgaacaaggttccctcagtcgcgcaactggaagtaccaacatgaacaaccagtcaagtcgttcccatgccatcttcacaatcacattggagcagatgcgcaaaatagaccccatcatgactgcagatggaatgcctattgaagagatgaatgaagactatctctgtgccaaactacacttagtagatcttgctggatcagaacgggctaagagaactggttcagatggcctgcgcttcaaggaaggtgttcacatcaaccgaggacttctcgctctcggcaatgtcataagtgctcttggagatgagaaaaaaagaaaagaaggtgctcacgttccttatcgggacagcaagctcacccgtcttttgcaggactccctaggtggaaatagtaagactgtcatgatagcttgcataagtccagcagatattaatgctgaagagacattaaacactttgaaatatgctaaccgggcacgtaatatccaaaacaagccgattgtcaatagaaatcctatcgctgatgagatgaaaagaatgcgccagcagattgaatacttgcaggcagagcttgtttcggctcgaggaggagccacatcagatgatgttcagggtctcagagagaggatttcatggcttgaacaaacgaatgaagacctctgcagggaactatatgatagtcgcaaccggtctcaaaatgatccatgtgaacctgaaatacaaaggactttaaacggctttaccaaaagcgaagggctcaaaagaagcttgcaaagtacagatccatttgatgttccaatggctgactcagtaagaggcaaccctaaggatattgaagatgaagtagctaaagaatgggaacacacaatgctgcaggatagcatgggcaaggagttgaatgaattaaatcgacaacttgagcgaaaagagtctgagatgaaaatgtatggatgtgatactgttgcacttaagcagcacttcggaaagaaacttatggagcttgaagaagagaaaaaagcagtacagcaagagagggatagattgttggctgaagttgaaagcctaagtgctgatggccaaacacataaactccgagatgcgcagctgcagaaactaaaatcccttgaagcccagattctagacctaaagaaaaagcacgagaaccaaattcagattttgaaggaaaagcagaagagtgatgaagctgctaagaaactgcaagaagaaattcattttataaaagcgcaaaaggttcaactacaacacaaaattaaacaggaagcagaacagttcaggcaatggaaagctacccgcgagaaggaacttcttcagttacgcaaggagggacggagaaatgagtatgaacgccacaagcttcaggcacttaatcagcggcagaaattggttttgcaaaggaagaccgaagaggctgctatggctacaaaaaggctgaaagagatattagaagctaggaaatcttccgcccgtgacagttccgctggcagcaatggtacatctcaaggctataatatgggtgagagatcgctgcaaaaatggtttgatcaagagcttgaagttatggtgcatgtgcatgaagtccgaaatgagtacgaaaaacaaagccaactgcgtgctgcgcttggtgaggagcttgccattttgaaacaagaagatatacgggctggtggatctagtccccaaagagggaagaatggaaactctaggacaaataccttgtcaccaaatgcaagacaagctaggatagcatcacttgagagcatggtgacaatctcttcaaacactcttgttgcaatggcttctcaactctcagaagctgaagaaagagagcgtgccttctctgggcgtagtcgttggaatcaattgcgatcaatgggggaggcaaagagcttactgcaatatgtctttaatgttgctgctgatgccagatgccaagtaaaggagaaggaagtggagatcaaggaaatgaaggaacaaatgacagagctggtgggcattcttcgacacagtgaatcacgcagaagagaaatggagaagcagctcaagcaaagagaacagacaactccaatggccactacacctccgaaaagtggaaatggcacgacgaagcactctgctgatgaccccaacacaccactgtcccctgtcgccgttcctgcacagaagcagctcaagtattctgctggaattgtaaatagccccagcaaaggagttgctgcgataaaaaaagagcaacttaagatggttccaattgcacagttgtctgcggggaagagagtttcaatagcagggcattcaggaaagctctggaggtggaaaagaagccatcaccagtggctgatgcagttcaagtggaagtggcagaagccgtggaagttgtctgaggtgatacgacacagtgatgaaacaatcacgaggattaggcccagacctccacttcttccacataaacctcataactgatgtgaaacggacttgtttttgtctcaacaagaactgacacggtttgcaaacctacacagctaactgcctgcacaaggtaacaatgcagttaatactccatgagatctccttcgtgcttgtttttacttggccacgggatcgacaagtatgtgttcatgggtgactcttgtctatggatagatgtaaattccctgtgggttggtataaagtgagatgtcaacgtagagaaagaaaatagttagtgggtgagtgagcagagtgaatgggcattctttcatgcaaatactgagcacaatgcttaatgtttcagccttcactgacggtgacatgtcaatagttggtgttcgtcttcacaaaggaatctgtcaaaggaaggcgccttgtaaagtctttcttgtgctgttgtgtgatagttttgtgtgaagggtaactgaaagttgaatgggttttgtgctcgagtgatagtctattttcccctcttcttttgtttgttgatactaaaatgagaaaagacaagtgatattggtttggtttgctaggagtattgtgatgtaatgcagaaacttgttcccctatatcagtacacccttttaatctatgtattgtggagtactgattgctgactactgttgatgtcc

SEQ ID NO: 200822 - DNA, 4343 bp, Zea Mays
gcaccccccacacccacaggccatccttcaccagcacacactcatctcccacacctagcctagccttgctttgtcctcctccgtctcgctctcgctctccgtctccattcccacccaccaccaaacaccaggcccaaaggaccccccgccttcccaactaagagcaccagcgcagcggggagggggaatcagggcagcaagatccgagcagcaggagtggcaagcagcatttgtagccacagctcgctcactcaattgcagctagccgcggttgcggttggactggatcggcggcagggcagggcagggcagggcgcgcggcggtggtggtagttgcagaagtgacggtcaagttttcctcgctccttgcttcggccgagactccgcctgacgctactaccaacatctccacctgaatccatctctatctacctcgcacgaacgaacagagacaggggaggggagggggggaattgaagtgtaacccaaggaaaggaaccatgatggtgtggcaggcggaggaggaggattgatccatccgtcaacccatcagacccgtccatccatcggtggtggtggtggtggctgctgttactcgctatcaccatctgctgctgcctgctttagtcttttgcttcacttctcttctttctatccttcctccccctgtctgtttgtctgtcttattgccctccctgttcttgttgctgcttgcattgagaaaagagagagagagagacagagagagatagaaagtggttgctagttgtatggtcgtccggtgggcgcgatgaccatggagcacggcgaggattgctgcgtcaaggtggcggtccacgcgcgccccctcatcggcgacgagaagctgcagggctgtaaggactgcgtcgccgtcgtgccgggcaagccgcagaccggatcagggaagacgtacaccatgggcactgcctgcaaggaggggtcgcatatcgggatcatcccacgagccatggctgcgctgtttgacaaaattgagaacctgaaaacccaagtggagttccagttacgagtatcgttcatcgagattctgaaagaagaggtgagggatctacttgaccccactgctggtaccgtgggcaaagcagagaatggcaatggccacgcaaaactgtctgtgccagggaaaccccctgtgcagatccgagaggcgtcgaatggagtcataacgctagctggatccactgaggtgcatgtcaccactcagaaggaaatggccgcatgcctcgaacaaggttccctcagtcgcgcaactggaagtaccaacatgaacaaccagtcaagatgcgcaaaatagaccccatcatgactgcagatggaatgcctattgaagagatgaatgaagactatctctgtgccaaactacacttagtagatcttgctggatcagaacgggctaagagaactggttcagatggcctgcgcttcaaggaaggtgttcacatcaaccgaggacttctcgctctcggcaatgtcataagtgctcttggagatgagaaaaaaagaaaagaaggtgctcacgttccttatcgggacagcaagctcacccgtcttttgcaggactccctaggtggaaatagtaagactgtcatgatagcttgcataagtccagcagatattaatgctgaagagacattaaacactttgaaatatgctaaccgggcacgtaatatccaaaacaagccgattgtcaatagaaatcctatcgctgatgagatgaaaagaatgcgccagcagattgaatacttgcaggcagagcttgtttcggctcgaggaggagccacatcagatgatgttcagggtctcagagagaggatttcatggcttgaacaaacgaatgaagacctctgcagggaactatatgatagtcgcaaccggtctcaaaatgatccatgtgaacctgaaatacaaaggactttaaacggctttaccaaaagcgaagggctcaaaagaagcttgcaaagtacagatccatttgatgttccaatggctgactcagtaagaggcaaccctaaggatattgaagatgaagtagctaaagaatgggaacacacaatgctgcaggatagcatgggcaaggagttgaatgaattaaatcgacaacttgagcgaaaagagtctgagatgaaaatgtatggatgtgatactgttgcacttaagcagcacttcggaaagaaacttatggagcttgaagaagagaaaaaagcagtacagcaagagagggatagattgttggctgaagttgaaagcctaagtgctgatggccaaacacataaactccgagatgcgcagctgcagaaactaaaatcccttgaagcccagattctagacctaaagaaaaagcacgagaaccaaattcagattttgaaggaaaagcagaagagtgatgaagctgctaagaaactgcaagaagaaattcattttataaaagcgcaaaaggttcaactacaacacaaaattaaacaggaagcagaacagttcaggcaatggaaagctacccgcgagaaggaacttcttcagttacgcaaggagggacggagaaatgagtatgaacgccacaagcttcaggcacttaatcagcggcagaaattggttttgcaaaggaagaccgaagaggctgctatggctacaaaaaggctgaaagagatattagaagctaggaaatcttccgcccgtgacagttccgtgatacctaaagccattcttgatataacacagatgggtgagagatcgctgcaaaaatggtttgatcaagagcttgaagttatggtgcatgtgcatgaagtccgaaatgagtacgaaaaacaaagccaactgcgtgctgcgcttggtgaggagcttgccattttgaaacaagaagatatacgggctggtggatctagtccccaaagagggaagaatggaaactctaggacaaataccttgtcaccaaatgcaagacaagctaggatagcatcacttgagagcatggtgacaatctcttcaaacactcttgttgcaatggcttctcaactctcagaagctgaagaaagagagcgtgccttctctgggcgtagtcgttggaatcaattgcgatcaatgggggaggcaaagagcttactgcaatatgtctttaatgttgctgctgatgccagatgccaagtaaaggagaaggaagtggagatcaaggaaatgaaggaacaaatgacagagctggtgggcattcttcgacacagtgaatcacgcagaagagaaatggagaagcagctcaagcaaagagaacagacaactccaatggccactacacctccgaaaagtggaaatggcacgacgaagcactctgctgatgaccccaacacaccactgtcccctgtcgccgttcctgcacagaagcagctcaagtattctgctggaattgtaaatagccccagcaaaggagttgctgcgataaaaaaagagcaacttaagatggttccaattgcacagttgtctgcggggaagagagtttcaatagcagggcattcaggaaagctctggaggtggaaaagaagccatcaccagtggctgatgcagttcaagtggaagtggcagaagccgtggaagttgtctgaggtgatacgacacagtgatgaaacaatcacgaggattaggcccagacctccacttcttccacataaacctcataactgatgtgaaacggacttgtttttgtctcaacaagaactgacacggtttgcaaacctacacagctaactgcctgcacaaggtaacaatgcagttaatactccatgagatctccttcgtgcttgtttttacttggccacgggatcgacaagtatgtgttcatgggtgactcttgtctatggatagatgtaaattccctgtgggttggtataaagtgagatgtcaacgtagagaaagaaaatagttagtgggtgagtgagcagagtgaatgggcattctttcatgcaaatactgagcacaatgcttaatgtttcagccttcactgacggtgacatgtcaatagttggtgttcgtcttcacaaaggaatctgtcaaaggaaggcgccttgtaaagtctttcttgtgctgttgtgtgatagttttgtgtgaagggtaactgaaagttgaatgggttttgtgctcgagtgatagtctattttcccctcttcttttgtttgttgatactaaaatgagaaaagacaagtgatattggtttggtttgctaggagtattgtgatgtaatgcagaaacttgttcccctatatcagtacacccttttaatctatgtattgtggagtactgattgctgactactgttgatgtcc

SEQ ID NO: 200823 - DNA, 4486 bp, Zea Mays
aggggcaccccccacacccacaggccatccttcaccagcacacactcatctcccacacctagcctagccttgctttgtcctcctccgtctcgctctcgctctccgtctccattcccacccaccaccaaacaccaggcccaaaggaccccccgccttcccaactaagagcaccagcgcagcggggagggggaatcagggcagcaagatccgagcagcaggagtggcaagcagcatttgtagccacagctcgctcactcaattgcagctagccgcggttgcggttggactggatcggcggcagggcagggcagggcagggcgcgcggcggtggtggtagttgcagaagtgacggtcaagttttcctcgctccttgcttcggccgagactccgcctgacgctactaccaacatctccacctgaatccatctctatctacctcgcacgaacgaacagagacaggggaggggagggggggaattgaagtgtaacccaaggaaaggaaccatgatggtgtggcaggcggaggaggaggattgatccatccgtcaacccatcagacccgtccatccatcggtggtggtggtggtggctgctgttactcgctatcaccatctgctgctgcctgctttagtcttttgcttcacttctcttctttctatccttcctccccctgtctgtttgtctgtcttattgccctccctgttcttgttgctgcttgcattgagaaaagagagagagagagacagagagagatagaaagtggttgctagttgtatggtcgtccggtgggcgcgatgaccatggagcacggcgaggattgctgcgtcaaggtggcggtccacgcgcgccccctcatcggcgacgagaagctgcagggctgtaaggactgcgtcgccgtcgtgccgggcaagccgcaggttcagatcggcagccactccttcaccttcgaccatgtctacggcagcacaggcacgccgtcggcggccatgttcgacgagtgcgtggcgccgctggtcgacggcctcttccagggctacaacgctacggtgctggcatacggccagaccggatcagggaagacgtacaccatgggcactgcctgcaaggaggggtcgcatatcgggatcatcccacgagccatggctgcgctgtttgacaaaattgagaacctgaaaacccaagtggagttccagttacgagtatcgttcatcgagattctgaaagaagaggtgagggatctacttgaccccactgctggtaccgtgggcaaagcagagaatggcaatggccacgcaaaactgtctgtgccagggaaaccccctgtgcagatccgagaggcgtcgaatggagtcataacgctagctggatccactgaggtgcatgtcaccactcagaaggaaatggccgcatgcctcgaacaaggttccctcagtcgcgcaactggaagtaccaacatgaacaaccagtcaagatgcgcaaaatagaccccatcatgactgcagatggaatgcctattgaagagatgaatgaagactatctctgtgccaaactacacttagtagatcttgctggatcagaacgggctaagagaactggttcagatggcctgcgcttcaaggaaggtgttcacatcaaccgaggacttctcgctctcggcaatgtcataagtgctcttggagatgagaaaaaaagaaaagaaggtgctcacgttccttatcgggacagcaagctcacccgtcttttgcaggactccctaggtggaaatagtaagactgtcatgatagcttgcataagtccagcagatattaatgctgaagagacattaaacactttgaaatatgctaaccgggcacgtaatatccaaaacaagccgattaaatcctatcgctgatgagatgaaaagaatgcgccagcagattgaatacttgcaggcagagcttgtttcggctcgaggaggagccacatcagatgatgttcagggtctcagagagaggatttcatggcttgaacaaacgaatgaagacctctgcagggaactatatgatagtcgcaaccggtctcaaaatgatccatgtgaacctgaaatacaaaggactttaaacggctttaccaaaagcgaagggctcaaaagaagcttgcaaagtacagatccatttgatgttccaatggctgactcagtaagaggcaaccctaaggatattgaagatgaagtagctaaagaatgggaacacacaatgctgcaggatagcatgggcaaggagttgaatgaattaaatcgacaacttgagcgaaaagagtctgagatgaaaatgtatggatgtgatactgttgcacttaagcagcacttcggaaagaaacttatggagcttgaagaagagaaaaaagcagtacagcaagagagggatagattgttggctgaagttgaaagcctaagtgctgatggccaaacacataaactccgagatgcgcagctgcagaaactaaaatcccttgaagcccagattctagacctaaagaaaaagcacgagaaccaaattcagattttgaaggaaaagcagaagagtgatgaagctgctaagaaactgcaagaagaaattcattttataaaagcgcaaaaggttcaactacaacacaaaattaaacaggaagcagaacagttcaggcaatggaaagctacccgcgagaaggaacttcttcagttacgcaaggagggacggagaaatgagtatgaacgccacaagcttcaggcacttaatcagcggcagaaattggttttgcaaaggaagaccgaagaggctgctatggctacaaaaaggctgaaagagatattagaagctaggaaatcttccgcccgtgacagttccgctggcagcaatggtacatctcaaggctataatatgggtgagagatcgctgcaaaaatggtttgatcaagagcttgaagttatggtgcatgtgcatgaagtccgaaatgagtacgaaaaacaaagccaactgcgtgctgcgcttggtgaggagcttgccattttgaaacaagaagatatacgggctggtggatctagtccccaaagagggaagaatggaaactctaggacaaataccttgtcaccaaatgcaagacaagctaggatagcatcacttgagagcatggtgacaatctcttcaaacactcttgttgcaatggcttctcaactctcagaagctgaagaaagagagcgtgccttctctgggcgtagtcgttggaatcaattgcgatcaatgggggaggcaaagagcttactgcaatatgtctttaatgttgctgctgatgccagatgccaagtaaaggagaaggaagtggagatcaaggaaatgaaggaacaaatgacagagctggtgggcattcttcgacacagtgaatcacgcagaagagaaatggagaagcagctcaagcaaagagaacagacaactccaatggccactacacctccgaaaagtggaaatggcacgacgaagcactctgctgatgaccccaacacaccactgtcccctgtcgccgttcctgcacagaagcagctcaagtattctgctggaattgtaaatagccccagcaaaggagttgctgcgataaaaaaagagcaacttaagatggttccaattgcacagttgtctgcggggaagagagtttcaatagcagggcattcaggaaagctctggaggtggaaaagaagccatcaccagtggctgatgcagttcaagtggaagtggcagaagccgtggaagttgtctgaggtgatacgacacagtgatgaaacaatcacgaggattaggcccagacctccacttcttccacataaacctcataactgatgtgaaacggacttgtttttgtctcaacaagaactgacacggtttgcaaacctacacagctaactgcctgcacaaggtaacaatgcagttaatactccatgagatctccttcgtgcttgtttttacttggccacgggatcgacaagtatgtgttcatgggtgactcttgtctatggatagatgtaaattccctgtgggttggtataaagtgagatgtcaacgtagagaaagaaaatagttagtgggtgagtgagcagagtgaatgggcattctttcatgcaaatactgagcacaatgcttaatgtttcagccttcactgacggtgacatgtcaatagttggtgttcgtcttcacaaaggaatctgtcaaaggaaggcgccttgtaaagtctttcttgtgctgttgtgtgatagttttgtgtgaagggtaactgaaagttgaatgggttttgtgctcgagtgatagtctattttcccctcttcttttgtttgttgatactaaaatgagaaaagacaagtgatattggtttggtttgctaggagtattgtgatgtaatgcagaaacttgttcccctatatcagtacacccttttaatctatgtattgtggagtactgattgctgactactgttgatgtcc

SEQ ID NO: 200824 - DNA, 4485 bp, Zea Mays
agccaagagagcggcaggccgcaggggcaccccccacacccacaggccatccttcaccagcacacactcatctcccacacctagcctagccttgctttgtcctcctccgtctcgctctcgctctccgtctccattcccacccaccaccaaacaccaggcccaaaggaccccccgccttcccaactaagagcaccagcgcagcggggagggggaatcagggcagcaagatccgagcagcaggagtggcaagcagcatttgtagccacagctcgctcactcaattgcagctagccgcggttgcggttggactggatcggcggcagggcagggcagggcagggcgcgcggcggtggtggtagttgcagaagtgacggtcaagttttcctcgctccttgcttcggccgagactccgcctgacgctactaccaacatctccacctgaatccatctctatctacctcgcacgaacgaacagagacaggggaggggagggggggaattgaagtgtaacccaaggaaaggaaccatgatggtgtggcaggcggaggaggaggattgatccatccgtcaacccatcagacccgtccatccatcggtggtggtggtggtggctgctgttactcgctatcaccatctgctgctgcctgctttagtcttttgcttcacttctcttctttctatccttcctccccctgtctgtttgtctgtcttattgccctccctgttcttgttgctgcttgcattgagaaaagagagagagagagacagagagagatagaaagtggttgctagttgtatggtcgtccggtgggcgcgatgaccatggagcacggcgaggattgctgcgtcaaggtggcggtccacgcgcgccccctcatcggcgacgagaagctgcagggctgtaaggactgcgtcgccgtcgtgccgggcaagccgcaggttcagatcggcagccactccttcaccttcgaccatgtctacggcagcacaggcacgccgtcggcggccatgttcgacgagtgcgtggcgccgctggtcgacggcctcttccagggctacaacgctacggtgctggcatacggccagaccggatcagggaagacgtacaccatgggcactgcctgcaaggaggggtcgcatatcgggatcatcccacgagccatggctgcgctgtttgacaaaattgagaacctgaaaacccaagtggagttccagttacgagtatcgttcatcgagattctgaaagaagaggtgagggatctacttgaccccactgctggtaccgtgggcaaagcagagaatggcaatggccacgcaaaactgtctgtgccagggaaaccccctgtgcagatccgagaggcgtcgaatggagtcataacgctagctggatccactgaggtgcatgtcaccactcagaaggaaatggccgcatgcctcgaacaaggttccctcagtcgcgcaactggaagtaccaacatgaacaaccagtcaagatggaatgcctattgaagagatgaatgaagactatctctgtgccaaactacacttagtagatcttgctggatcagaacgggctaagagaactggttcagatggcctgcgcttcaaggaaggtgttcacatcaaccgaggacttctcgctctcggcaatgtcataagtgctcttggagatgagaaaaaaagaaaagaaggtgctcacgttccttatcgggacagcaagctcacccgtcttttgcaggactccctaggtggaaatagtaagactgtcatgatagcttgcataagtccagcagatattaatgctgaagagacattaaacactttgaaatatgctaaccgggcacgtaatatccaaaacaagccgattgtcaatagaaatcctatcgctgatgagatgaaaagaatgcgccagcagattgaatacttgcaggcagagcttgtttcggctcgaggaggagccacatcagatgatgttcagggtctcagagagaggatttcatggcttgaacaaacgaatgaagacctctgcagggaactatatgatagtcgcaaccggtctcaaaatgatccatgtgaacctgaaatacaaaggactttaaacggctttaccaaaagcgaagggctcaaaagaagcttgcaaagtacagatccatttgatgttccaatggctgactcagtaagaggcaaccctaaggatattgaagatgaagtagctaaagaatgggaacacacaatgctgcaggatagcatgggcaaggagttgaatgaattaaatcgacaacttgagcgaaaagagtctgagatgaaaatgtatggatgtgatactgttgcacttaagcagcacttcggaaagaaacttatggagcttgaagaagagaaaaaagcagtacagcaagagagggatagattgttggctgaagttgaaagcctaagtgctgatggccaaacacataaactccgagatgcgcagctgcagaaactaaaatcccttgaagcccagattctagacctaaagaaaaagcacgagaaccaaattcagattttgaaggaaaagcagaagagtgatgaagctgctaagaaactgcaagaagaaattcattttataaaagcgcaaaaggttcaactacaacacaaaattaaacaggaagcagaacagttcaggcaatggaaagctacccgcgagaaggaacttcttcagttacgcaaggagggacggagaaatgagtatgaacgccacaagcttcaggcacttaatcagcggcagaaattggttttgcaaaggaagaccgaagaggctgctatggctacaaaaaggctgaaagagatattagaagctaggaaatcttccgcccgtgacagttccgctggcagcaatggtacatctcaaggctataatatgggtgagagatcgctgcaaaaatggtttgatcaagagcttgaagttatggtgcatgtgcatgaagtccgaaatgagtacgaaaaacaaagccaactgcgtgctgcgcttggtgaggagcttgccattttgaaacaagaagatatacgggctggtggatctagtccccaaagagggaagaatggaaactctaggacaaataccttgtcaccaaatgcaagacaagctaggatagcatcacttgagagcatggtgacaatctcttcaaacactcttgttgcaatggcttctcaactctcagaagctgaagaaagagagcgtgccttctctgggcgtagtcgttggaatcaattgcgatcaatgggggaggcaaagagcttactgcaatatgtctttaatgttgctgctgatgccagatgccaagtaaaggagaaggaagtggagatcaaggaaatgaaggaacaaatgacagagctggtgggcattcttcgacacagtgaatcacgcagaagagaaatggagaagcagctcaagcaaagagaacagacaactccaatggccactacacctccgaaaagtggaaatggcacgacgaagcactctgctgatgaccccaacacaccactgtcccctgtcgccgttcctgcacagaagcagctcaagtattctgctggaattgtaaatagccccagcaaaggagttgctgcgataaaaaaagagcaacttaagatggttccaattgcacagttgtctgcggggaagagagtttcaatagcagggcattcaggaaagctctggaggtggaaaagaagccatcaccagtggctgatgcagttcaagtggaagtggcagaagccgtggaagttgtctgaggtgatacgacacagtgatgaaacaatcacgaggattaggcccagacctccacttcttccacataaacctcataactgatgtgaaacggacttgtttttgtctcaacaagaactgacacggtttgcaaacctacacagctaactgcctgcacaaggtaacaatgcagttaatactccatgagatctccttcgtgcttgtttttacttggccacgggatcgacaagtatgtgttcatgggtgactcttgtctatggatagatgtaaattccctgtgggttggtataaagtgagatgtcaacgtagagaaagaaaatagttagtgggtgagtgagcagagtgaatgggcattctttcatgcaaatactgagcacaatgcttaatgtttcagccttcactgacggtgacatgtcaatagttggtgttcgtcttcacaaaggaatctgtcaaaggaaggcgccttgtaaagtctttcttgtgctgttgtgtgatagttttgtgtgaagggtaactgaaagttgaatgggttttgtgctcgagtgatagtctattttcccctcttcttttgtttgttgatactaaaatgagaaaagacaagtgatattggtttggtttgctaggagtattgtgatgtaatgcagaaacttgttcccctatatcagtacacccttttaatctatgtattgtggagtactgattgctgactactgttgatgtcc

SEQ ID NO: 200825 - DNA, 4677 bp, Zea Mays
cactcactcaccttcgccgggaaaaaaaggaggaaaggaaataaaatactccaagccaagagagcggcaggccgcaggggcaccccccacacccacaggccatccttcaccagcacacactcatctcccacacctagcctagccttgctttgtcctcctccgtctcgctctcgctctccgtctccattcccacccaccaccaaacaccaggcccaaaggaccccccgccttcccaactaagagcaccagcgcagcggggagggggaatcagggcagcaagatccgagcagcaggagtggcaagcagcatttgtagccacagctcgctcactcaattgcagctagccgcggttgcggttggactggatcggcggcagggcagggcagggcagggcgcgcggcggtggtggtagttgcagaagtgacggtcaagttttcctcgctccttgcttcggccgagactccgcctgacgctactaccaacatctccacctgaatccatctctatctacctcgcacgaacgaacagagacaggggaggggagggggggaattgaagtgtaacccaaggaaaggaaccatgatggtgtggcaggcggaggaggaggattgatccatccgtcaacccatcagacccgtccatccatcggtggtggtggtggtggctgctgttactcgctatcaccatctgctgctgcctgctttagtcttttgcttcacttctcttctttctatccttcctccccctgtctgtttgtctgtcttattgccctccctgttcttgttgctgcttgcattgagaaaagagagagagagagacagagagagatagaaagtggttgctagttgtatggtcgtccggtgggcgcgatgaccatggagcacggcgaggattgctgcgtcaaggtggcggtccacgcgcgccccctcatcggcgacgagaagctgcagggctgtaaggactgcgtcgccgtcgtgccgggcaagccgcaggttcagatcggcagccactccttcaccttcgaccatgtctacggcagcacaggcacgccgtcggcggccatgttcgacgagtgcgtggcgccgctggtcgacggcctcttccagggctacaacgctacggtgctggcatacggccaggttggcatcctgctgcttcctctatcctcttcgtcggccaccaccacgcatgcctgctctcctcggtcgggaccggatcagggaagacgtacaccatgggcactgcctgcaaggaggggtcgcatatcgggatcatcccacgagccatggctgcgctgtttgacaaaattgagaacctgaaaacccaagtggagttccagttacgagtatcgttcatcgagattctgaaagaagaggtgagggatctacttgaccccactgctggtaccgtgggcaaagcagagaatggcaatggccacgcaaaactgtctgtgccagggaaaccccctgtgcagatccgagaggcgtcgaatggagtcataacgctagctggatccactgaggtgcatgtcaccactcagaaggaaatggccgcatgcctcgaacaaggttccctcagtcgcgcaactggaagtaccaacatgaacaaccagtcaagtcgttcccatgccatcttcacaatcacattggagcagatgcgcaaaatagaccccatcatgactgcagatggaatgcctattgaagagatgaatgaagactatctctgtgccaaactacacttagtagatcttgctggatcagaacgggctaagagaactggttcagatggcctgcgcttcaaggaaggtgttcacatcaaccgaggacttctcgctctcggcaatgtcataagtgctcttggagatgagaaaaaaagaaaagaaggtgctcacgttccttatcgggacagcaagctcacccgtcttttgcaggactccctaggtggaaatagtaagactgtcatgatagcttgcataagtccagcagatattaatgctgaagagacattaaacactttgaaatatgctaaccgggcacgtaatatccaaaacaagccgattgtcaatagaaatcctatcgctgatgagatgaaaagaatgcgccagcagattgaatacttgcaggcagagcttgtttcggctcgaggaggagccacatcagatgatgttcagggtctcagagagaggatttcatggcttgaacaaacgaatgaagacctctgcagggaactatatgatagtcgcaaccggtctcaaaatgatccatgtgaacctgaaatacaaaggactttaaacggctttaccaaaagcgaagggctcaaaagaagcttgcaaagtacagatccatttgatgttccaatggctgactcagtaagaggcaaccctaaggatattgaagatgaagtagctaaagaatgggaacacacaatgctgcaggatagcatgggcaaggagttgaatgaattaaatcgacaacttgagcgaaaagagtctgagatgaaaatgtatggatgtgatactgttgcacttaagcagcacttcggaaagaaacttatggagcttgaagaagagaaaaaagcagtacagcaagagagggatagattgttggctgaagttgaaagcctaagtgctgatggccaaacacataaactccgagatgcgcagctgcagaaactaaaatcccttgaagcccagattctagacctaaagaaaaagcacgagaaccaaattcagattttgaaggaaaagcagaagagtgatgaagctgctaagaaactgcaagaagaaattcattttataaaagcgcaaaaggttcaactacaacacaaaattaaacaggaagcagaacagttcaggcaatggaaagctacccgcgagaaggaacttcttcagttacgcaaggagggacggagaaatgagtatgaacgccacaagcttcaggcacttaatcagcggcagaaattggttttgcaaaggaagaccgaagaggctgctatggctacaaaaaggctgaaagagatattagaagctaggaaatcttccgcccgtgacagttccgctggcagcaatggtacatctcaaggctataatatgggtgagagatcgctgcaaaaatggtttgatcaagagcttgaagttatggtgcatgtgcatgaagtccgaaatgagtacgaaaaacaaagccaactgcgtgctgcgcttggtgaggagcttgccattttgaaacaagaagatatacgggctggtggatctagtccccaaagagggaagaatggaaactctaggacaaataccttgtcaccaaatgcaagacaagctaggatagcatcacttgagagcatggtgacaatctcttcaaacactcttgttgcaatggcttctcaactctcagaagctgaagaaagagagcgtgccttctctgggcgtagtcgttggaatcaattgcgatcaatgggggaggcaaagagcttactgcaatatgtctttaatgttgctgctgatgccagatgccaagtaaaggagaaggaagtggagatcaaggaaatgaaggaacaaatgacagagctggtgggcattcttcgacacagtgaatcacgcagaagagaaatggagaagcagctcaagcaaagagaacagacaactccaatggccactacacctccgaaaagtggaaatggcacgacgaagcactctgctgatgaccccaacacaccactgtcccctgtcgccgttcctgcacagaagcagctcaagtattctgctggaattgtaaatagccccagcaaaggagttgctgcgataaaaaaagagcaacttaagatggttccaattgcacagttgtctgcggggaagagagtttcaatagcagggcattcaggaaagctctggaggtggaaaagaagccatcaccagtggctgatgcagttcaagtggaagtggcagaagccgtggaagttgtctgaggtgatacgacacagtgatgaaacaatcacgaggattaggcccagacctccacttcttccacataaacctcataactgatgtgaaacggacttgtttttgtctcaacaagaactgacacggtttgcaaacctacacagctaactgcctgcacaaggtaacaatgcagttaatactccatgagatctccttcgtgcttgtttttacttggccacgggatcgacaagtatgtgttcatgggtgactcttgtctatggatagatgtaaattccctgtgggttggtataaagtgagatgtcaacgtagagaaagaaaatagttagtgggtgagtgagcagagtgaatgggcattctttcatgcaaatactgagcacaatgcttaatgtttcagccttcactgacggtgacatgtcaatagttggtgttcgtcttcacaaaggaatctgtcaaaggaaggcgccttgtaaagtctttcttgtgctgttgtgtgatagttttgtgtgaagggtaactgaaagttgaatgggttttgtgctcgagtgatagtctattttcccctcttcttttgtttgttgatactaaaatgagaaaagacaagtgatattggtttggtttgctaggagtattgtgatgtaatgcagaaacttgttcccctatatcagtacacccttttaatctatgtattgtggagtactgattgctgactactgttgatgtcc

SEQ ID NO: 200826 - DNA, 4608 bp, Zea Mays
ctcactcactcaccttcgccgggaaaaaaaggaggaaaggaaataaaatactccaagccaagagagcggcaggccgcaggggcaccccccacacccacaggccatccttcaccagcacacactcatctcccacacctagcctagccttgctttgtcctcctccgtctcgctctcgctctccgtctccattcccacccaccaccaaacaccaggcccaaaggaccccccgccttcccaactaagagcaccagcgcagcggggagggggaatcagggcagcaagatccgagcagcaggagtggcaagcagcatttgtagccacagctcgctcactcaattgcagctagccgcggttgcggttggactggatcggcggcagggcagggcagggcagggcgcgcggcggtggtggtagttgcagaagtgacggtcaagttttcctcgctccttgcttcggccgagactccgcctgacgctactaccaacatctccacctgaatccatctctatctacctcgcacgaacgaacagagacaggggaggggagggggggaattgaagtgtaacccaaggaaaggaaccatgatggtgtggcaggcggaggaggaggattgatccatccgtcaacccatcagacccgtccatccatcggtggtggtggtggtggctgctgttactcgctatcaccatctgctgctgcctgctttagtcttttgcttcacttctcttctttctatccttcctccccctgtctgtttgtctgtcttattgccctccctgttcttgttgctgcttgcattgagaaaagagagagagagagacagagagagatagaaagtggttgctagttgtatggtcgtccggtgggcgcgatgaccatggagcacggcgaggattgctgcgtcaaggtggcggtccacgcgcgccccctcatcggcgacgagaagctgcagggctgtaaggactgcgtcgccgtcgtgccgggcaagccgcaggttcagatcggcagccactccttcaccttcgaccatgtctacggcagcacaggcacgccgtcggcggccatgttcgacgagtgcgtggcgccgctggtcgacggcctcttccagggctacaacgctacggtgctggcatacggccagaccggatcagggaagacgtacaccatgggcactgcctgcaaggaggggtcgcatatcgggatcatcccacgagccatggctgcgctgtttgacaaaattgagaacctgaaaacccaagtggagttccagttacgagtatcgttcatcgagattctgaaagaagaggtgagggatctacttgaccccactgctggtaccgtgggcaaagcagagaatggcaatggccacgcaaaactgtctgtgccagggaaaccccctgtgcagatccgagaggcgtcgaatggagtcataacgctagctggatccactgaggtgcatgtcaccactcagaaggaaatggccgcatgcctcgaacaaggttccctcagtcgcgcaactggaagtaccaacatgaacaaccagtcaagtcgttcccatgccatcttcacaatcacattggagcagatgcgcaaaatagaccccatcatgactgcagatggaatgcctattgaagagatgaatgaagactatctctgtgccaaactacacttagtagatcttgctggatcagaacgggctaagagaactggttcagatggcctgcgcttcaaggaaggtgttcacatcaaccgaggacttctcgctctcggcaatgtcataagtgctcttggagatgagaaaaaaagaaaagaaggtgctcacgttccttatcgggacagcaagctcacccgtcttttgcaggactccctaggtggaaatagtaagactgtcatgatagcttgcataagtccagcagatattaatgctgaagagacattaaacactttgaaatatgctaaccgggcacgtaatatccaaaacaagccgattgtcaatagaaatcctatcgctgatgagatgaaaagaatgcgccagcagattgaatacttgcaggcagagcttgtttcggctcgaggaggagccacatcagatgatgttcagggtctcagagagaggatttcatggcttgaacaaacgaatgaagacctctgcagggaactatatgatagtcgcaaccggtctcaaaatgatccatgtgaacctgaaatacaaaggactttaaacggctttaccaaaagcgaagggctcaaaagaagcttgcaaagtacagatccatttgatgttccaatggctgactcagtaagaggcaaccctaaggatattgaagatgaagtagctaaagaatgggaacacacaatgctgcaggatagcatgggcaaggagttgaatgaattaaatcgacaacttgagcgaaaagagtctgagatgaaaatgtatggatgtgatactgttgcacttaagcagcacttcggaaagaaacttatggagcttgaagaagagaaaaaagcagtacagcaagagagggatagattgttggctgaagttgaaagcctaagtgctgatggccaaacacataaactccgagatgcgcagctgcagaaactaaaatcccttgaagcccagattctagacctaaagaaaaagcacgagaaccaaattcagattttgaaggaaaagcagaagagtgatgaagctgctaagaaactgcaagaagaaattcattttataaaagcgcaaaaggttcaactacaacacaaaattaaacaggaagcagaacagttcaggcaatggaaagctacccgcgagaaggaacttcttcagttacgcaaggagggacggagaaatgagtatgaacgccacaagcttcaggcacttaatcagcggcagaaattggttttgcaaaggaagaccgaagaggctgctatggctacaaaaaggctgaaagagatattagaagctaggaaatcttccgcccgtgacagttccgctggcagcaatggtacatctcaaggctataatatgggtgagagatcgctgcaaaaatggtttgatcaagagcttgaagttatggtgcatgtgcatgaagtccgaaatgagtacgaaaaacaaagccaactgcgtgctgcgcttggtgaggagcttgccattttgaaacaagaagatatacgggctggtggatctagtccccaaagagggaagaatggaaactctaggacaaataccttgtcaccaaatgcaagacaagctaggatagcatcacttgagagcatggtgacaatctcttcaaacactcttgttgcaatggcttctcaactctcagaagctgaagaaagagagcgtgccttctctgggcgtagtcgttggaatcaattgcgatcaatgggggaggcaaagagcttactgcaatatgtctttaatgttgctgctgatgccagatgccaagtaaaggagaaggaagtggagatcaaggaaatgaaggaacaaatgacagagctggtgggcattcttcgacacagtgaatcacgcagaagagaaatggagaagcagctcaagcaaagagaacagacaactccaatggccactacacctccgaaaagtggaaatggcacgacgaagcactctgctgatgaccccaacacaccactgtcccctgtcgccgttcctgcacagaagcagctcaagtattctgctggaattgtaaatagccccagcaaaggagttgctgcgataaaaaaagagcaacttaagatggttccaattgcacagttgtctgcggggaagagagtttcaatagcagggcattcaggaaagctctggaggtggaaaagaagccatcaccagtggctgatgcagttcaagtggaagtggcagaagccgtggaagttgtctgaggtgatacgacacagtgatgaaacaatcacgaggattaggcccagacctccacttcttccacataaacctcataactgatgtgaaacggacttgtttttgtctcaacaagaactgacacggtttgcaaacctacacagctaactgcctgcacaaggtaacaatgcagttaatactccatgagatctccttcgtgcttgtttttacttggccacgggatcgacaagtatgtgttcatgggtgactcttgtctatggatagatgtaaattccctgtgggttggtataaagtgagatgtcaacgtagagaaagaaaatagttagtgggtgagtgagcagagtgaatgggcattctttcatgcaaatactgagcacaatgcttaatgtttcagccttcactgacggtgacatgtcaatagttggtgttcgtcttcacaaaggaatctgtcaaaggaaggcgccttgtaaagtctttcttgtgctgttgtgtgatagttttgtgtgaagggtaactgaaagttgaatgggttttgtgctcgagtgatagtctattttcccctcttcttttgtttgttgatactaaaatgagaaaagacaagtgatattggtttggtttgctaggagtattgtgatgtaatgcagaaacttgttcccctatatcagtacacccttttaatctatgtattgtggagtactgattgctgactactgttgatgtcc

SEQ ID NO: 200827 - DNA, 4374 bp, Zea Mays
ctcactcactcaccttcgccgggaaaaaaaggaggaaaggaaataaaatactccaagccaagagagcggcaggccgcaggggcaccccccacacccacaggccatccttcaccagcacacactcatctcccacacctagcctagccttgctttgtcctcctccgtctcgctctcgctctccgtctccattcccacccaccaccaaacaccaggcccaaaggaccccccgccttcccaactaagagcaccagcgcagcggggagggggaatcagggcagcaagatccgagcagcaggagtggcaagcagcatttgtagccacagctcgctcactcaattgcagctagccgcggttgcggttggactggatcggcggcagggcagggcagggcagggcgcgcggcggtggtggtagttgcagaagtgacggtcaagttttcctcgctccttgcttcggccgagactccgcctgacgctactaccaacatctccacctgaatccatctctatctacctcgcacgaacgaacagagacaggggaggggagggggggaattgaagtgtaacccaaggaaaggaaccatgatggtgtggcaggcggaggaggaggattgatccatccgtcaacccatcagacccgtccatccatcggtggtggtggtggtggctgctgttactcgctatcaccatctgctgctgcctgctttagtcttttgcttcacttctcttctttctatccttcctccccctgtctgtttgtctgtcttattgccctccctgttcttgttgctgcttgcattgagaaaagagagagagagagacagagagagatagaaagtggttgctagttgtatggtcgtccggtgggcgcgatgaccatggagcacggcgaggattgctgcgtcaaggtggcggtccacgcgcgccccctcatcggcgacgagaagctgcagggctgtaaggactgcgtcgccgtcgtgccgggcaagccgcaggttcagatcggcagccactccttcaccttcgaccatgtctacggcagcacaggcacgccgtcggcggccatgttcgacgagtgcgtggcgccgctggtcgacggcctcttccagggctacaacgctacggtgctggcatacggccagaccggatcagggaagacgtacaccatgggcactgcctgcaaggaggggtcgcatatcgggatcatcccacgagccatggctgcgctgtttgacaaaattgagaacctgaaaacccaagtggagttccagttacgagtatcgttcatcgagattctgaaagaagaggtgagggatctacttgaccccactgctggtaccgtgggcaaagcagagaatggcaatggccacgcaaaactgtctgtgccagggaaaccccctgtgcagatccgagaggcgtcgaatggagtcataacgctagctggatccactgaggtgcatgtcaccactcagaaggaaatggccgcatgcctcgaacaaggttccctcagtcgcgcaactggaagtaccaacatgaacaaccagtcaagtcgttcccatgccatcttcacaatcacattggagcagatgcgcaaaatagaccccatcatgactgcagatggaatgcctattgaagagatgaatgaagactatctctgtgccaaactacacttagtagatcttgctggatcagaacgggctaagagaactggttcagatggcctgcgcttcaaggaaggtgttcacatcaaccgaggacttctcgctctcggcaatgtcataagtgctcttggagatgagaaaaaaagaaaagaaggtgctcacgttccttatcgggacagcaagctcacccgtcttttgcaggactccctaggtggaaatagtaagactgtcatgatagcttgcataagtccagcagatattaatgctgaagagacattaaacactttgaaatatgctaaccgggcacgtaatatccaaaacaagccgattgtcaatagaaatcctatcgctgatgagatgaaaagaatgcgccagcagattgaatacttgcaggcagagcttgtttcggctcgaggaggagccacatcagatgatgttcagggtctcagagagaggatttcatggcttgaacaaacgaatgaagacctctgcagggaactatatgatagtcgcaaccggtctcaaaatgatccatgtgaacctgaaatacaaaggactttaaacggctttaccaaaagcgaagggctcaaaagaagcttgcaaagtacagatccatttgatgttccaatggctgactcagtaagaggcaaccctaaggatattgaagatgaagtagctaaagaatgggaacacacaatgctgcaggatagcatgggcaaggagttgaatgaattaaatcgacaacttgagcgaaaagagtctgagatgaaaatgtatggatgtgatactgttgcacttaagcagcacttcggaaagaaacttatggagcttgaagaagagaaaaaagcagtacagcaagagagggatagattgttggctgaagttgaaagcctaagtgctgatggccaaacacataaactccgagatgcgcagctgcagaaactaaaatcccttgaagcccagattctagacctaaagaaaaagcacgagaaccaaattcagattttgaaggaaaagcagaagagtgatgaagctgctaagaaactgcaagaagaaattcattttataaaagcgcaaaaggttcaactacaacacaaaattaaacaggaagcagaacagttcaggcaatggaaagctacccgcgagaaggaacttcttcagttacgcaaggagggacggagaaatgagtatgaacgccacaagcttcaggcacttaatcagcggcagaaattggttttgcaaaggaagaccgaagaggctgctatggctacaaaaaggctgaaagagatattagaagctaggaaatcttccgcccgtgacagttccgctggcagcaatggtacatctcaaggctataatatgggtgagagatcgctgcaaaaatggtttgatcaagagcttgaagttatggtgcatgtgcatgaagtccgaaatgagtacgaaaaacaaagccaactgcgtgctgcgcttggtgaggagcttgccattttgaaacaagaagatatacgggctggtggatctagtccccaaagagggaagaatggaaactctaggacaaataccttgtcaccaaatgcaagacaagctaggatagcatcacttgagagcatggtgacaatctcttcaaacactcttgttgcaatggcttctcaactctcagaagctgaagaaagagagcgtgccttctctgggcgtagtcgttggaatcaattgcgatcaatgggggaggcaaagagcttactgcaatatgtctttaatgttgctgctgatgccagatgccaagtaaaggagaaggaagtggagatcaaggaaatgaaggaacaaatgacagagctggtgggcattcttcgacacagtgaatcacgcagaagagaaatggagaagcagctcaagcaaagagaacagacaactccaatggccactacacctccgaaaagtggaaatggcacgacgaagcactctgctgatgaccccaacacaccactgtcccctgtcgccgttcctgcacagaagcagctcaagtattctgctggaattgtaaatagccccagcaaaggagttgctgcgataaaaaaagagcaacttaagatggttccaattgcacagttgtctgcggggaagagagtttcaatagcagggcattcaggaaagctctggaggtggaaaagaagccatcaccagtggctgatgcagttcaagtggaagtggcagaagccgtggaagttgtctgaggtgatacgacacagtgatgaaacaatcacgaggattaggcccagacctccacttcttccacataaacctcataactgatgtgaaacggacttgtttttgtctcaacaagaactgacacggtttgcaaacctacacagctaactgcctgcacaagccttcactgacggtgacatgtcaatagttggtgttcgtcttcacaaaggaatctgtcaaaggaaggcgccttgtaaagtctttcttgtgctgttgtgtgatagttttgtgtgaagggtaactgaaagttgaatgggttttgtgctcgagtgatagtctattttcccctcttcttttgtttgttgatactaaaatgagaaaagacaagtgatattggtttggtttgctaggagtattgtgatgtaatgcagaaacttgttcccctatatcagtacacccttttaatctatgtattgtggagtactgattgctgactactgttgatgtcc

SEQ ID NO: 200828 - DNA, 3678 bp, Zea Mays
cccgcataaactacgggattattacgtcgctgttagaggggaggtggagcgttggcatcagcgacgtcccgcgcgcaaaccgaatgtggcctgttgagacgccattcacgcagagagagagagacagagagagatagaaagtggttgctagttgtatggtcgtccggtgggcgcgatgaccatggagcacggcgaggattgctgcgtcaaggtggcggtccacgcgcgccccctcatcggcgacgagaagctgcagggctgtaaggactgcgtcgccgtcgtgccgggcaagccgcaggttcagatcggcagccactccttcaccttcgaccatgtctacggcagcacaggcacgccgtcggcggccatgttcgacgagtgcgtggcgccgctggtcgacggcctcttccagggctacaacgctacggtgctggcatacggccagaccggatcagggaagacgtacaccatgggcactgcctgcaaggaggggtcgcatatcgggatcatcccacgagccatggctgcgctgtttgacaaaattgagaacctgaaaacccaagtggagttccagttacgagtatcgttcatcgagattctgaaagaagaggtgagggatctacttgaccccactgctggtaccgtgggcaaagcagagaatggcaatggccacgcaaaactgtctgtgccagggaaaccccctgtgcagatccgagaggcgtcgaatggagtcataacgctagctggatccactgaggtgcatgtcaccactcagaaggaaatggccgcatgcctcgaacaaggttccctcagtcgcgcaactggaagtaccaacatgaacaaccagtcaagtcgttcccatgccatcttcacaatcacattggagcagatgcgcaaaatagaccccatcatgactgcagatggaatgcctattgaagagatgaatgaagactatctctgtgccaaactacacttagtagatcttgctggatcagaacgggctaagagaactggttcagatggcctgcgcttcaaggaaggtgttcacatcaaccgaggacttctcgctctcggcaatgtcataagtgctcttggagatgagaaaaaaagaaaagaaggtgctcacgttccttatcgggacagcaagctcacccgtcttttgcaggactccctaggtggaaatagtaagactgtcatgatagcttgcataagtccagcagatattaatgctgaagagacattaaacactttgaaatatgctaaccgggcacgtaatatccaaaacaagccgattgtcaatagaaatcctatcgctgatgagatgaaaagaatgcgccagcagattgaatacttgcaggcagagcttgtttcggctcgaggaggagccacatcagatgatgttcagggtctcagagagaggatttcatggcttgaacaaacgaatgaagacctctgcagggaactatatgatagtcgcaaccggtctcaaaatgatccatgtgaacctgaaatacaaaggactttaaacggctttaccaaaagcgaagggctcaaaagaagcttgcaaagtacagatccatttgatgttccaatggctgactcagtaagaggcaaccctaaggatattgaagatgaagtagctaaagaatgggaacacacaatgctgcaggatagcatgggcaaggagttgaatgaattaaatcgacaacttgagcgaaaagagtctgagatgaaaatgtatggatgtgatactgttgcacttaagcagcacttcggaaagaaacttatggagcttgaagaagagaaaaaagcagtacagcaagagagggatagattgttggctgaagttgaaagcctaagtgctgatggccaaacacataaactccgagatgcgcagctgcagaaactaaaatcccttgaagcccagattctagacctaaagaaaaagcacgagaaccaaattcagattttgaaggaaaagcagaagagtgatgaagctgctaagaaactgcaagaagaaattcattttataaaagcgcaaaaggttcaactacaacacaaaattaaacaggaagcagaacagttcaggcaatggaaagctacccgcgagaaggaacttcttcagttacgcaaggagggacggagaaatgagtatgaacgccacaagcttcaggcacttaatcagcggcagaaattggttttgcaaaggaagaccgaagaggctgctatggctacaaaaaggctgaaagagatattagaagctaggaaatcttccgcccgtgacagttccgctggcagcaatggtacatctcaaggctataatatgggtgagagatcgctgcaaaaatggtttgatcaagagcttgaagttatggtgcatgtgcatgaagtccgaaatgagtacgaaaaacaaagccaactgcgtgctgcgcttggtgaggagcttgccattttgaaacaagaagatatacgggctggtggatctagtccccaaagagggaagaatggaaactctaggacaaataccttgtcaccaaatgcaagacaagctaggatagcatcacttgagagcatggtgacaatctcttcaaacactcttgttgcaatggcttctcaactctcagaagctgaagaaagagagcgtgccttctctgggcgtagtcgttggaatcaattgcgatcaatgggggaggcaaagagcttactgcaatatgtctttaatgttgctgctgatgccagatgccaagtaaaggagaaggaagtggagatcaaggaaatgaaggaacaaatgacagagctggtgggcattcttcgacacagtgaatcacgcagaagagaaatggagaagcagctcaagcaaagagaacagacaactccaatggccactacacctccgaaaagtggaaatggcacgacgaagcactctgctgatgaccccaacacaccactgtcccctgtcgccgttcctgcacagaagcagctcaagtattctgctggaattgtaaatagccccagcaaaggagttgctgcgataaaaaaagagcaacttaagatggttccaattgcacagttgtctgcggggaagagagtttcaatagcagggcattcaggaaagctctggaggtggaaaagaagccatcaccagtggctgatgcagttcaagtggaagtggcagaagccgtggaagttgtctgaggtgatacgacacagtgatgaaacaatcacgaggattaggcccagacctccacttcttccacataaacctcataactgatgtgaaacggacttgtttttgtctcaacaagaactgacacggtttgcaaacctacacagctaactgcctgcacaagccttcactgacggtgacatgtcaatagttggtgttcgtcttcacaaaggaatctgtcaaaggaaggcgccttgtaaagtctttcttgtgctgttgtgtgatagttttgtgtgaagggtaactgaaagttgaatgggttttgtgctcgagtgatagtctattttcccctcttcttttgtttgttgatactaaaatgagaaaagacaagtgatattggtttggtttgctaggagtattgtgatgtaatgcagaaacttgttcccctatatcagtacacccttttaatctatgtattgtggagtactgattgctgactactgttgatgtcc

SEQ ID NO: 200829 - DNA, 977 bp, Zea Mays
cacaaaaccaacgcatgcgatattgttgcccagaaaacaattgaacgttatagaacgtacacaaaggataatgtcagcaacaagacagcacatcaggacattgagcaagtaaaagctgatgctgagggcctggcaaagaaactggaagcacttgaagcttacaaaagaaaacttttgggtgagaggttggaagaatgctcctttgaagaactgcacagtttggaagtgaaactcgaaaagagccttcattgcatcaggggaagaaagactcagctgctggaggagcaactccataagctgaaggagaaggagatgaatctgcgcaagagcaacgaagatttacgtgaaaagtgcaagaagcagccgccgccgccgccgcctatgctgatggctcctccgccgcctccagcgccggcagccatcgatcacacggggccgaaggatgtcgggatggacgtggagacggagctgtacataggattgcccggcagagattaccgctcaaacaacaaagacatgactgcacagtagctgtcaggtcaggtcaggtcaggctagccagcagtgcagagaataatcttagatctgtggtgcggagaactggagatgcaagccaagcccaagccaatcaacatgataaggatcatgagtgtcgcgtcgtgttttacaaacctgtccaccgtccgtcaaaggcacatgcgccagaacgtccgtcagagaacacttaccccctcatctccctctattagctagctgctccggcctgctcatgtcgaaaccttctgttcaagtatgttctcctcctgatgaattccctgcccggcatgcattggtgagcttcttctcgagaagaagtgggtggggtggggacactgtcgttcatatttggcaacacacgaggtgtcgtgtcgactgggagatgcttcggcctcgagagtcagcacggtggccgattttaatggtcaatcttctttgcg

SEQ ID NO: 200830 - DNA, 2222 bp, Zea Mays
aggagccagctgctggctcgtgagtgtcggcgtgtcgggccacaacccgaacgctgaaccaaggctcgggaccgcgacactcgtgtgtccttctcctcagatctcgccggcggcggcatgctcccctcgtccggcagcggctggggccgcggccgcggccgccacctattgctcagcagggccctagctctcgctgcactgctcgcgctcgcctccgcctccgagtccgaccacaagtacaaaactgaagagccagttaagctttgggtgaataaagttggcccttacaataatcctcaagaaacctacaactattacagccttccattttgtcaaccgtctgagaaccccacacataaatggggtggtcttggagaggtccttggtggaaatgagctgattgatagtcagcttgaaataaagttcttaaaaaacgtggagaagggcttcatttgtacacttgagcttgatgctaaaaaggtccagcagtttgctgatgccattgaaagctcatattggttcgaattttttatagatgatctgcctctttggggttttgttggggagtctgacaagaacagtgaaaacaagcattacctttacacacacaagaacatccttgttaaatacaatgataacaggataattcatgtaaatctcacccaagagtctcctaagcttcttgaagatggcaagaaactggaaatgacatattcagtgaagtgggtagcaacagatgtgtcatttgcacgccgttttgaagtgtacctggactatcctttctttgaacaccagattcactggttctccattttcaactctttcatgatggttattttcctaactggtttggtttcgatgatattgatgcggactttgagaaatgattatgccaagtatgctcgtgaagatgatgatctagagtccctggagagagatgttaatgaggaatcaggatggaagcttgtccatggtgacgtatttcggcctccccgaagtttgatgtttctttctgcacttgttggtatcggcacccaattggcagctcttatcctacttgtgattgttttggccattgttggcatgctatacattgggcgaggggctatcatcacaaccttcattgtgtgctatgctcttacatcgtttatttctggatatgttagtggtggtctttactcaaggagcggtggcaaaaactggattaaagcgatggttcttacagcatccctctttccgttcttgtgtttttcaattggtttcgcactgaatacaattgctattttctaccgctcattagcagcaataccatttggcacaatggttgtcatgtttgtactttgggctttcatatcttttccgttggtgcttttgggaactgttgttggtagaaactggagtggtgctcctaacaacccctgccgagtaaagactattccacggcctattcctgagaagaagtggtaccttacaccttctgtcatctcattgatgggtggcctgcttccctttggcagtatcttcattgagatgtacttcgtgttcacatcattctggaactataaggtgtattatgtctatggtttcatgttgctggtcttcgtcatccttctaatagtcaccatctgcgtcaccattgtgggtacttatttcttgctgaacgccgagaactatcactggcaatggacgtcgttttcctctgcagcgtcaaccgctttgtatgtgtatctgtactccatctactactaccatgtgaagacaaagatgtcaggcttcttccagacaagtttctactttggttacacactgatgttctgccttggtctaggcatactttgtggtgctattgggtatctagggtcaaccctttttgtaaggagaatctacagaaatatcaaatgttttgtggaagtcagtggaaccattggaatgctttgactcaagttggagaggaaagaaggctctaggagatggctggggctaaggctgtctacagcaacgtctactaaattttgtcccctaaaagaatattctctgtactttacaaaacactctaaaagattctgtactctatatcatctcagtctccaacaacgttccttaaattcggttctctaaagctacagagttaaccgactttattttgtccatttatttggtttatatttcatttcttttcattacacgctaattgaaataaaacatgcaagacaatagttttt

SEQ ID NO: 200831 - DNA, 2164 bp, Zea Mays
ggaggagccagctgctggctcgtgagtgtcggcgtgtcgggccacaacccgaacgctgaaccaaggctcgggaccgcgacactcgtgtgtccttctcctcagatctcgccggcggcggcatgctcccctcgtccggcagcggctggggccgcggccgcggccgccacctattgctcagcagggccctagctctcgctgcactgctcgcgctcgcctccgcctccgagtccgaccacaagtacaaaactgaagagccagttaagctttgggtgaataaagttggcccttacaataatcctcaagaaacctacaactattacagccttccattttgtcaaccgtctgagaaccccacacataaatggggtggtcttggagaggtccttggtggaaatgagctgattgatagtcagcttgaaataaagttcttaaaaaacgtggagaagggcttcatttgtacacttgagcttgatgctaaaaaggtccagcagtttgctgatgccattgaaagctcatattggttcgaattttttatagatgatctgcctctttggggttttgttggggagtctgacaagaacagtgaaaacaagcattacctttacacacacaagaacatccttgttaaatacaatgataacaggataattcatgtaaatctcacccaagagtctcctaagcttcttgaagatggcaagaaactggaaatgacatattcagtgaagtgggtagcaacagatgtgtcatttgcacgccgttttgaagtgtacctggactatcctttctttgaacaccagattcactggttctccattttcaactctttcatgatggttattttcctaactggtttggtttcgatgatattgatgcggactttgagaaatgattatgccaagtatgctcgtgaagatgatgatctagagtccctggagagagatgttaatgaggaatcaggatggaagcttgtccatggtgacgtatttcggcctccccgaagtttgatgtttctttctgcacttgttggtatcggcacccaattggcagctcttatcctacttgtgattgttttggccattgttggcatgctatacattgggcgaggggctatcatcacaaccttcattgtgtgctatgctcttacatcgtttatttctggatatgttagtggtggtctttactcaaggagcggtggcaaaaactggattaaagcgatggttcttacagcatccctctttccgttcttgtgtttttcaattggtttcgcactgaatacaattgctattttctaccgctcattagcagcaataccatttggcacaatggttgtcatgtttgtactttgggctttcatatcttttccgttggtgcttttgggaactgttgttggtagaaactggagtggtgctcctaacaacccctgccgagtaaagactattccacggcctattcctgagaagaagtggtaccttacaccttctgtcatctcattgatgggtggcctgcttccctttggcagtatcttcattgagatgtacttcgtgttcacatcattctggaactataaggtgtattatgtctatggtttcatgttgctggtcttcgtcatccttctaatagtcaccatctgcgtcaccattgtgggtacttatttcttgctgaacgccgagaactatcactggcaatggacgtcgttttcctctgcagcgtcaaccgctttgtatgtgtatctgtactccatctactactaccatgtgaagacaaagatgtcaggcttcttccagacaagtttctactttggttacacactgatgttctgccttggtctaggcatactttgtggttttgtggaagtcagtggaaccattggaatgctttgactcaagttggagaggaaagaaggctctaggagatggctggggctaaggctgtctacagcaacgtctactaaattttgtcccctaaaagaatattctctgtactttacaaaacactctaaaagattctgtactctatatcatctcagtctccaacaacgttccttaaattcggttctctaaagctacagagttaaccgactttattttgtccatttatttggtttatatttcatttcttttcattacacgctaattgaaataaaacatgcaagacaatagttttt

SEQ ID NO: 200832 - DNA, 640 bp, Zea Mays
caagagctgtcgtgacggcgaggaactagacgaacctgcgccaccaccgttggcgtatgcgggcgggggagagtggaggagcgctgccgctgtttaccaccgcgagacgtggccatggcgctcgcgctagagcaacaccggcaaggcaatcgagtgagggggaggatgtggtcatcgagccagacgagcacgaggggtgtggtggagatggggagggtggaggctaggaggggaggtggtggggatgaagacgcaagtggtcaccacgcagcggcaactgatgcacgatctggaggtgctgccactcgaggaggccaccgcaagtgccaagagcatgaatgtgaatggtgcatgtcagcgagggaagtcgctacgatgaagattgctctagagagtgctaggatccaaacaaccatcaatgacatgatactcaatctttttgacaagagaaatgacataataagggcacttaacatgtataaaagagaaattgagcaggaaccgatgatgatcttccagcatcatatgataatagctcttgaaagcttaccatgccacatcgaagtatctgaaaacgggcataagcattggaggagtcagaaattaccataaagatgaagctaaaacttatggtttgtct

SEQ ID NO: 200833 - DNA, 1724 bp, Zea Mays
cctttctggccattgctgccaatgaggatgcttgtgtatgagtacgtgaacaatggaaatttagaacagtggcttcatggtgccatgcgtcagcatggtgttcttacttgggaagcccggatgaaaatcattcttggaattgctaaggcgcttgcttatttacatgaagccatagaaccaaaagttgtgcaccgtgatatcaaatctagcaatatcctagttgatgaagaattcaatggcaagctttctgattttggattggccaagctcttgggtgcagggaagagtcatatcacaactcgagttatgggaactttcgggtatgtggcccctgaatatgccaacactggtctgttaaatgagaggagtgatgtctacagttttggagtgctactactggaatcagttactgggagggacccagttgactatggtcggccagctaatgaggtacatctggtcgagtggctcaaaatgatggttggcacgagaagagctgaggaggtggtggatcctgacatggagttgaaacctgccactcgggctctgaagcgtgcccttctagtggcactgcggtgtgttgatccggactctgagaaaagacccactatggggcaggttgtccggatgctcgaggcagaagatgtcccgtcacgggaggaccgccggagccggaggggccacagcggtaacgcagacagcgagtctaaggcaagctcaagtgagttcgagataagcagtgatcgaagagagttggggccgtccgcgaggttccagtcctaacccctgacgagaactcggttttggactagcgatgaacatcagatgagcggtgtgtgtgggggggggggggggggggctggttggtaggaggtaggaaggccattgcatttcattttcgcgaggacatttgcattttgtactgtgtagagatcggaagggcattgcatttctggaggggtaggcattatcctttggtagtaggcagcttagaatgcagagggagatgactccccctgagacgaaagattcagacttgctgtcgtgaatcttggtgttctgttggtgcggacggcagcagcttcagcttgtacagacatttctttctctgtcgtttggttattaggacttgttgggtagtaggaacattaaggtctctttcgtaatgtgatgaatgacttgaaccatcaacctcttgtaatcttcttagtccattggccaagctagagttctgtgaagctccatcttcagcatgggaatctcaccgattcagatcgagctgatgctgtttcctgtgatatttctgaagatgttccaagcagggtggtaatttcctgtgacaattggaaagatgtagacgatcgctggctcattggttctaatcaatgggatgaatgtcaaatgcgaataaatcaaaatccgaggtacacagaagagctccggcgacggggaaagggcccgggagctccaaaggcttggcgatggcccggcggttgcgagcacaaagagaagcgcacggaggagggaggtgctagtactacgcatggcaaattgattctttgtaatgtttggcgtggagttgtaagagcatcggaggagggaggtgctagtactacgcatggcaaattgattctttgtaatgtttggcgtggagttgtaagagcatctgtaagagactagacaaatggttcatcaagttaaattttgactaatcaatagcaaaa

SEQ ID NO: 200834 - DNA, 2755 bp, Zea Mays
gtcactgactcactgccactcccactgtgctgccgcaacggcactggatttttgtgagtccgcggctccgcgctcgcttctctctctctctctcccccctttctgccgctcactctcgctcgctcgctcgctcgctcttctactgcgggctggcggcggcggcggcggcgactgggcgagccgcgagcgcgccgcccttcgccaggtcttcgccggccacttcgcgggcgagggcgaccaccgacgagcatccaccaggccgctgaggaataacaaagatgtccgccggcggagtcctgagggcagagttatcttccaggacgccgccgttcggcctgaggctatggattgtgattggcatctgtatctgggcgctaatcctgttcatcctaggcttcatgtgcttctggtccctacaccggaggaagccgggcaagccctgcgacaaggttccgctgtcccaaatccctgacgtctccaaggagattgcggtggacgaggcgcgggagcaagctgttgtccacagcctccgtgtgcaggagagccacacactgtccgtgcaggagaagaagcactgcgaaaaggattcggggaaaatgctcgcgcacctggttaggagcaagtcgagcgatgcagataatctgagccagtgcagctccgcgttccagtgcgaaagggctgggagctcgtattctggtgacgaaggcagctcgggcaatgctaggaggcagtactctcagaccgtctccgcgtcgccattggttggtctccctgagttctcgcatctgggttgggggcattggtttactttgagggatttggagcatgcgacgaatcggttttctaaggagaatgtcattggagaaggtgggtatggagtagtttaccgtggccgcctcataaatggtactgatgttgcaataaagaagctccttaataacatgggccaagcagaaaaggagttcagggttgaagttgaggcaattggacatgtcaggcataagaatcttgtccgccttcttggatattgcgtggagggaatacacaggatgcttgtgtatgagtacgtgaacaatggaaatttagaacagtggcttcatggtgccatgcgtcagcatggtgttcttacttgggaagcccggatgaaaatcattcttggaattgctaaggcgcttgcttatttacatgaagccatagaaccaaaagttgtgcaccgtgatatcaaatctagcaatatcctagttgatgaagaattcaatggcaagctttctgattttggattggccaagctcttgggtgcagggaagagtcatatcacaactcgagttatgggaactttcgggtatgtggcccctgaatatgccaacactggtctgttaaatgagaggagtgatgtctacagttttggagtgctactactggaatcagttactgggagggacccagttgactatggtcggccagctaatgagacggtgcaggtacatctggtcgagtggctcaaaatgatggttggcacgagaagagctgaggaggtggtggatcctgacatggagttgaaacctgccactcgggctctgaagcgtgcccttctagtggcactgcggtgtgttgatccggactctgagaaaagacccactatggggcaggttgtccggatgctcgaggcagaagatgtcccgtcacgggaggaccgccggagccggaggggccacagcggtaacgcagacagcgagtctaaggcaagctcaagtgagttcgagataagcagtgatcgaagagagttggggccgtccgcgaggttccagtcctaacccctgacgagaactcggttttggactagcgatgaacatcagatgagcggtgtgtgtgggggggggggggggggggctggttggtaggaggtaggaaggccattgcatttcattttcgcgaggacatttgcattttgtactgtgtagagatcggaagggcattgcatttctggaggggtaggcattatcctttggtagtaggcagcttagaatgcagagggagatgactccccctgagacgaaagattcagacttgctgtcgtgaatcttggtgttctgttggtgcggacggcagcagcttcagcttgtacagacatttctttctctgtcgtttggttattaggacttgttgggtagtaggaacattaaggtctctttcgtaatgtgatgaatgacttgaaccatcaacctcttgtaatcttcttagtccattggccaagctagagttctgtgaagctccatcttcagcatgggaatctcaccgattcagatcgagctgatgctgtttcctgtgatatttctgaagatgttccaagcagggtggtaatttcctgtgacaattggaaagatgtagacgatcgctggctcattggttctaatcaatgggatgaatgtcaaatgcgaataaatcaaaatccgaggtacacagaagagctccggcgacggggaaagggcccgggagctccaaaggcttggcgatggcccggcggttgcgagcacaaagagaagcgcacggaggagggaggtgctagtactacgcatggcaaattgattctttgtaatgtttggcgtggagttgtaagagcatcggaggagggaggtgctagtactacgcatggcaaattgattctttgtaatgtttggcgtggagttgtaagagcatctgtaagagactagacaaatggttcatcaagttaaattttgactaatcaatagcaaaa

SEQ ID NO: 200835 - DNA, 3302 bp, Zea Mays
tactgtagtccagtctccagtctatctactactcgtacttccagtggggcctcgcttgctactgcaagtcctacttccgtctttcctccgccccgttatccattctattctcaccagccatcgcccatctttaaaaaaaaatcttgaacccctcctttgccgactcctctctccagaaggccccaacccatctcatcactcaccgctcccaaggcgagagatctcacctccccattcccaaaccaacccaaacaccaaaattcaaactgacgatcgatccaaaaacgccacaaatcccaccaaatccacctcaaatttgccacaaaatgccccagattggcacccaaaccccgcacccaccgtttcaaatctgacctcgccattcccactcctcccactctacccaccgcatactccagatccccaccgcaatggcgaccgcggtctccaaatccgccgtcaaatcccaccccaggttgcccaccacagcgcagccgccgccgccgaaccccggctccaacgccgcgtcggctggcggaggggcggcgcctccgccgccgccgtctcccgccgccggcgcgacgccgtcgaagaacgcggcgatggcggagctcaagtcgcgcgtgctcgccgcgctcgccaagctctcggaccgcgacacgcaccacatcgccgttgaggagctggaccgcatcatccgcgcgccgccgtcgaccgacgccgtgcccatgctgctcaatgcgctggcacccgactccccggggctcgcctccccggccaggcgcgagtgtctgcgcctcctcgccacgctctgcacgtcgcacccggatgccgccgcgtcgcacctccacaaggtgctcgcccacctcgcgcgtcggctaaaggacccggcgtccgacacttccgtgcgcgacacgtgccgagacgtcgcggggcagctcgcggcagtgtacctccgccctctgtcggcttcaggcgtttgcgaggcgggcaatgcgaccgtgacgctgttcgtgaagccgctgttcgaggtgatgggggagcagagcaaatcggtgcagggcggggcggccgcatgcttggccaaggcggtggaaggggcgggacctgggcccggtgccatcgggatgtttgggaagctcggtcctaggatttgcaagttgctcggtgggcagggcgtgcaagccaaggcgggattactaggcatcatgggaagtttggcgcaggtgggagcaatcagttcccagaatatgcagcagactctgcaaagtatccgcgactgccttgagaacagcgattgggctactagaaaagcagctgctgatacattatctgtctttgctacccattctgttcacttgataggtgacggaacagctccaaccattgctgctctcgaagcttgccgttttgataaggtaaggcctgtcagagatagcatgattgatgcagtacagttgtggaaaaagttgactggagaagatgcaaatgcagatggtagaaataaggatcttgctgatggtgaagggaaactggactcaagaaggtcaatacaaagaggtggaaaatcagaatcctttgatgattcctctccagattcacctagtaacaacgtgaagggcagtagcatagctgaaaaggcagcttttcttttgaagaaaagaccaacattaactgacagggaattgaaccctgagtttttccaaaagctcgagacaagaaaaacagatgacttggcagttgaggttgtagtcccccacaagactctacaatctcacttgcgaggtgaagatgaaacagaagaagatgatgatcctgttggtccagctgacagcaatggatcagctgaagatgaagcaaatctaactcaaatgcgtgctagctttaattttcagaatatccgggataaatgggctggccaaaggggaaatagaaacaaaattacaaaagctaggacaactgatgttgaagataggggcgaacccagtacaaaagattccactgctgcagccatgaacatttctggagaaggccctttcataaataataaaacaaattggttagcaatacagaggcaattgtcacacttggagaggcagcaaactagtctcatgaacatgttgcaggatttcatgggagggtctcatgacagcatggttacattggagaacagagtacgtggtcttgagagagttgttgaggaaatggctagagaaatatcactctcctcaggcaggagaggtggtggtccagcgttgggctttgattcatctcctggcagatcatctaaacacaatggtttccatgaatattctaattcgaaatatggaaggagtggtgatggacggatgggatttgcagaaaggtatttctctgcagatgctatggcttctggtacgaaaaaccaatcttggagaccagattctgaaccatgggactcatatgcttattctggatcaagaagtggtatgaatgtgaggagaggattagattctgtttcatcagacaatagaatggcaagaaatgaacggagtaatgatcaagtgggtccccggagaggttgggacaaaggtcagggaccctttaggttcggtgagggtccttctgcccgaagtgcatggcgggcctcaaaagatgaagcaacactggaagctattagagtagctggtgaagataatggaaattcaagggccgctgcaagagttgctattcctgaactggatggagaagctttgaatgatgacaaccaaggggatgaaagaggcccactttgggaggcctggactcgtgcgatggatgctgttcatcttgaggatatggactctgcttatgctgaacttctttcgactggtgatgctgaattacttgtaaagttgatggagcaaactggaccggtcgttgatcaactttcaaatgaggttgcaaatgaagtcctacatgcagtggggcagtttctcatggaagaaagcttatatgacgtagcattaaactggcttcagcagttgactgatctggtaatggaaaatggctctgattatctcggaatacctctagacgcaaagcaggacgtcttactgggacttcatgaggcgacagcgattgacctgcctgatgactgggagggagcgacaccgttgcagataatgaagcagctagcttcatcctggcacatcgacctacagcaacttatcaattagggcagatgctacgcatttggatatattgcccatatgatgttaggcatcccagagcatcaactctttctgcagagattgtatggtggtgttgggggcctacggttg

SEQ ID NO: 200836 - DNA, 3481 bp, Zea Mays
tactgtagtccagtctccagtctatctactactcgtacttccagtggggcctcgcttgctactgcaagtcctacttccgtctttcctccgccccgttatccattctattctcaccagccatcgcccatctttaaaaaaaaatcttgaacccctcctttgccgactcctctctccagaaggccccaacccatctcatcactcaccgctcccaaggcgagagatctcacctccccattcccaaaccaacccaaacaccaaaattcaaactgacgatcgatccaaaaacgccacaaatcccaccaaatccacctcaaatttgccacaaaatgccccagattggcacccaaaccccgcacccaccgtttcaaatctgacctcgccattcccactcctcccactctacccaccgcatactccagatccccaccgcaatggcgaccgcggtctccaaatccgccgtcaaatcccaccccaggttgcccaccacagcgcagccgccgccgccgaaccccggctccaacgccgcgtcggctggcggaggggcggcgcctccgccgccgccgtctcccgccgccggcgcgacgccgtcgaagaacgcggcgatggcggagctcaagtcgcgcgtgctcgccgcgctcgccaagctctcggaccgcgacacgcaccacatcgccgttgaggagctggaccgcatcatccgcgcgccgccgtcgaccgacgccgtgcccatgctgctcaatgcgctggcacccgactccccggggctcgcctccccggccaggcgcgagtgtctgcgcctcctcgccacgctctgcacgtcgcacccggatgccgccgcgtcgcacctccacaaggtgctcgcccacctcgcgcgtcggctaaaggacccggcgtccgacacttccgtgcgcgacacgtgccgagacgtcgcggggcagctcgcggcagtgtacctccgccctctgtcggcttcaggcgtttgcgaggcgggcaatgcgaccgtgacgctgttcgtgaagccgctgttcgaggtgatgggggagcagagcaaatcggtgcagggcggggcggccgcatgcttggccaaggcggtggaaggggcgggacctgggcccggtgccatcgggatgtttgggaagctcggtcctaggatttgcaagttgctcggtgggcagggcgtgcaagccaaggcgggattactaggcatcatgggaagtttggcgcaggtgggagcaatcagttcccagaatatgcagcagactctgcaaagtatccgcgactgccttgagaacagcgattgggctactagaaaagcagctgctgatacattatctgtctttgctacccattctgttcacttgataggtgacggaacagctccaaccattgctgctctcgaagcttgccgttttgataaggtaaggcctgtcagagatagcatgattgatgcagtacagttgtggaaaaagttgactggagaagatgcaaatgggaaactggactcaagaaggtcaatacaaagaggtggaaaatcagaatcctttgatgattcctctccagattcacctagtaacaacgtgaagggcagtagcatagctgaaaaggcagcttttcttttgaagaaaagaccaacattaactgacagggaattgaaccctgagtttttccaaaagctcgagacaagaaaaacagatgacttggcagttgaggttgtagtcccccacaagactctacaatctcacttgcgaggtgaagatgaaacagaagaagatgatgatcctgttggtccagctgacagcaatggatcagctgaagatgaagcaaatctaactcaaatgcgtgctagctttaattttcagaatatccgggataaatgggctggccaaaggggaaatagaaacaaaattacaaaagctaggacaactgatgttgaagataggggcgaacccagtacaaaagattccactgctgcagccatgaacatttctggagaaggccctttcataaataataaaacaaattggttagcaatacagaggcaattgtcacacttggagaggcagcaaactagtctcatgaacatgttgcaggatttcatgggagggtctcatgacagcatggttacattggagaacagagtacgtggtcttgagagagttgttgaggaaatggctagagaaatatcactctcctcaggcaggagaggtggtggtccagcgttgggctttgattcatctcctggcagatcatctaaacacaatggtttccatgaatattctaattcgaaatatggaaggagtggtgatggacggatgggatttgcagaaaggtatttctctgcagatgctatggcttctggtacgaaaaaccaatcttggagaccagattctgaaccatgggactcatatgcttattctggatcaagaagtggtatgaatgtgaggagaggattagattctgtttcatcagacaatagaatggcaagaaatgaacggagtaatgatcaagtgggtccccggagaggttgggacaaaggtcagggaccctttaggttcggtgagggtccttctgcccgaagtgcatggcgggcctcaaaagatgaagcaacactggaagctattagagtagctggtgaagataatggaaattcaagggccgctgcaagagttgctattcctgaactggatggagaagctttgaatgatgacaaccaaggggatgaaagaggcccactttgggaggcctggactcgtgcgatggatgctgttcatcttgaggatatggactctgcttatgctgaacttctttcgactggtgatgctgaattacttgtaaagttgatggagcaaactggaccggtcgttgatcaactttcaaatgaggttgcaaatgaagtcctacatgcagtggggcagtttctcatggaagaaagcttatatgacgtagcattaaactggcttcagcagttgactgatctggtaatggaaaatggctctgattatctcggaatacctctagacgcaaagcaggacgtcttactgggacttcatgaggcgacagcgattgacctgcctgatgactgggagggagcgacaccgttgcagataatgaagcagctagcttcatcctggcacatcgacctacagcaacttatcaattagggtaacattgattaccgacatatgggttaatttcatttgttcgttgcctcttggtcttgtctggcctgttgctattaggattaggaatattatattggttggagtggaagtggcactgtgttgaaatggattggttgtattggggaaatatgatgtggatattgtctcaccttcatctaaaggctttcataattcatagtttgattctccagttatactgtaaaaccttctcacttcatggtggtggtctcttgtatgattatggtgcattggttattacatggaactcaaaatgagtagcaatgcattgtttatttgcc

SEQ ID NO: 200837 - DNA, 1033 bp, Zea Mays
cccaatacgccgagagcccccagacatccatcccgaagacccgagtgcacttccgttgccgccgcccgccgggcgatttttaggtcctcgctttccccacgcgtgtggcgtgttccgctcgcgcccgcccggcctcccaccctctccagcgccgccgcctcctcttcccggccgaaggagcaccgccccagccgatcttctctcccccacgccccatcaggccgtttctggctgctcttgggcctccctcgccctccctgacggccccgagctcgccctccatctccgccccagctcgcgccatctcggtgcctcgagctcgtcgtccgcgcttctgtggccactgccgggaagcatgaggaggaggcctgggatcgctggcttgcagaatgcggcggctactcgtgaccaattccggctggtcggggagaatgtggccaaggtgaggaccgatgtcatgaaggagcagcttgcgacgttccggtcacagctcgaggaattcgctcgcaagcataagagtgacatccgtaaaaacccagtattcagacagcagttccatgagatgtgcgcaaaagtcggagtagatccattggcatctaataaaggagtctgggcagaacttctagggattggtgacttctactatgaacttggggttcagatagttgacatatgcattgctaccagatcacataatggtggcttgattgacttactagatctccgcaaactgctcggtcagaagaggaaagctactcttgaatcattatctgaagatgactgtttgcgtgctataagcaagctaaaagtccttggtagtggttttgaagtaatttctgttgggaggagaaagcttgtgcgttcagttcctaccgaattaaataaagaccacagtgggatacttgggctagctcaggctgatggctatgtcacggtggaacaagttgaaaaggaattctcatggtctactgggcgtgcgattgatgctcttgaaactttgctcaagatacacaattgcatccatgcatgcctg

SEQ ID NO: 200838 - DNA, 1858 bp, Zea Mays
gtattacttcttgttcttcagtcacatgcttccagcgattgaggttctctccactctacctcatcagcggggtcagttacggccacctataaatttgctggtgatgtgccctactagggagcttgcaaaccaagtggctgttgaggccaggaagcttctcaggtatcatcgcacgttgggtgtgcaggttgtaattggtggcacaagattaactcaagagcaacgaagcatgcaagctaacccatgtcagattcttgttgctacaccaggaaggcttaaggatcatcttgagaacacacctgggttttctaccaggctcaagggtgtgaaggttcttgttcttgatgaagctgaccgcctgttggatatgggatttagaagagatattgagaaaataattgcttcaattcctagagaacggcaaacactgttattttctgctactgttccagaagaggtccgccaaatttctcatgtggcaatgaagaaagattataggttcattaacactgttaaagagggtgatgaggagacacatgcacaggtgagccagatgtacatggttgcaccactagacttgcatttttctatcctatatgatgtattgaagaaacatgtcgcagaagatgcagactacaaagttattatattctgtactactgcaatggtcaccaaacttgtggctgaagttctctcccagctgaaactgaatataagagagattcattccagaaagtcgcagtctgcaagaactaaggtctcagacgaattcaggaaatcaaaaggtttgatactggtcagttcagacgtatctgcccggggcgttgactatcctgatgtcactcttgtaatacaggttggagttcctgcagatagagagcagtacatacatagactaggccggaccggacggaaaggcaaggaagggcaaggactcctactattggcaccttgggaaaaatattttcttggtgctgttaaggatttgtcaatagcagagtctgctgtaccaccagttgattcaagtgttgagacagaaaaatgcggtcagaaaagtagagatgaagagcaaagaatgtgcctatcaagcatggttagggtactacaactcgaacaagaccattggtcgagataagtccagacttgttcaccttgcagaagagttcagccaaagcatgggtcttgcagttcctccagccataccgagaaacattcttcgcaagatgggccttaacaatgtccctgggcttcgttcatcataatctcgatgtcacgatatcaagcagaagacgtgtgctacagcacagtacatgcatttgaccagccataatgctgttaacttcgtaaacaacacttgttgctggacttaagtaccgcagttaacataagcagattggtttgctgatgacctgaagtttctacaagcatcctcatttccaacccgtacacaagtcctcgggtgtagccagaatatgcattcattttgaagccaaattttgttcggtcgagacatcaacacttcacagagaatgctcaaacagacaaggtgattctacgtatacaaggatttgtcaaaagcatagtgatgtgtatgaagtattaaaagttcgggaagaaaaatgcgctttcctgatttatcgtcatataggggaatgcatgtgttcagtttcaaattctgacgttgtttgtacgcgaatgaaaagaaaggtatagggttgtgtaggggcaacaactactatacaaacaaccgttagatataaacatgcaagcaggtcactcggtctgttagatctagatccaatcatatgttatactaggtgagtgcccgtgcgttgcaacgggatcatataataccaat

SEQ ID NO: 200839 - DNA, 2674 bp, Zea Mays
cccacctcaacctcacctgccactgccatcctttctcacactcgcgcaccggcgcgcgtccgctgcccgcaccccgtcccgttgtactgcagggcggagcctcgctcgccttttgtactgcacgcccacgcgtccacacgcgcgcgcggcccggacctggctacgaagcgcaggcagtacagacagcaccgcctggtttgagcggctgccgccgctgcatatactccctccctgccttccagtgccaggggtgaccggcgtgcgtgccattccacgctctcgcggctcgtgtgccagcggtgaccagcgctcgtgctcgtccagtccaccaggcgctgctgttccggcaagccagccagcagcagccgccgccgccgccgtctcggagctcgagctcctagtcccccggggccgaggcgccggcgccatggaccagctccggcccgagccggccgcgggcgcgcacgagatcgagaagacggcggcgccggacgtggagtcggagcccgcggcggcggtgccggagccggagcgcgtgccgccgtggcgcgagcaggtcaccgcgcgcgggatggtggcggcgctgctcatcggcttcgtctacacggtgatcgtcatgaagctgagcctcaccacggggctcacccccaccatgaacgtctccgccgcgctgctcgccttcctggcgctccgcggatggacgcgcgccctcggccgcctaggcattgcatgccgccccttcacccgccaggagaacaccgtcgtgcagacctgcgtcgtcgcctgctacaccatagggttcggcggtgggttcgggtcgttcctgctgggcctggacaagaagacgtacgagctctccggggtgagcacgccgggcaacgtgccggggagctacagggagcctgccatcggctggatgaccggattcctcctcgccgtcagcttcgtggggctcctcaccttgcttccactcagaaaggtgctcgtcatcgactacaaactcacttatccaagtggaacagccaccgcggttctcataaacggattccacacacctcaaggagataagaatgcaaaaattcaggtccgtggattcctcaagtacttcgggatcagcttcctgtggagcttcttccagtggttctacaccgccggcgaccactgcggattcgcccagttccctactttcgggctccaggcttttaaccagacgttttccttcgacttcagcctgacgtacgttggtgctgggatgatctgctcgcacctcgtcaacctctcgttgctgttcggtgccgtcgtttcctggggcgtcatgtggccactcatcggcaagcagaagggcaactggtatccggcagatgcatctcagaatagcatgacaggcatctacgggtacaaggccttcctttgcattgcccttctcgtgggagacggtctctacaacttcgtcaaagtcatagctatcactgtcaagaacatacgcgagagatcacgtcgcaagaacctgaacagagtggcggacgcggacacgatggcgctggacgacatgcagcgcgacgaggtgttcaacagggacaacatcccgacgtggctgtcctacgcggggtacgcggcgctgagcctgatcgcggtgatcgccatcccgatcatgttccgggaggtgaggtggtactacgtggtggtggcgtacgcgctggcgccggcgctggggttctgcaacgcgtacgggaccgggctgacggacatgaacatggggtacaactacgggaaggtcgcgctgttcgtgctggcggcgtgggcggggaaggacagcggcgtggtggccgggctggtggggtgcgggctggtgaagcagctggtgctcgtgtcggccgacctgatgcacgacttcaagacggggcacctgacgctgacgtcgccgcggtcgatgctgggcgttcgacgtgggcgagccggacgggtactggaaggccccctacgcgctcatctaccgcaacatggccatcctcggcgtggagggcttctcggcgctgcccaggcactgcctgcagctgtgcgcggggttcttcgcgttcgcggtgctggcgaacctggcgcgggacctgctgccgcgccggctcgcgcggctcgtgccgctgcccatggccatggccgtgccgttcctcgtgggcgccagcttcgccgtcgacatgtgcgtggggagcctcgtggtgttcgcgtggcacaagctcgacggcaagaaggccgcgctgctggtgccggccgtcgcctcggggctcatctgcggcgacgggatctggacgttcccgtcgtctctgctcgcgctggccaaggtcaagccgcccatctgcatgaagttcacgccagggagctagagggcgcgctgacgatgcgtacagaacagagggcatcgttcgtcgtttgtggggtggaatccgtgtagtagaattacataccaaccaggcctgttctaatgtccatatgagcttaatgtacggtgtatatatatgtaaaaatggaaatctgaaggatgacaggatgaattgcctgttgtctagtagcacgcatattattattattatagcatagcactaagagcaagtccaatagactcggtaaacagtctctgctcggtaaaaaaatgaaaatcgtcgtgaaaacaaattccaag

SEQ ID NO: 200840 - DNA, 3038 bp, Zea Mays
cccacctcaacctcacctgccactgccatcctttctcacactcgcgcaccggcgcgcgtccgctgcccgcaccccgtcccgttgtactgcagggcggagcctcgctcgccttttgtactgcacgcccacgcgtccacacgcgcgcgcggcccggacctggctacgaagcgcaggcagtacagacagcaccgcctggtttgagcggctgccgccgctgcatatactccctccctgccttccagtgccaggggtgaccggcgtgcgtgccattccacgctctcgcggctcgtgtgccagcggtgaccagcgctcgtgctcgtccagtccaccaggcgctgctgttccggcaagccagccaggattggatattttccgccaatcggattctggtgacatatacgttagcgtttgaggatccccatttgggaaatttcggtttccattgcaaaactgaataaaaaatatatccaagagaagaaagaaggccaaaggttatggatttttaataatccgagatccatccgacaactcacgcgcctctgcatctgtccaagtccaatgcacgagcacatggatggcgtagtggcatggtctggttctttttttttttgtgtgaacaaacaaatgaactcacatctacgcctccatactgcagcagcagccgccgccgccgccgtctcggagctcgagctcctagtcccccggggccgaggcgccggcgccatggaccagctccggcccgagccggccgcgggcgcgcacgagatcgagaagacggcggcgccggacgtggagtcggagcccgcggcggcggtgccggagccggagcgcgtgccgccgtggcgcgagcaggtcaccgcgcgcgggatggtggcggcgctgctcatcggcttcgtctacacggtgatcgtcatgaagctgagcctcaccacggggctcacccccaccatgaacgtctccgccgcgctgctcgccttcctggcgctccgcggatggacgcgcgccctcggccgcctaggcattgcatgccgccccttcacccgccaggagaacaccgtcgtgcagacctgcgtcgtcgcctgctacaccatagggttcggcggtgggttcgggtcgttcctgctgggcctggacaagaagacgtacgagctctccggggtgagcacgccgggcaacgtgccggggagctacagggagcctgccatcggctggatgaccggattcctcctcgccgtcagcttcgtggggctcctcaccttgcttccactcagaaaggtgctcgtcatcgactacaaactcacttatccaagtggaacagccaccgcggttctcataaacggattccacacacctcaaggagataagaatgcaaaaattcaggtccgtggattcctcaagtacttcgggatcagcttcctgtggagcttcttccagtggttctacaccgccggcgaccactgcggattcgcccagttccctactttcgggctccaggcttttaaccagacgttttccttcgacttcagcctgacgtacgttggtgctgggatgatctgctcgcacctcgtcaacctctcgttgctgttcggtgccgtcgtttcctggggcgtcatgtggccactcatcggcaagcagaagggcaactggtatccggcagatgcatctcagaatagcatgacaggcatctacgggtacaaggccttcctttgcattgcccttctcgtgggagacggtctctacaacttcgtcaaagtcatagctatcactgtcaagaacatacgcgagagatcacgtcgcaagaacctgaacagagtggcggacgcggacacgatggcgctggacgacatgcagcgcgacgaggtgttcaacagggacaacatcccgacgtggctgtcctacgcggggtacgcggcgctgagcctgatcgcggtgatcgccatcccgatcatgttccgggaggtgaggtggtactacgtggtggtggcgtacgcgctggcgccggcgctggggttctgcaacgcgtacgggaccgggctgacggacatgaacatggggtacaactacgggaaggtcgcgctgttcgtgctggcggcgtgggcggggaaggacagcggcgtggtggccgggctggtggggtgcgggctggtgaagcagctggtgctcgtgtcggccgacctgatgcacgacttcaagacggggcacctgacgctgacgtcgccgcggtcgatgctggtggggcaggccgtgggcacgctgatggggtgcgtcctggcgccgctcaccttcatgctcttctacagggcgttcgacgtgggcgagccggacgggtactggaaggccccctacgcgctcatctaccgcaacatggccatcctcggcgtggagggcttctcggcgctgcccaggcactgcctgcagctgtgcgcggggttcttcgcgttcgcggtgctggcgaacctggcgcgggacctgctgccgcgccggctcgcgcggctcgtgccgctgcccatggccatggccgtgccgttcctcgtgggcgccagcttcgccgtcgacatgtgcgtggggagcctcgtggtgttcgcgtggcacaagctcgacggcaagaaggccgcgctgctggtgccggccgtcgcctcggggctcatctgcggcgacgggatctggacgttcccgtcgtctctgctcgcgctggccaaggtcaagccgcccatctgcatgaagttcacgccagggagctagagggcgcgctgacgatgcgtacagaacagagggcatcgttcgtcgtttgtggggtggaatccgtgtagtagaattacataccaaccaggcctgttctaatgtccatatgagcttaatgtacggtgtatatatatgtaaaaatggaaatctgaaggatgacaggatgaattgcctgttgtctagtagcacgcatattattattattatagcatagcactaagagcaagtccaatagactcggtaaacagtctctgctcggtaaaaaaatgaaaatcgtcgtgaaaacaaattccaag

SEQ ID NO: 200841 - DNA, 3995 bp, Zea Mays
caggaatccaaatttctcccagtggaacggtggaagtgtggaaccatcgcataaatgccccactcgtcagcgtggagcgtggctatatggacccacatggcattcggctacacgcattcgctaggtgggcctcacaacagagcacacaggctggttcgagaccccgggcacgtttctacaaatcctaagaaaactccaaaaaaagacaaaataacccagaaataaaaatcgccgtggaggcgagtcgccgccggcaccgcccggcacggccttcttctccggcgaaggcggagctcgttacggggattccgcatccgttaatcggtcccaccggatccctcgccgcctcccacgggccgggccgcgccgtggcgcgcgcgcaggccgagatgcggaagaggatggagagcgtcgacgatctgatcgaggaggcaaagctgcgcaccgtctgatacaagtaaatcaatgtggacaaatgtgcccatgtcaatccttatacttgcatttctgcgatatctctccttcaaagtggagttccgttggagggaacaccctgtacgtaagcagacacatttgtctcaagcctcaaagagacagttgtctgcaaatgatcatcgcctttcgactgtaccaccagtctccagatggagaaggaaagttggttcaccttctgttgaggctgcttttgaaagtttcattgagaaaattttacgagactttgttttagacttgtggtactcagatattactcccgacagagaggcaccagaactgatacgtggcttagtacttcatgctcttggtgaattatcaggcagggtgaaagagatgaatctagttgacatgctaacaagggatatggttgatttgattggtaatcatttagatatttttcggaaaaatgaaattctaattggcgttgatgtcatgaggactttgtcttcagaggaaatagatgagagactgaagcagcacctaatagtttcacaggaacttcatccagcactgttatcttcagagcatgagtacaaggttcttcaagaaattgttgggggcattatggctctagtgttgagaccacaggatgctcagagtccgctagttcgctgtttctccagggaattgatgacctgcctaatcttgcagcctgttatgaacttcgcaagccctgtctacatcaatgagttggttgtctaccttctaaatgccaaagatacaggtagcgctggaggtacaaacatggctaatacaggaacagtaacactagtgccttacaaaggaggctcacaaggttgtcaaatggaatcaaggaatttgactgtagaaactagcggtttagttccaccaaataattctgggatgagatcacttgttacttctgaatgtggaaagtcaaaagtgtcagaggatgacaatgatggtaccatccaacctcgtcagccagactgggcggcggtattggatgcagctactaaaagaaggtcagaggttcttgcccctgagaatcttgagaacatgtgggcaattggaagaaattatcaaaagaaaatggttaaattagaccactcatcaagacagaaaggctctgaaggttcagataatagtacaagtgcaggggcagttggtaaagagctatcctctaacttcaacgacagaattgcatctgttgatgataaatacatggtcaatttgatgcaaagtaaaaataggaatgctcaatctaccttcgtcacaggtagtcatccacttgctctacaaaatatgaatgaagtgaaaccaaaagaggggagtcaagttaattttaccagcaaggaaaaaccacatgaaaccagcaacagagtaaaagcccaactaaaacggtgtaatagtactcctgatattgagaaaagatatttggcaaaaagtaaccagcccatggtttccagtgaaaggctaaatgtgaggataaatcaggatgagagaggtgttggtcctgcctcacatgttgaggtgctaatgcatgttccgaagataagatgtcgggttgttggtgcatattttgagaaacaaggttcaaaatcttttgcagtttattctattgtggtgactgatgcggataacaagagctggtttgtgaaaagaagataccggaattttgaacgtcttcatcgacaactgaaggagatacctaattattcattacatctgcctccaaagagttttctttcatctagcgttgatgattatcttgtgcaccaacggtgcattctcctggacaaatatcttcaagatctcttgtctatagctaatattgcagagcagcatgaagttttggattttctgagtgcatcctcaaagacttactctgctggaaagtcctcctctgttatgaaaaccttggctgttaatgttgatgatgcaatggatgacattgttcgacaatttaaaggagtttcagatggtttgaaacgggcggtcggcacatcaccttctagtgcaactgcccaatttgcagataataggatgtctctatcttggaaccaggaagagaaagataaccacaacttgcatcaaagaaacttggaaagggctcatagcctttcagatggtgatagtaactatgaagatcacatctcttctgtgaatagtggatgccattcagacaatgaggtcaataatagaggacatacttcaaatgatgttgagcacatcgaaacatgctctagtttggataaacaagccagcgaccaaataggaaaacctgcaaaggaatattctgattcttcaaacatgtcatctctaaatgcatttgaggatccaacaggaattcctcctgagtggatgccaacaaatgttagtgtgcctttattgaacctggttgacaaagtattccagctaaagcgacggggttggatacggttctttggatatcaaaacaaattttgcagttggtcatggaagatgcaattgatgaatggatcataagacaaatcaattggctccgaagagaagatgtcatcgtacaaggaatacattggattcaagataccctttggccaaatggtatattcttcaccaagttggatgaatataaagggaatgcaggcacaagtgaatttgacaagcagtcattagggagtcccacactggctgttggcaataaaaagggccgcacaagctcttttgaacttcatcttgaggcatccagaaatgccagtgaggtcaaaaaacttattttagatggaactccatcggccttggtcagcataattggatacaagcagtaccggcgcagcgcaagggacatgtactacttcctccaatccaacgtctgcatcaaacagctcgcatatgcaatgctagagcaggtcctcgtgacagtcttcccagagcttcgccagctaatagaagacatacatgagaaaggccgcaaagagcaagcctcattcacataccaactctgacccaagagaaaacatgctaattcagagaggagtcgcaacaattttgaacgcacttgcattgctccacggtgagttactgaaacacaaagcctttgcaattatattttgatgatgcataagttggattgaggaagtgcttggtgcttaagaatgatctgtacagatgtatatcagaggttatgtaaattatccccctgatgtagtcaaccagaacaacttacagtgagatcttgtaggtgttgaatgtaatgtatcattctttaattcccccccccccccccccccccaagaattaagttattctcccccctgacttatgctgaggcttgtaaagttttgaaagttccaagtgtatagctgtactgtttgtgttgctgagtaaatcaaaatgttgcgcgagatgccatctctgtttcccaatatttgtccggtcgcacactcaggaggcagaaggtatgtaaattttttaaccaaactaagtgattccttgttgttttggatgaaatataataacatactataatacccaaacagcgcaaattcacgtggata

SEQ ID NO: 200842 - DNA, 1251 bp, Zea Mays
attctctctagatgccgcatcatcccgtccgcgaacgtcgccgtccgggacggagagcctcgctcgcaacccacccctcctctctcggcgactcggttctccctcccgcgggacgccaccggaactgactgccgctgctggggcctggccgttctctcatggtcatggagacgccttcgcaggatcgtcgtattggagcaattgatgggtcagatataagagcatctatggagactgcctttcgtcgtaggaagttatttgcatcccaaaatgtgttggcagctacaaatttttattttcattctaccagaggacaattggacaccaaaggccaaagccacggaggacagcacgataacaagcaaataaccatacgctaatgatagagaagagaaatgatttctgagagaatgtgggcagattgttaaaaccaccgcgacaactaaaatatgtagtgctttatgtaatagtgaactagcaatggcatggactttgccctgcttgttttctttatgtgatatactagtgatgttgtggacaaatcttcagtattctcattgaagtaattgaccctgtttaggggagcttttggcagcttttgcttctccagaaagctcgaagctctctcaaactggatagcttctccaagctgacaaaagctgcactttgtagtaaaagcagagaagctccctcaaagcagcttcccgagctttatccagaaagcttctcttggaggcgcttttggaaaagctacagctcccccagacaaggaaatttatcttggtgttcattgtcattttttataacttacacaggagatggacccagagcaacatggggacaacatggcaggcaagggtggagctggacaggtctattggtccaacgcaatgtctagtttcgtgctcaaatatttgtccgacctagttgcgagtggaactaaaaccacgagcggcttcaagcaagctcatcttaacagctgtggtagagctttgtatgagaagctaggtgtccagtgttggggacttgttctcaaatgctaagaattaagaacaaggcaacataaaaagtgttaagtgttaaagtccttcgtccttcgaagcattatgtcccttcgggaaataatgagtttcggacgaaggtcataagagacataccttcgtaaacataacaagtaatgacgaaggattcatataaagcatgaaatataatataagcatcatcatagaatcatttctattttattaacat

SEQ ID NO: 200843 - DNA, 1520 bp, Zea Mays
caactcgtcaattgtcatgttctttagatgatgaggtccttgaagaaaagctcatgccgatatgatctcatattggtcattggtgctgttgtggctggatatatcttctctggtttccaacacgggtttggattctcaggctccgagaaggtagaggcacctgaaaacgagcagcacgagagcagcacaatcgggaagccacctctggtggtggagagcctgaaagaggaaccaggagctgggtggccatccctcgggacgctaattgccgatctcttgaaacttgccatcgagggagtggggaaactgctactcagcgtagtccctcaacgcatgcaacacgggaagaggaagacagatctcaccccgctcagggacaggctggtgatgcccgaggacagagaggagacggcagcggcggcgcagaagctcagcagcacaccaatgcggcccgagacagcccacgcccctaaccccgtaaccgagacggcagcacccaaggccccgaagagcacgaagccatccaagctcagggattcttcgaccctgtcaagcaagcacaggtcctccaagcggcaggaatacgcggacttctacggcacctccgagcccgctcccgtaggtgccgccgccaaggtccccaaggacaggctccgccaccgccaccaccaccgcgagaagagcggggaggtcgcctacggcgccgcccatcacgacctgaagcccgcggaagcgaagcctgccgattacagcgatccgagctacgatccgtacgtgaggagcaagtatgccgccgagagtgggtacaggtattgacgtgtcgctagctgtcctgtcctgtcctctcctgccgggggaaacagcggaatgaaaacctttcgccggcgtctgcctggcaatgttgtaagtgtgaagctatatagcctccacaagcgcaaagcgaggcgcaaacaaagctgctgctggtgcctggtgctgctcatggtttggtggtgcccatgagatgtggcaagtagtcatcctagttaggttaggtatggacggccaggacggggttggcatctggcccggtttcaggatatgctaagtgcgattttcgcagagggcgacatgtagagcctggcggcggttttgatttcgtatctgcagttcgatgtatccatccatggatcgatcccttgtgcctgcctgcctctgcctggcggcgcgtgtcggcacctgacagcaggtgatgcctcgtgacgggcagttaacccttttgccggtggctcactgatctgctgcctgcctgcctggcccggacgtctgttcgctgtccctgaatgcgatgcatcgtctccgtttcggtctgcacgtcaggtctagttgtgccgaagctgtagccatcacaggccgacctggcgtcgagagaagcgaggatggctgtgtgtagtcaatctctgtcgtactactactgtccactaccagctttggtggcgtcggtccgcatggcatgtgactggaataggctccagttagag

SEQ ID NO: 200844 - DNA, 673 bp, Zea Mays
atggtggcgggcacggtggccgtggcgccagctgcttcgtcaagcaagggcagacgcaggaggattgggtgagaacgatctgcctggtttaactgacacagagaagccaaggatgaggggtcccaaaagggcctccaagatcaggaagctgttcaatcttgcaaaggatgacgacgtgcgcaagtacgcgaacacgtaccgcaggacattcactaccaagaatggcaagaaggtgagcaaggcacctaagatccagcggcttgtgacccccttgaccttccagaggaagcgtgctagaattgctgacaagaagaagaggatcgctaagaagaagtctgaggctgctgagtaccagaagcttcttgcccagaggctgaaggaacagagggaccgccgcagtgagagcttggccaagaggaggtctaagctttctgctgccgccaaggattcggctgccacctctgcctaagaatgttcagtgctttgagatgttttcaaggcctattttgttacagcttataagtaccttatgctgccctggatgtgttgcatcagtcgatcctccctacttagacttatgagtaattgttgcaattttgtatggacatggtactggcttgtcgggattttttgagtaccagaggtttgctatgttgttttattctgtgaacaa

SEQ ID NO: 200845 - DNA, 2265 bp, Zea Mays
cggctgagctcaacggctttctcctgtgctgcgtgcgcatcgtgcggcggccgctgtgggcgcagaccccgacgaaacggcagaaaatttgaaattcctctcgctcctcgccgctgcacgcctgcaccatgccgcatctcctgtcatgttgtgtcatgtgtgcaccacgaagcgcaaaactccaatccacgcatccggaagctctacccctcaaacaccaccgccgcatcggttcgccgttagccggtcacctcgcctctctcctcccccaccgcgtccgaatcccatggggctctgtttcagcaagaagcagcaagcgaagcgccgagacgagcagccgtccagtgacgccaagaagagcagccgccggaaatccggcagcgacaccgtgcttgtggccgatgccaaaaaggcgcctcaggcaaaggcgccggcgccgcccaagaaggctgtagccaggccggaggagctggcagccgacaagaggacggtgttcgtcgtcaaggccgcggcggcggcggcggccgccgaggtcgcagccgccgcgaagggcgggtccgaggaggcggaggcgaagagggaggcgccggaggaggagccgatgcccgtcgccgtcgccgtggcccgggcgccggtgcggacgtcgagctgcaccaaggaggaggtggacgcgatcctgatccagtgcggccgcctcagccggacctcgtcggcgtcggggaatccgccatcgggcgagcacggcggcgggcgccgaaggtacgccggatccaagcggagctatgacttcgaccacggcacgaggggcggtggcggcgacgtcgacgagtgcgattggggcagggagggggccgcggtgaccaggccctccccgcgccggaggacgccggagcggaagcgctcatcgagccacgatggccgcactggcggcgggagcgggagcgggagccggagccggaggattagccggtcgccggggcggcgcgcggacgtcgtccccgccgcggggagctccgaaaccggcgagcgaggggcgaggcagcatcctggcaagatggtgtcggtcccggccagggagaaggggcgcgcgcagtcgcccgtgaaggctgcttcgtctggcaagagatacccatcgccaaggtcgaactcgcccgcgagggcagcggcctcggggaacgagaatgccggggtgcagtcgacgcacgggccgtcgctgagccgcaactcctcgaagaaggccgagcagtcgccattccgtcgcaaccccatggcggaactcgacgagaatgcgctcggcaacaaccaccatcacagcaacggcaagcctgtaaagactgcggagcgggcaaaggatcagatccccagctgccgaacaactgcgaaggagaaggaaattgtggaggaggccgtggcttcggacaccagagcagcgcccgcaaggatgaaggcgacccactcggtgagtattgtggctgagaacgtcaccaatccgaggccggggagccggtcgtcgaggcggtcctcgcgtgacttcgagcacaacgacaacacctacgcatccctgctactggaggacatccaaaactaccaccagcagagcgccagcgctgccaccgccactgccactccagcgccgaccttggcgctcccagcgtgcgtgtcgaatgccttctcgatccttgaagctgtcgccaacctcaactcctcgtcgcccgacaacaagagcttcgagctggagaggtcggtcaacgacaaggaatccttcgtcaacgggaggtacggcggcaatggtgcgagcaccaccctcgtggtggagtcggaggtcggcgtgaaggacgacctcatggagccgagcatgcacaagtacgtctccgtgcgtgacatccgtggggagaggagggagaccgagccgcaggagtctgcggggagcaacagctttgccagtgacgcctggacgtgctcgtgggagcccaagtccgttgactccacagaccggaccaggagtaggacggcctcgaagtcgtacaacggtgacaaggtggagcagtcgtggcagagcaagcagaagctgtcgtcatcccaggagcccagccaccgtggttctactagcaatgtttatgcttagcgtccagctaaatatcgagagtgtattgcttccaatcgtacttcgttttagttttgtttacggtgcaacagtttttgttgtcaactctttcttggaattccatcatcaaaactaatcaaaattgcgttcatagttcagtt

SEQ ID NO: 200846 - DNA, 4177 bp, Zea Mays
aatgggacttggaattgatgagttcatcagcattgcttgtatacaaattgaacgggatgtacataggttcaaattgggccccatgtcttcacttttgatcacgtctatggcagctcgggcccttcatcatcattaatatttgagcaatgcgtgcaccccttgatcgatgcattgttcagcggatacaatgccactgttctagcatatggccagaccggttctggcaagacatacacaatgggtactaactatagcggtgaagagaactgcggtgggataattcctcaagttatggatacaatatttagaaaagttgacacctcaaaggatggctcagagtttttaattagagtatcttttattgagatattcaaggaagatgtttttgatttgctcgatgcaaatcaagctgctgtaagacttgatgcaggttctatggcaaaagcatcagcccctggcagagtgccaattcaaatccgagagactgcaactggaggcataatccttgctggtgtcacagaggctgaggtgaagtcaaaagaagaaatggcatcatatttgacacgtgggtcgtcgtcgcgtgcaacagcaagcacaaacatgaatatgcagtcgagtcgctctcatgccatctttacaatatgtgttgaacaaaagagaacatctggtacatccgacaagtcagccagcagtgactatgatatactatcatcaaagtttcacctagttgatcttgctggttctgaaagggctaaacgtactggagcagatggacataggcttaaagaagggatacacataaataaaggccttctagctcttggcaatgttataagtgcattaggtgacgaaaagaaaaggaaagaaggggcatttgtaccataccgggatagcaaattaacccgtcttctacaggattctctaggaggaaacagcaaaacagttatgattgcatgcattagccctgctgatataaatgcagaagaaaccataaacacactcaaatatgccaatcgcgcacgcaacattcaaaacaaagcagtggtaaaccgtgatccagctacagcagagatgcaaaaattgaggagccagctggagcagctgcaaactgaacttttgttttctcgcagtgggagtgcagcgttagaagaacttcagaaaaaggtctctcttcttgagctaaagacttctgagcttaacaatgaacttaaggagaaggaattgtcatgtgagcagttggcagagcgggcacaggctgctcagttggaaagggatcagttgatgctgaagattgaatccgtgaggaatggaaaatcgttggatgatattgaaaatattgataacgaccaagacatggaccttttgaagggctacatatcaaaaatacagcagttggagagtgcgctgatgcgtcaaaacttctccaatgcttgcagacatggcttacatgaccagcttgccatggaccaggacatttttctaaatgaattgggttctggatgtgaagtagaaacaactgatgcttcaaatgaagttgatgaagaagaaaaggagagggaacattcattcatgcaagaccaacttgataaagagctgcaggaactagataaacgacttcagcaaaaggaggcagagatgaaacaatttgccaagagtgatacttctgttctcaagcaacattatgaaaagaagttaactgacttggagcaagaaaagaaagctcttcaggtttatactagcataccttgctgacactatgctcttcttttcctgacacgctagtaacaccattcttgtttgtagaaagaaatagagaatcttcgccatgcattaaccaacatatcttcttctatggatgataatgctcaaaaagttaaagaaaactatcttcagaagctgaatgcacttgagtcccaggtccatgagctcaagaaaaagcaggaagctcaacaacagcttctaaggcagaaacagaggagtgatgaggcagcaaagcgcttacaagaagatattcagcgtataaaatctcagaaggttcaacttcaacaaaagatcaagcaagagtctgaacagtttaggtcttggaaggctgcccgtgaaaaggaagtacttcagctcaagaaggaagggagacgaaatgaatatgagatgcacaagctcttggccttaaatcagaggcagaagatggtcttacagaggaaaactgaggaagcagctgctgctacaaaaagattgaaggagttgctggaagcaaagaagtcatcacgtgaaacatatggcagtgcaaatggttcggggatgcaggccttaatacgagctattgacgatgaactagaagtcactgtaagagcacacgaattacgctcatattacgagcgacaaatgcaagagagagcagcaatatccaaggaaatagcaaaactaaaggaggaatcaaagcacaagatcagtgattgtcctcaagctatgtcacctagtgctagaagttctaggatatcagcattagagaatatgttgtcctcctcatctagtgctatggtatctatggcttctcaactgtcagaagcagaggagcgggagcgtgtattcaatggtaaaggtagatggtaccatgtcaggtccctcccagaggcaaagaatataatgaattaccttttccagttagcatcatctgcaaggtctcaagtactggataaagaagtaatttgtaatgaaaaagaacacaccattactgaattgaaggaaaaggtggttgtgcttaatggtggaattaggcagttggaaacacaagtgagggatctaaggagccaaaatacacagcttttcactgcattgaacaatgcaaagaaatctgctaggtcgaatggcactggatttgctgggcgtaagagtgttcgatcttcccagcattttggttatagtaaggacaacttcaattgggtggatgatatggacatttcagacagtgagcactcggatgagttagagaatatgagtgatggatccgattcagactgggtacagtcgacgaggaaagccaaaaaacaccagagaagagtgtctagccattcaaatcctaacctggattgtcaaaatacacaaggcagtgcagaaccagagaagccctcagatgaaaagtgcattttgcccaaatacatttcatcagacggctgttcatgctcaaaatcctcctcatgcaagaccaacaaatgcgagtgcagagggtcaggtgcacaatgcggtgcaggctgtggttgtaaggattccaaatgttctaacagggattcttctactatagaaaaagccaatcagggagccatgcttcttcagaccgcgttttctgagaaggaagcccaagatgcaaagccaagaaagcctttgactaacattggtaataatgtggttaaccaaactgccgagacaaagaagcccaggaaaaaccggcgcaagtcggcaattcaactcgtcccaggacctctcctgccgtccgagccagtggccaccgaagctgcccctcgggacattgccaacattcccctcaagctaccgagagccatgtcctcggtgactcctgcggagagcaaccctcccctcacagaccgcaatgctgccaaacccgacgaatcagtgagcaccggcagcaagaatagcaccggagctgcagccacgagagcaccgtctcagctgagaaaaaacgcaaccaccgagaaggagaaccagttgcgataatccgattgctgacatgcagtatccgtgactccgtgtcgcttaagccttctgtttaacagtgggggaggctgcctcggcgtcctttggagaggcaggtagactctggaagggctggcgctctcgggttcctgtgggaaatggcgtgttctgtggaaagccttagctctgctttggctggaatgcgaccttcttgtataatggaaaagtaacatgctggattaagctatgtcagtctcgtaaatggtctccgttcattttgaacatactgaggaaatcaatctgcgcatctgtatgcttagactggtacactgcaggatgcacatttcctccacagttcgacagcataacagatgcaatcgtatatatcgttgcaaccaagtggtgttcttttgagattataatatatcttgaaaaagtcaaaggtaaaagaacttttttttaaaaaaat

SEQ ID NO: 200847 - DNA, 4402 bp, Zea Mays
gtttttcgaaatcctccgagcgggcgccgggcgctgctcgctctcaagtctcacccgttcgccattccgctcgtctctctctctcttcctcccccgccctctctcccccctcgagggggcgatcgaccccaagcctagctaagctcgccgcatcctaaatccccaaaccacgtgcagctcgccgttgtatgtcgcagagcgtggctaatccggctcgatccgccggtttgagaggcggcggccgcgcatccgcagaaggacagtgtgaaggtggccgttaacataaggccgctcatcacggtggagctgcaggatggctgcacggattgcgtcacagtcacgcaaggcgaacctcaggttcaaattgggccccatgtcttcacttttgatcacgtctatggcagctcgggcccttcatcatcattaatatttgagcaatgcgtgcaccccttgatcgatgcattgttcagcggatacaatgccactgttctagcatatggccagaccggttctggcaagacatacacaatgggtactaactatagcggtgaagagaactgcggtgggataattcctcaagttatggatacaatatttagaaaagttgacacctcaaaggatggctcagagtttttaattagagtatcttttattgagatattcaaggaagatgtttttgatttgctcgatgcaaatcaagctgctgtaagacttgatgcaggttctatggcaaaagcatcagcccctggcagagtgccaattcaaatccgagagactgcaactggaggcataatccttgctggtgtcacagaggctgaggtgaagtcaaaagaagaaatggcatcatatttgacacgtgggtcgtcgtcgcgtgcaacagcaagcacaaacatgaatatgcagtcgagtcgctctcatgccatctttacaatatgtgttgaacaaaagagaacatctggtacatccgacaagtcagccagcagtgactatgatatactatcatcaaagtttcacctagttgatcttgctggttctgaaagggctaaacgtactggagcagatggacataggcttaaagaagggatacacataaataaaggccttctagctcttggcaatgttataagtgcattaggtgacgaaaagaaaaggaaagaaggggcatttgtaccataccgggatagcaaattaacccgtcttctacaggattctctaggaggaaacagcaaaacagttatgattgcatgcattagccctgctgatataaatgcagaagaaaccataaacacactcaaatatgccaatcgcgcacgcaacattcaaaacaaagcagtggtaaaccgtgatccagctacagcagagatgcaaaaattgaggagccagctggagcagctgcaaactgaacttttgttttctcgcagtgggagtgcagcgttagaagaacttcagttgctgcagaaaaaggtctctcttcttgagctaaagacttctgagcttaacaatgaacttaaggagaaggaattgtcatgtgagcagttggcagagcgggcacaggctgctcagttggaaagggatcagttgatgctgaagattgaatccgtgaggaatggaaaatcgttggatgatattgaaaatattgataacgaccaagacatggaccttttgaagggctacatatcaaaaatacagcagttggagagtgcgctgatgcgtcaaaacttctccaatgcttgcagacatggcttacatgaccagcttgccatggaccaggacatttttctaaatgaattgggttctggatgtgaagtagaaacaactgatgcttcaaatgaagttgatgaagaagaaaaggagagggaacattcattcatgcaagaccaacttgataaagagctgcaggaactagataaacgacttcagcaaaaggaggcagagatgaaacaatttgccaagagtgatacttctgttctcaagcaacattatgaaaagaagttaactgacttggagcaagaaaagaaagctcttcagaaagaaatagagaatcttcgccatgcattaaccaacatatcttcttctatggatgataatgctcaaaaagttaaagaaaactatcttcagaagctgaatgcacttgagtcccaggtccatgagctcaagaaaaagcaggaagctcaacaacagcttctaaggcagaaacagaggagtgatgaggcagcaaagcgcttacaagaagatattcagcgtataaaatctcagaaggttcaacttcaacaaaagatcaagcaagagtctgaacagtttaggtcttggaaggctgcccgtgaaaaggaagtacttcagctcaagaaggaagggagacgaaatgaatatgagatgcacaagctcttggccttaaatcagaggcagaagatggtcttacagaggaaaactgaggaagcagctgctgctacaaaaagattgaaggagttgctggaagcaaagaagtcatcacgtgaaacatatggcagtgcaaatggttcggggatgcaggccttaatacgagctattgacgatgaactagaagtcactgtaagagcacacgaattacgctcatattacgagcgacaaatgcaagagagagcagcaatatccaaggaaatagcaaaactaaaggaggaatcaaagcacaagatcagtgattgtcctcaagctatgtcacctagtgctagaagttctaggatatcagcattagagaatatgttgtcctcctcatctagtgctatggtatctatggcttctcaactgtcagaagcagaggagcgggagcgtgtattcaatggtaaaggtagatggtaccatgtcaggtccctcccagaggcaaagaatataatgaattaccttttccagttagcatcatctgcaaggtctcaagtactggataaagaagtaatttgtaatgaaaaagaacacaccattactgaattgaaggaaaaggtggttgtgcttaatggtggaattaggcagttggaaacacaagtgagggatctaaggagccaaaatacacagcttttcactgcattgaacaatgcaaagaaatctgctaggtcgaatggcactggatttgctgggcgtaagagtgttcgatcttcccagcattttggttatagtaaggacaacttcaattgggtggatgatatggacatttcagacagtgagcactcggatgagttagagaatatgagtgatggatccgattcagactgggtacagtcgacgaggaaagccaaaaaacaccagagaagagtgtctagccattcaaatcctaacctggattgtcaaaatacacaaggcagtgcagaaccagagaagccctcagatgaaaagtgcattttgcccaaatacatttcatcagacggctgttcatgctcaaaatcctcctcatgcaagaccaacaaatgcgagtgcagagggtcaggtgcacaatgcggtgcaggctgtggttgtaaggattccaaatgttctaacagggattcttctactatagaaaaagccaatcagggagccatgcttcttcagaccgcgttttctgagaaggaagcccaagatgcaaagccaagaaagcctttgactaacattggtaataatgtggttaaccaaactgccgagacaaagaagcccaggaaaaaccggcgcaagtcggcaattcaactcgtcccaggacctctcctgccgtccgagccagtggccaccgaagctgcccctcgggacattgccaacattcccctcaagctaccgagagccatgtcctcggtgactcctgcggagagcaaccctcccctcacagaccgcaatgctgccaaacccgacgaatcagtgagcaccggcagcaagaatagcaccggagctgcagccacgagagcaccgtctcagctgagaaaaaacgcaaccaccgagaaggagaaccagttgcgataatccgattgctgacatgcagtatccgtgactccgtgtcgcttaagccttctgtttaacagtgggggaggctgcctcggcgtcctttggagaggcaggtagactctggaagggctggcgctctcgggttcctgtgggaaatggcgtgttctgtggaaagccttagctctgctttggctggaatgcgaccttcttgtataatggaaaagtaacatgctggattaagctatgtcagtctcgtaaatggtctccgttcattttgaacatactgaggaaatcaatctgcgcatctgtatgcttagactggtacactgcaggatgcacatttcctccacagttcgacagcataacagatgcaatcgtatatatcgttgcaaccaagtggtgttcttttgagattataatatatcttgaaaaagtcaaaggtaaaagaacttttttttaaaaaaat

SEQ ID NO: 200848 - DNA, 4310 bp, Zea Mays
cagtgatcggtccgcagctcacgccacgccctagtttttcgaaatcctccgagcgggcgccgggcgctgctcgctctcaagtctcacccgttcgccattccgctcgtctctctctctcttcctcccccgccctctctcccccctcgagggggcgatcgaccccaagcctagctaagctcgccgcatcctaaatccccaaaccacgtgcagctcgccgttgtatgtcgcagagcgtggctaatccggctcgatccgccggtttgaggttcaaattgggccccatgtcttcacttttgatcacgtctatggcagctcgggcccttcatcatcattaatatttgagcaatgcgtgcaccccttgatcgatgcattgttcagcggatacaatgccactgttctagcatatggccagaccggttctggcaagacatacacaatgggtactaactatagcggtgaagagaactgcggtgggataattcctcaagttatggatacaatatttagaaaagttgacacctcaaaggatggctcagagtttttaattagagtatcttttattgagatattcaaggaagatgtttttgatttgctcgatgcaaatcaagctgctgtaagacttgatgcaggttctatggcaaaagcatcagcccctggcagagtgccaattcaaatccgagagactgcaactggaggcataatccttgctggtgtcacagaggctgaggtgaagtcaaaagaagaaatggcatcatatttgacacgtgggtcgtcgtcgcgtgcaacagcaagcacaaacatgaatatgcagtcgagtcgctctcatgccatctttacaatatgtgttgaacaaaagagaacatctggtacatccgacaagtcagccagcagtgactatgatatactatcatcaaagtttcacctagttgatcttgctggttctgaaagggctaaacgtactggagcagatggacataggcttaaagaagggatacacataaataaaggccttctagctcttggcaatgttataagtgcattaggtgacgaaaagaaaaggaaagaaggggcatttgtaccataccgggatagcaaattaacccgtcttctacaggattctctaggaggaaacagcaaaacagttatgattgcatgcattagccctgctgatataaatgcagaagaaaccataaacacactcaaatatgccaatcgcgcacgcaacattcaaaacaaagcagtggtaaaccgtgatccagctacagcagagatgcaaaaattgaggagccagctggagcagctgcaaactgaacttttgttttctcgcagtgggagtgcagcgttagaagaacttcagttgctgcagaaaaaggtctctcttcttgagctaaagacttctgagcttaacaatgaacttaaggagaaggaattgtcatgtgagcagttggcagagcgggcacaggctgctcagttggaaagggatcagttgatgctgaagattgaatccgtgaggaatggaaaatcgttggatgatattgaaaatattgataacgaccaagacatggaccttttgaagggctacatatcaaaaatacagcagttggagagtgcgctgatgcgtcaaaacttctccaatgcttgcagacatggcttacatgaccagcttgccatggaccaggacatttttctaaatgaattgggttctggatgtgaagtagaaacaactgatgcttcaaatgaagttgatgaagaagaaaaggagagggaacattcattcatgcaagaccaacttgataaagagctgcaggaactagataaacgacttcagcaaaaggaggcagagatgaaacaatttgccaagagtgatacttctgttctcaagcaacattatgaaaagaagttaactgacttggagcaagaaaagaaagctcttcagaaagaaatagagaatcttcgccatgcattaaccaacatatcttcttctatggatgataatgctcaaaaagttaaagaaaactatcttcagaagctgaatgcacttgagtcccaggtccatgagctcaagaaaaagcaggaagctcaacaacagcttctaaggcagaaacagaggagtgatgaggcagcaaagcgcttacaagaagatattcagcgtataaaatctcagaaggttcaacttcaacaaaagatcaagcaagagtctgaacagtttaggtcttggaaggctgcccgtgaaaaggaagtacttcagctcaagaaggaagggagacgaaatgaatatgagatgcacaagctcttggccttaaatcagaggcagaagatggtcttacagaggaaaactgaggaagcagctgctgctacaaaaagattgaaggagttgctggaagcaaagaagtcatcacgtgaaacatatggcagtgcaaatggttcggggatgcaggccttaatacgagctattgacgatgaactagaagtcactgtaagagcacacgaattacgctcatattacgagcgacaaatgcaagagagagcagcaatatccaaggaaatagcaaaactaaaggaggaatcaaagcacaagatcagtgattgtcctcaagctatgtcacctagtgctagaagttctaggatatcagcattagagaatatgttgtcctcctcatctagtgctatggtatctatggcttctcaactgtcagaagcagaggagcgggagcgtgtattcaatggtaaaggtagatggtaccatgtcaggtccctcccagaggcaaagaatataatgaattaccttttccagttagcatcatctgcaaggtctcaagtactggataaagaagtaatttgtaatgaaaaagaacacaccattactgaattgaaggaaaaggtggttgtgcttaatggtggaattaggcagttggaaacacaagtgagggatctaaggagccaaaatacacagcttttcactgcattgaacaatgcaaagaaatctgctaggtcgaatggcactggatttgctgggcgtaagagtgttcgatcttcccagcattttggttatagtaaggacaacttcaattgggtggatgatatggacatttcagacagtgagcactcggatgagttagagaatatgagtgatggatccgattcagactgggtacagtcgacgaggaaagccaaaaaacaccagagaagagtgtctagccattcaaatcctaacctggattgtcaaaatacacaaggcagtgcagaaccagagaagccctcagatgaaaagtgcattttgcccaaatacatttcatcagacggctgttcatgctcaaaatcctcctcatgcaagaccaacaaatgcgagtgcagagggtcaggtgcacaatgcggtgcaggctgtggttgtaaggattccaaatgttctaacagggattcttctactatagaaaaagccaatcagggagccatgcttcttcagaccgcgttttctgagaaggaagcccaagatgcaaagccaagaaagcctttgactaacattggtaataatgtggttaaccaaactgccgagacaaagaagcccaggaaaaaccggcgcaagtcggcaattcaactcgtcccaggacctctcctgccgtccgagccagtggccaccgaagctgcccctcgggacattgccaacattcccctcaagctaccgagagccatgtcctcggtgactcctgcggagagcaaccctcccctcacagaccgcaatgctgccaaacccgacgaatcagtgagcaccggcagcaagaatagcaccggagctgcagccacgagagcaccgtctcagctgagaaaaaacgcaaccaccgagaaggagaaccagttgcgataatccgattgctgacatgcagtatccgtgactccgtgtcgcttaagccttctgtttaacagtgggggaggctgcctcggcgtcctttggagaggcaggtagactctggaagggctggcgctctcgggttcctgtgggaaatggcgtgttctgtggaaagccttagctctgctttggctggaatgcgaccttcttgtataatggaaaagtaacatgctggattaagctatgtcagtctcgtaaatggtctccgttcattttgaacatactgaggaaatcaatctgcgcatctgtatgcttagactggtacactgcaggatgcacatttcctccacagttcgacagcataacagatgcaatcgtatatatcgttgcaaccaagtggtgttcttttgagattataatatatcttgaaaaagtcaaaggtaaaagaacttttttttaaaaaaat

SEQ ID NO: 200849 - DNA, 4451 bp, Zea Mays
cagtgatcggtccgcagctcacgccacgccctagtttttcgaaatcctccgagcgggcgccgggcgctgctcgctctcaagtctcacccgttcgccattccgctcgtctctctctctcttcctcccccgccctctctcccccctcgagggggcgatcgaccccaagcctagctaagctcgccgcatcctaaatccccaaaccacgtgcagctcgccgttgtatgtcgcagagcgtggctaatccggctcgatccgccggtttgagggttccgatggagaccacagaggcggcggccgcgcatccgcagaaggacagtgtgaaggtggccgttaacataaggccgctcatcacggtggagctgcaggatggctgcacggattgcgtcacagtcacgcaaggcgaacctcaggttcaaattgggccccatgtcttcacttttgatcacgtctatggcagctcgggcccttcatcatcattaatatttgagcaatgcgtgcaccccttgatcgatgcattgttcagcggatacaatgccactgttctagcatatggccagaccggttctggcaagacatacacaatgggtactaactatagcggtgaagagaactgcggtgggataattcctcaagttatggatacaatatttagaaaagttgacacctcaaaggatggctcagagtttttaattagagtatcttttattgagatattcaaggaagatgtttttgatttgctcgatgcaaatcaagctgctgtaagacttgatgcaggttctatggcaaaagcatcagcccctggcagagtgccaattcaaatccgagagactgcaactggaggcataatccttgctggtgtcacagaggctgaggtgaagtcaaaagaagaaatggcatcatatttgacacgtgggtcgtcgtcgcgtgcaacagcaagcacaaacatgaatatgcagtcgagtcgctctcatgccatctttacaatatgtgttgaacaaaagagaacatctggtacatccgacaagtcagccagcagtgactatgatatactatcatcaaagtttcacctagttgatcttgctggttctgaaagggctaaacgtactggagcagatggacataggcttaaagaagggatacacataaataaaggccttctagctcttggcaatgttataagtgcattaggtgacgaaaagaaaaggaaagaaggggcatttgtaccataccgggatagcaaattaacccgtcttctacaggattctctaggaggaaacagcaaaacagttatgattgcatgcattagccctgctgatataaatgcagaagaaaccataaacacactcaaatatgccaatcgcgcacgcaacattcaaaacaaagcagtggtaaaccgtgatccagctacagcagagatgcaaaaattgaggagccagctggagcagctgcaaactgaacttttgttttctcgcagtgggagtgcagcgttagaagaacttcagttgctgcagaaaaaggtctctcttcttgagctaaagacttctgagcttaacaatgaacttaaggagaaggaattgtcatgtgagcagttggcagagcgggcacaggctgctcagttggaaagggatcagttgatgctgaagattgaatccgtgaggaatggaaaatcgttggatgatattgaaaatattgataacgaccaagacatggaccttttgaagggctacatatcaaaaatacagcagttggagagtgcgctgatgcgtcaaaacttctccaatgcttgcagacatggcttacatgaccagcttgccatggaccaggacatttttctaaatgaattgggttctggatgtgaagtagaaacaactgatgcttcaaatgaagttgatgaagaagaaaaggagagggaacattcattcatgcaagaccaacttgataaagagctgcaggaactagataaacgacttcagcaaaaggagagatgaaacaatttgccaagagtgatacttctgttctcaagcaacattatgaaaagaagttaactgacttggagcaagaaaagaaagctcttcagaaagaaatagagaatcttcgccatgcattaaccaacatatcttcttctatggatgataatgctcaaaaagttaaagaaaactatcttcagaagctgaatgcacttgagtcccaggtccatgagctcaagaaaaagcaggaagctcaacaacagcttctaaggcagaaacagaggagtgatgaggcagcaaagcgcttacaagaagatattcagcgtataaaatctcagaaggttcaacttcaacaaaagatcaagcaagagtctgaacagtttaggtcttggaaggctgcccgtgaaaaggaagtacttcagctcaagaaggaagggagacgaaatgaatatgagatgcacaagctcttggccttaaatcagaggcagaagatggtcttacagaggaaaactgaggaagcagctgctgctacaaaaagattgaaggagttgctggaagcaaagaagtcatcacgtgaaacatatggcagtgcaaatggttcggggatgcaggccttaatacgagctattgacgatgaactagaagtcactgtaagagcacacgaattacgctcatattacgagcgacaaatgcaagagagagcagcaatatccaaggaaatagcaaaactaaaggaggaatcaaagcacaagatcagtgattgtcctcaagctatgtcacctagtgctagaagttctaggatatcagcattagagaatatgttgtcctcctcatctagtgctatggtatctatggcttctcaactgtcagaagcagaggagcgggagcgtgtattcaatggtaaaggtagatggtaccatgtcaggtccctcccagaggcaaagaatataatgaattaccttttccagttagcatcatctgcaaggtctcaagtactggataaagaagtaatttgtaatgaaaaagaacacaccattactgaattgaaggaaaaggtggttgtgcttaatggtggaattaggcagttggaaacacaagtgagggatctaaggagccaaaatacacagcttttcactgcattgaacaatgcaaagaaatctgctaggtcgaatggcactggatttgctgggcgtaagagtgttcgatcttcccagcattttggttatagtaaggacaacttcaattgggtggatgatatggacatttcagacagtgagcactcggatgagttagagaatatgagtgatggatccgattcagactgggtacagtcgacgaggaaagccaaaaaacaccagagaagagtgtctagccattcaaatcctaacctggattgtcaaaatacacaaggcagtgcagaaccagagaagccctcagatgaaaagtgcattttgcccaaatacatttcatcagacggctgttcatgctcaaaatcctcctcatgcaagaccaacaaatgcgagtgcagagggtcaggtgcacaatgcggtgcaggctgtggttgtaaggattccaaatgttctaacagggattcttctactatagaaaaagccaatcagggagccatgcttcttcagaccgcgttttctgagaaggaagcccaagatgcaaagccaagaaagcctttgactaacattggtaataatgtggttaaccaaactgccgagacaaagaagcccaggaaaaaccggcgcaagtcggcaattcaactcgtcccaggacctctcctgccgtccgagccagtggccaccgaagctgcccctcgggacattgccaacattcccctcaagctaccgagagccatgtcctcggtgactcctgcggagagcaaccctcccctcacagaccgcaatgctgccaaacccgacgaatcagtgagcaccggcagcaagaatagcaccggagctgcagccacgagagcaccgtctcagctgagaaaaaacgcaaccaccgagaaggagaaccagttgcgataatccgattgctgacatgcagtatccgtgactccgtgtcgcttaagccttctgtttaacagtgggggaggctgcctcggcgtcctttggagaggcaggtagactctggaagggctggcgctctcgggttcctgtgggaaatggcgtgttctgtggaaagccttagctctgctttggctggaatgcgaccttcttgtataatggaaaagtaacatgctggattaagctatgtcagtctcgtaaatggtctccgttcattttgaacatactgaggaaatcaatctgcgcatctgtatgcttagactggtacactgcaggatgcacatttcctccacagttcgacagcataacagatgcaatcgtatatatcgttgcaaccaagtggtgttcttttgagattataatatatcttgaaaaagtcaaaggtaaaagaacttttttttaaaaaaat

SEQ ID NO: 200850 - DNA, 4493 bp, Zea Mays
cacagaccatgtttgcaaacaggtatgcgttaagccttcagtgatcggtccgcagctcacgccacgccctagtttttcgaaatcctccgagcgggcgccgggcgctgctcgctctcaagtctcacccgttcgccattccgctcgtctctctctctcttcctcccccgccctctctcccccctcgagggggcgatcgaccccaagcctagctaagctcgccgcatcctaaatccccaaaccacgtgcagctcgccgttgtatgtcgcagagcgtggctaatccggctcgatccgccggtttgagggttccgatggagaccacagaggcggcggccgcgcatccgcagaaggacagtgtgaaggtggccgttaacataaggccgctcatcacggtggagctgcaggatggctgcacggattgcgtcacagtcacgcaaggcgaacctcaggttcaaattgggccccatgtcttcacttttgatcacgtctatggcagctcgggcccttcatcatcattaatatttgagcaatgcgtgcaccccttgatcgatgcattgttcagcggatacaatgccactgttctagcatatggccagaccggttctggcaagacatacacaatgggtactaactatagcggtgaagagaactgcggtgggataattcctcaagttatggatacaatatttagaaaagttgacacctcaaaggatggctcagagtttttaattagagtatcttttattgagatattcaaggaagatgtttttgatttgctcgatgcaaatcaagctgctgtaagacttgatgcaggttctatggcaaaagcatcagcccctggcagagtgccaattcaaatccgagagactgcaactggaggcataatccttgctggtgtcacagaggctgaggtgaagtcaaaagaagaaatggcatcatatttgacacgtgggtcgtcgtcgcgtgcaacagcaagcacaaacatgaatatgcagtcgagtcgctctcatgccatctttacaatatgtgttgaacaaaagagaacatctggtacatccgacaagtcagccagcagtgactatgatatactatcatcaaagtttcacctagttgatcttgctggttctgaaagggctaaacgtactggagcagatggacataggcttaaagaagggatacacataaataaaggccttctagctcttggcaatgttataagtgcattaggtgacgaaaagaaaaggaaagaaggggcatttgtaccataccgggatagcaaattaacccgtcttctacaggattctctaggaggaaacagcaaaacagttatgattgcatgcattagccctgctgatataaatgcagaagaaaccataaacacactcaaatatgccaatcgcgcacgcaacattcaaaacaaagcagtggtaaaccgtgatccagctacagcagagatgcaaaaattgaggagccagctggagcagctgcaaactgaacttttgttttctcgcagtgggagtgcagcgttagaagaacttcagttgctgcagaaaaaggtctctcttcttgagctaaagacttctgagcttaacaatgaacttaaggagaaggaattgtcatgtgagcagttggcagagcgggcacaggctgctcagttggaaagggatcagttgatgctgaagattgaatccgtgaggaatggaaaatcgttggatgatattgaaaatattgataacgaccaagacatggaccttttgaagggctacatatcaaaaatacagcagttggagagtgcgctgatgcgtcaaaacttctccaatgcttgcagacatggcttacatgaccagcttgccatggaccaggacatttttctaaatgaattgggttctggatgtgaagtagaaacaactgatgcttcaaatgaagttgatgaagaagaaaaggagagggaacattcattcatgcaagaccaacttgataaagagctgcaggaactagataaacgacttcagcaaaaggaggcagagatgaaacaatttgccaagagtgatacttctgttctcaagcaacattatgaaaagaagttaactgacttggagcaagaaaagaaagctcttcagaaagaaatagagaatcttcgccatgcattaaccaacatatcttcttctatggatgataatgctcaaaaagttaaagaaaactatcttcagaagctgaatgcacttgagtcccaggtccatgagctcaagaaaaagcaggaagctcaacaacagcttctaaggcagaaacagaggagtgatgaggcagcaaagcgcttacaagaagatattcagcgtataaaatctcagaaggttcaacttcaacaaaagatcaagcaagagtctgaacagtttaggtcttggaaggctgcccgtgaaaaggaagtacttcagctcaagaaggaagggagacgaaatgaatatgagatgcacaagctcttggccttaaatcagaggcagaagatggtcttacagaggaaaactgaggaagcagctgctgctacaaaaagattgaaggagttgctggaagcaaagaagtcatcacgtgaaacatatggcagtgcaaatggttcggggatgcaggccttaatacgagctattgacgatgaactagaagtcactgtaagagcacacgaattacgctcatattacgagcgacaaatgcaagagagagcagcaatatccaaggaaatagcaaaactaaaggaggaatcaaagcacaagatcagtgattgtcctcaagctatgtcacctagtgctagaagttctaggatatcagcattagagaatatgttgtcctcctcatctagtgctatggtatctatggcttctcaactgtcagaagcagaggagcgggagcgtgtattcaatggtaaaggtagatggtaccatgtcaggtccctcccagaggcaaagaatataatgaattaccttttccagttagcatcatctgcaaggtctcaagtactggataaagaagtaatttgtaatgaaaaagaacacaccattactgaattgaaggaaaaggtggttgtgcttaatggtggaattaggcagttggaaacacaagtgagggatctaaggagccaaaatacacagcttttcactgcattgaacaatgcaaagaaatctgctaggtcgaatggcactggatttgctgggcgtaagagtgttcgatcttcccagcattttggttatagtaaggacaacttcaattgggtggatgatatggacatttcagacagtgagcactcggatgagttagagaatatgagtgatggatccgattcagactgggtacagtcgacgaggaaagccaaaaaacaccagagaagagtgtctagccattcaaatcctaacctggattgtcaaaatacacaaggcagtgcagaaccagagaagccctcagatgaaaagtgcattttgcccaaatacatttcatcagacggctgttcatgctcaaaatcctcctcatgcaagaccaacaaatgcgagtgcagagggtcaggtgcacaatgcggtgcaggctgtggttgtaaggattccaaatgttctaacagggattcttctactatagaaaaagccaatcagggagccatgcttcttcagaccgcgttttctgagaaggaagcccaagatgcaaagccaagaaagcctttgactaacattggtaataatgtggttaaccaaactgccgagacaaagaagcccaggaaaaaccggcgcaagtcggcaattcaactcgtcccaggacctctcctgccgtccgagccagtggccaccgaagctgcccctcgggacattgccaacattcccctcaagctaccgagagccatgtcctcggtgactcctgcggagagcaaccctcccctcacagaccgcaatgctgccaaacccgacgaatcagtgagcaccggcagcaagaatagcaccggagctgcagccacgagagcaccgtctcagctgagaaaaaacgcaaccaccgagaaggagaaccagttgcgataatccgattgctgacatgcagtatccgtgactccgtgtcgcttaagccttctgtttaacagtgggggaggctgcctcggcgtcctttggagaggcaggtagactctggaagggctggcgctctcgggttcctgtgggaaatggcgtgttctgtggaaagccttagctctgctttggctggaatgcgaccttcttgtataatggaaaagtaacatgctggattaagctatgtcagtctcgtaaatggtctccgttcattttgaacatactgaggaaatcaatctgcgcatctgtatgcttagactggtacactgcaggatgcacatttcctccacagttcgacagcataacagatgcaatcgtatatatcgttgcaaccaagtggtgttcttttgagattataatatatcttgaaaaagtcaaaggtaaaagaacttttttttaaaaaaat

SEQ ID NO: 200851 - DNA, 3740 bp, Zea Mays
cttttccgtgccgttctggcactgagcacatggccacacccacgctgccgctggcctgctcagcacactagctcacacacactccccggcctcgcccaggccgccgtcctctccatcctcggaagctccagccgccgctaccattaccagtgagttgaggtgctctggtgctgggctgactgtacccgccgctaccattaccacgcgctgcaccgtagcagagcggttccaaccccgtcgaggcaaaaagccctggccgttccctggccccgtgccgccgccgccgcctccgtgcgcccaggcttctttctgtgacttcgctaaaatgggtcatgtcctcatcatcaggaccacactttcaagtcaaaattgaagataccatcttccactattccactttcatgtcaaaactcaagatgacggacatgaggcgtcactctgtggatgtcccgctgtcaagaaccttggtgcagctcaagcgattgagatcgctgcgggatccagcgacaaactcaatgggcaagttcgcatctcctgccgaccacatggtgtgggagactgcttctagcaatggggtggctctggagctcggcaggtcggcacataatcaccaggttgaagaagacgaggacgtgggagccgagcctacaatggggtcggagcggagttttcggggaccaaacgcaaggactgcgtcctacaggagatcttctgctgtcaggatcagaggcttgaacccaccaagaaacaagcaggttcatcgtgtccgccgagacggtcaccgcaagtcagtggactctagccactcgaatcatagttctatccgtcaattggcgaacaatttggtcaacaatgtggatgcagaggaggaagtgaattcttatgaaaggccaaaatttgcaatgccaggtaaatctgacgaagacgaagtgaaaatgccaggccactccaaattcaggagcaagccttcggctgcaatgagccgtgtcgggagcccctgcatgtcagctagcgaggcaagatcagggcatggaaccgaggatacacgactgaggtcaaacgatgtcgtggggtcaaattttagtggctgtggtataagctactgctggtcaggagcgtcaaagtgccgagagctttattctgacagtgatggtccagatcagcctctcttatctacagatgggactgaggcagcgttccaaggcaacgtaccatacactgagacgcccaggtgtctaagccagaaatttcgccctcgttccttcagcgaattggttggactaaacgttgttgcccagtccctcttatattcctgctgcaaaggaaaagttgccccaatgtacctgtttcatggcccccggggcacaggcaagacatccacggcaaggattttcgccgcggctctaaattgcgtgtcccttgaagagcaaaggccatgtgggttctgcaaagagtgtgtcatccttttctctgggaagggtagagatgtgaaagagcttgacgtggcgaaaatgggtcgtttaggtcgagtgaaggcgcttctcaagagcgcatccctcgtaccctactcttcgcgcttcaaggttttcataatagatgaatgccatctcttgcaagaagacgcatggtcagcaatactgaagagccttgacgagccataccggcatacggtatacattatgatcacttctgacatagaaagcctgcctcgcgcttccatcacacgttgccagaagttccattttccgaagataaaggtggcagatattgtatacaggctggagaagatctgtataggagaaggattggaattcgaccatgatgggttgtacttcattgctgcaaagtctagtggttctcttagagattctgaagtaatgcttgaccagctcagtttgcttgggaagaagatcacaatttctcttgtgcatgaacttgtaggatcagtgtctgatgacgagttgattgagttgcttgatctagcattgtcatctgacacaaccaatactgtaagacgagcccgagaacttatggggtcagcaattgatcctctgcagcttgtttctcagctggccaaccttattatggacattctctcaggacgatgtcaatctgctgtcagtgaagtcagcaaaagtttcttgggtagatatgcattatcagaggttggaataaagaaattaagacatgcactgaagatactatcagaaactgaaaaacaattgaggacatcaaggaatcaggctacttgggttacagttgcgcttttgcagtttggcaccaatgaacctaaccttattgctgaaccgaatgatatgcattcacattcagtaactggatatacagatgactgggtttccaaggtgcactcaaacaccaatttttgtcaggcatgtaacagcagcaagtccaactgttctgagagacactgtagacggcttaagcttgagaacatatggaggagagccattggaaagtgtcgatcaagatcagccaaaagtttcctcaggaaagaaggcttcttatcatcggttcatgttaccgaagagctggctatagcagaagttggcttcggacacccagatcacctatcaagagcagagaaaatgcaaagcctaatagagtgctctttacagcacgttcttgggtgcaatgtggagatcagattcaaacttgtaccttgtccagtgagaaaagatgctaggttgaagagacactcgttcagttttctcagttgctctggccggaagcaagagctgtcagattcagtagtgactgatgaagacgaagctgtgaggcctggggcaagggagacaccgcttaaaggctacacctctagccagcaggagtcaccatataccatgcaacgtgtcgattcgaaaccaacagcctatggttgcgaggatgatggtcggagcaccttgacgtcgaacagatccatgacagatgacatgacaaggacgtgcaggtccgagactaactactcaaaggggggtgtgagtgatcagggccgctttggtagcatccaggagcctgacctacagccaagctgcttctcgcgaacactgaggcttcagaagaagctgttgtcttctggcgcagcgcacaccatctgtctgaggatccagccgcataacaagatggaattcctacctaagaaggaatttgatacgtacttctgcgcgtatgagccttacgagcagtgtccaagatcagtttcaagggctacttacagttcaagagatgatgacttgtggagcaagaattcacggttcggttcaaatctactctgctggaaagccccaaaacaacccatgtaacggagttctgccagagcccagagcactttcacaccagcaagctgctttcttacaagcgtaactgcgacaaccagcaccagcattgctgccggggaaaagtgaaccatggtagcagaacattggcatgctgaaaaacagtgtcaaatcattcagtttttgctaggacatttaccaatttctcccgaagctggaggcatgggcaccacctgtggggacaattttcaaaggaaatcccaggaggggtctttgtttttattgttcttggcaggcagctgaggaactattcatcagtgatgtttcttggatgtgctggtccttcaaaatgctaatgggcagttgtacatgttacgttatatgctactgaactcagaggctataatacactttttttatgtcaacacatagaaattaagatctgct

SEQ ID NO: 200852 - DNA, 3629 bp, Zea Mays
gcggggtccgttctgcttctgatccgtgctcttgcgatgcgaggagctgaacgacaaggattgcggccggtgctgcatctatacgagtgacttcgctaaaatgggtcatgtcctcatcatcaggaccacactttcaagtcaaaattgaagataccatcttccactattccactttcatgtcaaaactcaagatgacggacatgaggcgtcactctgtggatgtcccgctgtcaagaaccttggtgcagctcaagcgattgagatcgctgcgggatccagcgacaaactcaatgggcaagttcgcatctcctgccgaccacatggtgtgggagactgcttctagcaatggggtggctctggagctcggcaggtcggcacataatcaccaggttgaagaagacgaggacgtgggagccgagcctacaatggggtcggagcggagttttcggggaccaaacgcaaggactgcgtcctacaggagatcttctgctgtcaggatcagaggcttgaacccaccaagaaacaagcaggttcatcgtgtccgccgagacggtcaccgcaagtcagtggactctagccactcgaatcatagttctatccgtcaattggcgaacaatttggtcaacaatgtggatgcagaggaggaagtgaattcttatgaaaggccaaaatttgcaatgccaggtaaatctgacgaagacgaagtgaaaatgccaggccactccaaattcaggagcaagccttcggctgcaatgagccgtgtcgggagcccctgcatgtcagctagcgaggcaagatcagggcatggaaccgaggatacacgactgaggtcaaacgatgtcgtggggtcaaattttagtggctgtggtataagctactgctggtcaggagcgtcaaagtgccgagagctttattctgacagtgatggtccagatcagcctctcttatctacagatgggactgaggcagcgttccaaggcaacgtaccatacactgagacgcccaggtgtctaagccagaaatttcgccctcgttccttcagcgaattggttggactaaacgttgttgcccagtccctcttatattcctgctgcaaaggaaaagttgccccaatgtacctgtttcatggcccccggggcacaggcaagacatccacggcaaggattttcgccgcggctctaaattgcgtgtcccttgaagagcaaaggccatgtgggttctgcaaagagtgtgtcatccttttctctgggaagggtagagatgtgaaagagcttgacgtggcgaaaatgggtcgtttaggtcgagtgaaggcgcttctcaagagcgcatccctcgtaccctactcttcgcgcttcaaggttttcataatagatgaatgccatctcttgcaagaagacgcatggtcagcaatactgaagagccttgacgagccataccggcatacggtatacattatgatcacttctgacatagaaagcctgcctcgcgcttccatcacacgttgccagaagttccattttccgaagataaaggtggcagatattgtatacaggctggagaagatctgtataggagaaggattggaattcgaccatgatgggttgtacttcattgctgcaaagtctagtggttctcttagagattctgaagtaatgcttgaccagctcagtttgcttgggaagaagatcacaatttctcttgtgcatgaacttgtaggatcagtgtctgatgacgagttgattgagttgcttgatctagcattgtcatctgacacaaccaatactgtaagacgagcccgagaacttatggggtcagcaattgatcctctgcagcttgtttctcagctggccaaccttattatggacattctctcaggacgatgtcaatctgctgtcagtgaagtcagcaaaagtttcttgggtagatatgcattatcagaggttggaataaagaaattaagacatgcactgaagatactatcagaaactgaaaaacaattgaggacatcaaggaatcaggctacttgggttacagttgcgcttttgcagtttggcaccaatgaacctaaccttattgctgaaccgaatgatatgcattcacattcagtaactggatatacagatgactgggtttccaaggtgcactcaaacaccaatttttgtcaggcatgtaacagcagcaagtccaactgttctgagagacactgtagacggcttaagcttgagaacatatggaggagagccattggaaagtgtcgatcaagatcagccaaaagtttcctcaggaaagaaggcttcttatcatcggttcatgttaccgaagagctggctatagcagaagttggcttcggacacccagatcacctatcaagagcagagaaaatgcaaagcctaatagagtgctctttacagcacgttcttgggtgcaatgtggagatcagattcaaacttgtaccttgtccagtgagaaaagatgctaggttgaagagacactcgttcagttttctcagttgctctggccggaagcaagagctgtcagattcagtagtgactgatgaagacgaagctgtgaggcctggggcaagggagacaccgcttaaaggctacacctctagccagcaggagtcaccatataccatgcaacgtgtcgattcgaaaccaacagcctatggttgcgaggatgatggtcggagcaccttgacgtcgaacagatccatgacagatgacatgacaaggacgtgcaggtccgagactaactactcaaaggggggtgtgagtgatcagggccgctttggtagcatccaggagcctgacctacagccaagctgcttctcgcgaacactgaggcttcagaagaagctgttgtcttctggcgcagcgcacaccatctgtctgaggatccagccgcataacaagatggaattcctacctaagaaggaatttgatacgtacttctgcgcgtatgagccttacgagcagtgtccaagatcagtttcaagggctacttacagttcaagagatgatgacttgtggagcaagaattcacggttcggttcaaatctactctgctggaaagccccaaaacaacccatgtaacggaggtacattactctgtattttcacatcacttggtccgtcggaatagccatgtgaattcagcgtcttggctcgctcggttgctgtttgctagtgttcatattacatgttgaccccagttctgccagagcccagagcactttcacaccagcaagctgctttcttacaagcgtaactgcgacaaccagcaccagcattgctgccggggaaaagtgaaccatggtagcagaacattggcatgctgaaaaacagtgtcaaatcattcagtttttgctaggacatttaccaatttctcccgaagctggaggcatgggcaccacctgtggggacaattttcaaaggaaatcccaggaggggtctttgtttttattgttcttggcaggcagctgaggaactattcatcagtgatgtttcttggatgtgctggtccttcaaaatgctaatgggcagttgtacatgttacgttatatgctactgaactcagaggctataatacactttttttatgtcaacacatagaaattaagatctgct

SEQ ID NO: 200853 - DNA, 3635 bp, Zea Mays
gtgcggtggtgtggtggccttctcttctctctcctccccgctccgacgcgacgaattcgaagttggaataggcgagcggggcagcgccatttccgtccggatttctcttctgtcttctccttccttggctgtccagtctaggaggggagaaaggcaagttcaaaaaaaaaaaaaccccgcccgaatcccaacaaaaccctaggcctcacgtccccggccgccgccgccatgccgcccggggccgacgcgtcctccctcgccgccgccgtgctcgacgcaggcacgccaccggccgccgccgccgccacatccagagtgctcgactacctctcccgccacgccgacgaccaaccgcgggccttcttcgccgacgccttcccgtccctgctctaccgcctctttgtctccgcaccctcctccccatcattcatcgacctcgccgctgccgaccccgcgctcggcgacctcatcctctccctcatctaccccaccggcccgctcctcgccgccgccgccgccgcagaccgcctcaccctcatacgttacgtcttcccctccgagcgcctccccgactggctccgactcgccctcgcgtctcccccctccaccgacctcgcctcgccgctcctgtcgcgtcgcgtcgcctccgagctccacctctccgtcttcgagtactacctcttctggttcgcctactaccctgtctcgtccgcatcatctgccgccccggccgcatccgcctccaaccctcgactcacctcgcgcgcccgcctcgagacctgggtctctactctcgccaccacggccatccgcaaatccggtcagaagcccgaaaactcgctatacctcaggctgctctatgcctacctcagggagttcgtgccaacgcgcactccacccgttaatatgtccgggggcggcaccctgctccaccgtgcacccagccatggcgtcgatgcaatcgactcgtttgcacgggccgagttcttccttcacacccttgtccacttctggcttgtcggcgatgacttctcgccgctccccaagcagacttgccatgcactcggcttgcggttaccttctcgtgctcatgctgacttgagtgagcggccaccgtcgccaggcctgggtgatgcagtgaagctgcttgtcatgtacctcaactgctgcgatggccgcgcactagccgatgcgtgtgtgccatctcctcaagggttgtcagtgtccaatgggctctgtgatacccaggttgggttctggaatccattgatacagaggcctttgtaccggtttgtactcaggaccttcttattctgccccattggcactgcgataaaaaatgcgtcacaagtcttctctgtgtggttggcttatatggagccatggaaagttacccaacaggagctggataggtatggcaagcagcaaggcggggatgagaaggagccacaaacgactaagatggtgtacaattcatcgtggaggacgtatgtcctgtcgaattacctgttctacaactcaatggttgtgcatttcttgggatttgcgcacaagtttatccattctgatgttgcctcagtgctgctaatggtacacaaggtgttggaggtcttgagctcttccccggagctattaggtcttctccataaagtggacgctgcttgccactctaggctagtggcatcatccccagcatctgatcatgtgttgaagactgggaggatggtttgtcagaaagtgatgcagatgggtcattgttgcatgagcattggaactctgatcttaggcttttcagttacgatgagaatggggcttataatcttcttcagctacttttggtccgagcagagtcagagatactgcgccttccaggtgagacgcaacaagcactccagacgctggattctatcaagtcacagatgaaaacagccttccaagggcacattgaaagaattaacgggaatacgtcgttggaggaatcacataatcaacagcatcaggtgcgtggggaggtattcacacctaagcatcccagcttgaggaagggttcttgggctgatgttaaatacaaaggtgagtggatgaaaaggccaatctcagaggctgaagtagcctggcttgcaaggattctgatccggctctctgactggttgaatgacgccctggggcttgagtgtgctgatgctgaaggtagtcctgctggcgccacctacattcagtttgatgggaacacgacggtgggcgggccaagggatgctgcgagaatggctctcggtgctgtatgttcattcatggtgctagtggggcaagcggtactgaagttgatgaggtcgcacagggtgaagatcagtctgagagtgtttgcttcgaagaaactgctctcagccgctgttgtgctgtatgcagtggtggccgtgacacggaatgtatcgcgttgagagttttgatttgataatggggttatgctgtataagctaagcttgtagaggaagtcgatcgataggaggaaaagaaaagaaaagtgtgtcgttctgctgttgtccagtaagcttgatgtaaatgcctgcactggaatggttttggacttaaaaacgcaatggagtaattaggacagttctaacagtattaaaacagctgctagctcctcatggaagcgttaaatgtatcggtggccttcgaagttcacttaaaaggtcaatacatttttaggctcttatttctaagcttgtaaaaatggtgcattgttatggataacaaacttaaggacctagaaacaatgtaactcagaattcatgcatttaactcagaatgtttgattctgcgtggacaaaacagtccgattgcattcccaagctcttaaacgattagtactagtatatagtagttagaagaaagaggaatcactattgataacagatgtcggcattctcctcgctcctgctgccatcgtttttcctttttcctggacagccactgcaactcctcccaaatcctcccacccggtttagccggctccgctgccaccgccgcgactccacctctgtcgccaccatggtcaagtccaaggccatcagggtccacgagctgggcggccccgaggtgctgcggtgggaggaggtggaggtcggggagcccggtgaaggggagatccgcatcaggaccaccgccgtcggcgtcaacttcatcgacatctactttcggaagggggtctacgccgcgcccaccatgcccttcaccccaggaatggaagccgttggcgtcgtcaccgctgttgggcctggcctcactggcaggaaggtgggcgatgttgttgcatatgccggcaaccccatgggctcctatgctcaggagcagatccttccagcggctgtcgctgttcctgttccaccttccgttgatcataagcaagcagcttctgtgatgctcaagggcatgaccgcccatgttctgcttcgccgggtattcaaggttgagagtggccatactatcctggtccatgctgctgctggtggtgtcggctcactcctttgtcaatgggcaaacgcccttggtgccactgtcatcgggactgtttccaatcaagaaaaagccgctcaggcagctcaggatggatgccaccatgacgaatctactag

SEQ ID NO: 200854 - DNA, 6064 bp, Zea Mays
ctcgacctcctctatttgggcacgtcatctcctctatccccacgcgtctcctgctctatgtttccaaagccaagcgctctttctccatgccgctcagcctcctctctgtttcagtcgtggagcatcagcaatccacatcatctccgttggccgagcggttccctcgcggcgcccaggatccttcccagacgcgctcggctccctggtctgtctgtcaccttgccgacgcctcctctgctcctccacctgtagctcgcccctatctcctcctctccccatggcggctccccctggatccctccctgcgcgaaccctctcctgcagcacgccagtgccgaccacaatctcccatggcgcaggagctccccattctcctcttgctagggcgccgtcgctgggctcgcccagtctctcgctttctctgctccagcagcaaccgtctcaaggtattccagttcgtgagcagcagcaatcgatatagctcctccgcaccgtggcgcagccagccgtcgatgccatgtccctgcaacctcgtgtcgtcgtcgtgcccgccttggtggagaagaaggttcagttcaacactccctaagtgttcgatgatatgctccggtggccatcgtcgttcttgcaaaaaaatcaagtcggatcatgatgtggtgaggtacgttaattgatcacggagtgggagaacaagagctgagttgatctcaagggatactgatgaatgaacttgaagatttgcgtgatcgaatcaagcgccaggataagagatgctccccaagcggacgtcatctaacaacactgacttagtgttatctcagacgataaacacctcgagtgttacatgcgcgctcgcagagccgcccatgcaccggagccccacagagagcccaccccgtcgttcctgcccgaggaccgccaccgccgaccgaagccccgccccgactgagctcccacccgaggtaaaacccatggtcgtctttccttttctctctcctgtttcctcttccgtgttgcatgcccaccgatgagggccaacagcggcgttgcgccaccgtgccgcagtcctccggccagccaccgccgccccacgtccaccttcccacgtgcaccgtcgatctcggccacggcacccgcaccatgcacgggtgtagacggcaagcccaacacacgggacccactgttagcctccccgcgctgccccctccttccccctctctgagtcgctaacaggcggaccccgtctattagcgcgatccctgcgcctcactgcacccgcatctctcccatgccgctgactagcgggctcggtcatgccgagatcccctctatcagctcgcgagtgcggtggcgccccactgcccaccaagccactggctcatggggcctgcgcgccagtgccatgccccagcccttgggccccacctgtcagttgccccgtgcccccgcgcttgcgcgccctgccccgccgatcgaatctcgaccgttgatctgagatctaatggccgagggaacctgataccctttcgtgcgacactttttaaagagcccttcggtttcccgagaataaacttgtcatccctatttatttcacctaggtccttggaattttacagagaggccctaagacttttatttaatcaggaaaatatattaaaattgagttttaaatcccaaaacttgtaaatttcataactttgtcatatgaactccaaataaggtgcttcaaattgaaaaatgttcatcatgtttttgtctacctgttaaaataatgttcacctacttttttaatatcccaatttatgttgatctctagtttagagttgatgctattggaaccttaatagaaataaaataaaggtaggaacatctaataaatgttcaaatacttaagtttatagacgtaacactatctaatgagtaatcccatccacaacatagacttgattagaggttaataaaccacctggcgtagtgactaccctaaacttaggaaacaccttatttcctatacccttctattgaacttgtacttactttgttgcatatgtttggtgtatttttcttttgttattacccaagtgtgttgaatgaatgctttgcatagacaacaagtaacatgtgtttcccgagagagttgcaggagaagtccctgaacaacaacttggtgaaggcaagtgtcctccgacccattatgtcctacttactttataatttactctcttgactaccatgatcaacctaaggattgactagttttctgttatcctgtccttgaattaccttcttgggttgagctattatgattagtatcatgctagtgctttactttaaccaatgaacatgatgacaatactttatgatatgatgatggtattctagatatgatgatgaaattgtgacactaaaggggggctcgagctgtttcccgagtacttctctgtaatgacccattcattggatgaccacccaagaaaacaatacaaccatgatggtggtatgggacgcccttagctgactaattagaggaacttgtgatgtagtatactaccatgtcgtgtcgtcaacggggttcgggcacagtacttgctctaccgaggctaggtgccgaggttctttcattttgcttttgttagtcacccttcctgtggggagagtactatgtttatcaatctggagaaacctaacgggcggctatgatctctagggaatctttgtaaaagctacgtagtgaaaccttgccgactcaccttgggagtgtttaagagtatgtacaacccgagacaaaaagagatcacgactcgtggataaagtgtgcaacctcttcagagggttagaaactgatatatcagccgtgctcgcggttatgagcggccttggagctcctttggttagagatattatggttacggatgatgatgatggttctgattatgaattctggtatttcctctacgaggaggtatcttttggggtaataatttggatctttatgataaaatctggcttctaattataaatatccgatgaactaaaagcaactgccttgagcttaactccacataaagctagtccacctcagccaaatgggacatttgccgagtacgttgatgtgtactcagccttacttaaacaacaaacaccaggttatccacattgcatccgctgctcaggagaagatggaggccatgcagaggactttgaggagttctagattagattagcggtaaactctcagttagttgcctatgaaaggtcttatctttactgtgtttcgccttagcactttgattacggtttaatttaatgactatgtggatgtctctaacatcgtgatgtaataaagtaatacctctttatgttattatttcgagcactgtgcaatgatgttcagttatgtaatctctgtgtacgtgagtttctgatcctgaaatctacatggttggcattcagtttgccttctaaaaccggatgtgacaatcctataccttggtgaaggtataataaattgtaagaaattaaagtatgccaaggaatacataccaccaccaaggtagataaaatcaccacacaaatctatattgacttgacaagtagctttccctttcacaagtggaacttcattgatttgaatgactaatagttctcacttaatcaaatgtggtgaatttgagctcttatgctcatccaagatccatattaggttctattatttgttgtcaaggtattgggtgattgatgggacttatctatatgcacttgatgagctctatagtggagagaaaaataacgaatgagcactatgattcttttctccaactcacttgaatttaattccacttaaagggttggacattcgacattaaatcataagtctttgatttataaagaccaagacctcctataataacctttggaccaccaaaatattcctttgaaccatctgtactcgtttgatcttaatttctgcaatgagtgagactagacaacataaacttgcaagaagccattagtcccacaatatataggctagttgcgatggatttgattgatggaccgaagaatccaagtgaatagttttggtggctggcacctaaggataccgatagacgcgaggacgtggcaaagcagattatgtcgacacggtcgagggtaatggaacacatgtctagaacatgagacgtgtatggactgccgtgacatgtgtctagaacatgtgggagactaagcttgtgttctatcaaatttattttttcctgtgtaatgtgtatttttctcagttttcgtattttacatgtgatcatggcagatttttcatatttgagagttgatattagtttcagattcaacacaaacaacataaaaaaagccaacaacgtgtcatcattgggatgcctatatccctactactaattaagaacgcagtgtgggcgcctggcgtggccatgcccccgcctcgcctcacctcccctctgagttgtcactgccatactggccccgcctgacactcccctcgcgttgcccacaccctcgtctgttgctcccctcgtgttgcccgcccccaccccctagcctccgctcgctgcgccgcgacagacgccgcccccagcctctgctcgccgcgtcgccccatcctcggcccctcccgaaggaatggtagagccctttgcacggcgacctccctccacctccgcgcggcggcctccagatcgcagcttcgattcttcttcccaccccacggtgagacccgccccagcccctttcttctccctctctatccatcctcgacccctctctcgtaatccaaggaagggcagagctcaccaaggcgctcccctcggctggcgcagcgacggaccagatcttggcgaagagtatgcttggagcacctctatcccctccacgatggaggccgagtacttaacgaccgtgcttgacaacaacgccgatttgatgccattttggaggtgaggcgggggtgattttgaatgctccaaggatttcatgactctggtttccacgccgagaagccactcctcgtgctgccctcctgcctcctcctcctcctcctcgccccgctcgtctccgccgtccccatgccaagaagcctgcgcctggggagccaccagcagcacccgccgactctgaagctcagttcctctcaggagacgacggcgatgaacacgggcaggccgacgacgaggatggatgtggaggtgaacgactaccaaccgttgggccccaacaaccgccacgatccacccattttggccatttccttgttcaaaggatctacgccctcgcgacatgcttggaggtttcagacttccaggtgcttactgatatttcaccacgcgcccagtagtacgaagcaactgatcccgcaaccacagtttaagagcatgtgagaatgaattgagtcacccagtagcaaccaaataagtggaatagaatggcaatgctgatatgaggggtgtaatggatgttgtagtcacaatttacttttcccagcttcagatcatatgaacaacaatcagtattgcaatcatttcggacaacttgaccagagctgaagagatggagtgtagcagaaaaccagaacatataaaagatagaaaggatcaggcacaacaaaagtggaaaagctatcattgcctgaacttcaccaatgacctttgcagcaacctgaagccatgcgtaatggttattggtaggagctaccagctatcacattcaaaatatagagatgattattaatgcccctatgcaatacttgtcatgtatccaacgattttgcttacccttaagacaggtgttgctgtcagtatacaacgacaatagctattgaggacaggaaagcaatgatcattactgctgtcattagtagtaggataaggtttcagtatggaagcatcgcagtatgctgaaaatctggtcttccctacaagttctttactagaatcattgttgttcggctgtgctaaaaggcagttgttgctgctgcgggctgcagctcccgctctctcaaaacacactgttgcaacagctgcaacgacaatttttt

SEQ ID NO: 200855 - DNA, 1720 bp, Zea Mays
ctcgacctcctctatttgggcacgtcatctcctctatccccacgcgtctcctgctctatgtttccaaagccaagcgctctttctccatgccgctcagcctcctctctgtttcagtcgtggagcatcagcaatccacatcatctccgttggccgagcggttccctcgcggcgcccaggatccttcccagacgcgctcggctccctggtctgtctgtcaccttgccgacgcctcctctgctcctccacctgtagctcgcccctatctcctcctctccccatggcggctccccctggatccctccctgcgcgaaccctctcctgcagcacgccagtgccgaccacaatctcccatggcgcaggagctccccattctcctcttgctagggcgccgtcgctgggctcgcccagtctctcgctttctctgctccagcagcaaccgtctcaaggtattccagttcgtgagcagcagcaatcgatatagctcctccgcaccgtggcgcagccagccgtcgatgccatgtccctgcaacctcgtgtcgtcgtcgtgcccgccttggtggagaagaaggttcagttcaacactccctaagtgttcgatgatatgctccggtggccatcgtcgttcttgcaaaaaaatcaagtcggatcatgatgtggtgaggtacgttaattgatcacggagtgggagaacaagagctgagttgatctcaagggatactgatgaatgaacttgaagatttgcgtgatcgaatcaagcgccaggataagagatgctccccaagcggacgtcatctaacaacactgacttagtgttatctcaggagacgacggcgatgaacacgggcaggccgacgacgaggatggatgtggaggtgaacgactaccaaccgttgggccccaacaaccgccacgatccacccattttggccatttccttgttcaaaggatctacgccctcgcgacatgcttggaggtttcagacttccaggtgcttactgatatttcaccacgcgcccagtagtacgaagcaactgatcccgcaaccacagtttaagagcatgtgagaatgaattgagtcacccagtagcaaccaaataagtggaatagaatggcaatgctgatatgaggggtgtaatggatgttgtagtcacaatttacttttcccagcttcagatcatatgaacaacaatcagtattgcaatcatttcggacaacttgaccagagctgaagagatggagtgtagcagaaaaccagaacatataaaagatagaaaggatcaggcacaacaaaagtggaaaagctatcattgcctgaacttcaccaatgacctttgcagcaacctgaagccatgcgtaatggttattggtaggagctaccagctatcacattcaaaatatagagatgattattaatgcccctatgcaatacttgtcatgtatccaacgattttgcttacccttaagacaggtgttgctgtcagtatacaacgacaatagctattgaggacaggaaagcaatgatcattactgctgtcattagtagtaggataaggtttcagtatggaagcatcgcagtatgctgaaaatctggtcttccctacaagttctttactagaatcattgttgttcggctgtgctaaaaggcagttgttgctgctgcgggctgcagctcccgctctctcaaaacacactgttgcaacagctgcaacgacaatttttt

SEQ ID NO: 200856 - DNA, 1716 bp, Zea Mays
gctcgacctcctctatttgggcacgtcatctcctctatccccacgcgtctcctgctctatgtttccaaagccaagcgctctttctccatgccgctcagcctcctctctgtttcagtcgtggagcatcagcaatccacatcatctccgttggccgagcggttccctcgcggcgcccaggatccttcccagacgcgctcggctccctggtctgtctgtcaccttgccgacgcctcctctgctcctccacctgtagctcgcccctatctcctcctctccccatggcggctccccctggatccctccctgcgcgaaccctctcctgcagcacgccagtgccgaccacaatctcccatggcgcaggagctccccattctcctcttgctagggcgccgtcgctgggctcgcccagtctctcgctttctctgctccagcagcaaccgtctcaaggtattccagttcgtgagcagcagcaatcgatatagctcctccgcaccgtggcgcagccagccgtcgatgccatgtccctgcaacctcgtgtcgtcgtcgtgcccgccttggtggagaagaaggttcagttcaacactccctaagtgttcgatgatatgctccggtggccatcgtcgttcttgcaaaaaaatcaagtcggatcatgatgtggtacgttaattgatcacggagtgggagaacaagagctgagttgatctcaagggatactgatgaatgaacttgaagatttgcgtgatcgaatcaagcgccaggataagagatgctccccaagcggacgtcatctaacaacactgacttagtgttatctcaggagacgacggcgatgaacacgggcaggccgacgacgaggatggatgtggaggtgaacgactaccaaccgttgggccccaacaaccgccacgatccacccattttggccatttccttgttcaaaggatctacgccctcgcgacatgcttggaggtttcagacttccaggtgcttactgatatttcaccacgcgcccagtagtacgaagcaactgatcccgcaaccacagtttaagagcatgtgagaatgaattgagtcacccagtagcaaccaaataagtggaatagaatggcaatgctgatatgaggggtgtaatggatgttgtagtcacaatttacttttcccagcttcagatcatatgaacaacaatcagtattgcaatcatttcggacaacttgaccagagctgaagagatggagtgtagcagaaaaccagaacatataaaagatagaaaggatcaggcacaacaaaagtggaaaagctatcattgcctgaacttcaccaatgacctttgcagcaacctgaagccatgcgtaatggttattggtaggagctaccagctatcacattcaaaatatagagatgattattaatgcccctatgcaatacttgtcatgtatccaacgattttgcttacccttaagacaggtgttgctgtcagtatacaacgacaatagctattgaggacaggaaagcaatgatcattactgctgtcattagtagtaggataaggtttcagtatggaagcatcgcagtatgctgaaaatctggtcttccctacaagttctttactagaatcattgttgttcggctgtgctaaaaggcagttgttgctgctgcgggctgcagctcccgctctctcaaaacacactgttgcaacagctgcaacgacaatttttt

SEQ ID NO: 200857 - DNA, 1400 bp, Zea Mays
atacgcgttgcccgcccatctctctctctctctctcttcctgcgcccacacgcacgtttccactccgaccgggccagagccccgccgggcagtttccgttcgctgttgcgatccacctcctgcctgcacatcccctcccccgagttcgagccggagggccgaagagtagatctgcggcggcggccagaggatggccgtcaactgggagctgcggggctgctgcgaccacgaccagaggatcttcatcgccgccgtcggcgtctccaccgtcgtcatcctcctcctctggaggacgttcctgctcacgccgttcaagctcatcaccgtcttcctccacgagaccagccacgcgcttgcctgcaagctcacttgcggcgatgtagaaggcatgcaggtccatgcgaatgagggtggcgttactcaaacccggggtggcatatattggataatcttgcccgctggatatctgggttcatcattttggggaatggtcttcatacttgcatccacaaatctcctcactacaagaattgcagcgggttgtttcatacttgcattgtttattgttctttttgttgcagaaaattggtttcttcgctggctctgccttggtatgcatcaacatgacttagtctccatttaagcccttactctgcagcatgccagtacaccacttacgatgtcgttatccaggattcattgtgttcattgctgttgtttgggtcatacaagaatttacatctttccatgttctgaaatatgtgatcttattcataggtgagacagaagatgtcgtacaatcatgttctctttattttaatttctggaatgcaaattgtatgcttgaaatttaatctttatgtttatttatgtgcaacaggtgtgatgaacagcttattttcagtttacggggattcatctcgtttatctttctctgcgcttcaatataccttggactggtcatattgtcttgagggttcgccattttgatctgacaatcgactctggttggctttttcgaagcttcgttgctcgaggttttggttcaagcttacaaggttctggtggttgtacagtatacatgtgcagggtaaacatgtacatccattataagttaatttggtggggattattcatgggattcttcgattttagtggttctatagagtaccattttacttaccattaccagttgcatttatggtctgtagcctcttcaatttatgtacctgtatatcatatattgctcatttatccatttcaaaacgtattcagagatgcaatattgtgcatcttaatctggcgccgttttgccataacgattgacgggctgatgtgctaccagtagcaggagttagttagtgcccagtgcagtttatagtttatcctggtaatttgag

SEQ ID NO: 200858 - DNA, 1827 bp, Zea Mays
agtttagggtttggagacggccgtcatccctcgcgcagcgcggctaatcgttcgacacggagacgaccgccgccggcagccgagctgatcagtctgtatctattccccacgggagcaaaagcaaggttggcgaatgtcaaggagcttgacaggtagtctgtagctccctcggttgccgattcggtcggaggcgcagggaaccccgatgataaccataacttcctgatgattagcattgtttgcacaaagaacggagatcttaatgcgcatcccgtcgaagcctgcttggtcgcctcagctcgttgccatctctactactccctccgtttcaaaatatataagtagttttctctcgagggaaactacaaccacacacacacacacacatgatgtatacatttatgttagtgtatgtatatcctctgctcctcgtccaccacttggctggccgagcaggctccgggaaatgcgtctgtagatgcaaaagttatgaaggctgtcccagattggaagaatgccctgcctaagtattttaccctatgggcaaaattggcagatgatgagaatcaaagacaattgcgtctgctgtgctccttattcatcggggcacaatgtcatgatgaccatgtctaggggaatctctgatgctaatgtgaattttcttatatactccatctcttccaaatcgttagatgttttggcttttatagatatattgcttttgctatgtatctaaataatactccctccgttcataaatagttcataaatatatgacacctcataaacataaacatatgacacggtgaccacccctcttatttaaaaaatattttaaataatgagttatcatttacttactcttcttattcaaaaaaataatgagttatcattaacttttttgtgatttgttttatcacttaaaggtagtttgtatttggcttaaaattttatatttttgaatacatattttgaataagatgagtggtgaaaattttcgaaaaggtgttatatatttgtgaacggaggtaatatatatctatgtatatctaagtgcatgtcaaatggagtagggtaggttacaagccggataggctgatgtgtgtagaaccatgcgagtgttagacctcttttgaatcagaataatgcattgtaggatttttttatggtcctaaaagttttctgccatctcatctgtgactatgagagaagccattttggttcgtttagtttgtcttggctgcctgtatgccacaccgtggcatctttcttctcagctgtgttggattatgttttctatgttctcaaatgcttcttctgattcacaaatatactatcttaggctctctttgtgtatataagattgtgtatataagattactccctatcccactcttatatctacttaatatttcaaacttcgctcactatttcaaacttcgctctgcgacagtgcaatacttctcaaaacagtacttttacatggcctgctgacttctcttgaggtggatctcatgcagatatgatttagggagagatggtgtctgccaatgggagcatacattagctctgatcctgtgaagcgtgtcagtcaagaccatatagacagcagtagtaagaaccacccgaaaacaggcgagtcaccaagccatattgtatcagcgacgatgaaaatcatgttctcattctggatgttaaatttgagaccaaaagatggtgtattcgttcaagtgattttgtatcctattcatagttcccttaactgaaaaaatatgttccttttgtatgccctatccttatattagcatgaaaccattggcctgcaag

SEQ ID NO: 200859 - DNA, 2928 bp, Zea Mays
ctcgacctcctctatttgggcacgtcatctcctctatccccacgcgtctcctgctctatgtttccaaagccaagcgctctttctccatgccgctcagcctcctctctgtttcagtcgtggagcatcagcaatccacatcatctccgttggccgagcggttccctcgcggcgcccaggatccttcccagacgcgctcggctccctggtctgtctgtcaccttgccgacgcctcctctgctcctccacctgtagctcgcccctatctcctcctctccccatggcggctccccctggatccctccctgcgcgaaccctctcctgcagcacgccagtgccgaccacaatctcccatggcgcaggagctccccattctcctcttgctagggcgccgtcgctgggctcgcccagtctctcgctttctctgctccagcagcaaccgtctcaaggtattccagttcgtgagcagcagcaatcgatatagctcctccgcaccgtggcgcagccagccgtcgatgccatgtccctgcaacctcgtgtcgtcgtcgtgcccgccttggtggagaagaaggttcagttcaacactccctaagtgttcgatgatatgctccggtggccatcgtcgttcttgcaaaaaaatcaagtcggatcatgatgtggtgaggtacgttaattgatcacggagtgggagaacaagagctgagttgatctcaagggatactgatgaatgaacttgaagatttgcgtgatcgaatcaagcgccaggataagagatgctccccaagcggacgtcatctaacaacactgacttagtgttatctcaggcaagccccggtgcatttgccacctccttgctgtttttaaacttttatcacttatatgatgcattaggtggtaggagttgaatgattaaacctttgttgcataacttccttgaactattggttaccatccttgatacctgttttaaaaagctagatgtgcttagtatgctcatagactaagaacaaaatgttttgatctatgaatcatgtttttacaaagaaaagaggctggagtgatgaaggtatcaaaggccttgatgactccatcatttcagtagggtacctctgacaggtaccagattttcagaaataacttaatatgagaccagacgttgagcaggaaatgtcgcccgtctgtgtcgcttaaggaccgttccgattgttggcctgctgatctaggaccctttaactggccacatgcctcgtcatgggtaagcttagcctcggtcggaccaataccagaaaggccggcccgcaatgggagtggagagatggcgagagtagcttgtaccctccgtggcaagagactggaaggtggggtgctgtactctcggaaacatggcgggcaccatggcgagggtaacgtgtaccaaccaggccaacggctggaaggtggggtgctgtactctcggaaacatggcgggcaccatggcgagggtaacgtgtaccaaccaggccaatggctggacggtggagtactgtgctctcggttggcggggacccgttctggtcttgagaaacccgtgggcgagttgacatatgcaaggttaagtgctacatatgtcgtgtggttggagatccccagctgggtattaatcgattcggatcgccgaacttctcggatatgaagactggatcttcgaccttcagcgtagataacaagtgaaactaaagctgctaaaatgaatctagtgtaggacaagtgaatgttctagaccaggcaaatctagattcaggaaaagtacttaactggtgaagtaaaagcttggcataaggatccactactagtaagcttttctgcaaaaatgagtctttgaaatttgataagctttaccttgattcccgacaaaccagcatacccttgagagtcttttctttagtcgggtaagtcttgctgagtaattgcgtactcagggttttattccctgttgtttttcaggttgtaattttgtaattttgttctgttgtggatgatgctaagtgccggtgggctcggccttcttatataagtatatcccatctttagcttctttattgaggattgccacttaagctagcatgtattttaaaacttataaatattttatacattttaaagtgtaattctttttaatcattttcttttgtaatcactccgataattgtataatgcaaacttattgtaacatgtaatcattttgcaataaagaatttatttccgctgcaaatgttggtgtgtgatttgtgtttacttaatcttgcgatcttggcgggaagtcgtttatccggggtcctcggggcactcggacagatcctgttgagttgtttggtgcacatgcatagccgtctgaggtttttgagacaaggacgggtgcatgtgggcccgataacttgggaggttctgcgacagcggcatcacgcatcactcacgtgggcgagaggctgtgtgctgtccagacaccggttagcacctgccacgcgccacgatgccaggccacagagagacacgtgcaacggaagcttgaaagaatttcaaacgaagtttaaggaactagatctgatttcaaggattaaagtttgggcaagacgtcgatggctcaacccaaacgatattggattcgttgtttcgaaagattactgaagtctgatttttgcaaaaataaattagctacaatttagacagatggagatagacacgatatcaaaatcgtgatagacgaagatgattaaaatttagtgtccattttattcaccgctatcatgtgttaaagtccgcactcgtggtcgagcagacgataaacacctcgagtgttacatgcgcgctcgcagagccgcccatgcaccggagccccacagagagcccaccccgtcgttcctgcccgaggaccgccaccgccgaccgaagccc

SEQ ID NO: 200860 - DNA, 1769 bp, Zea Mays
ctcgacctcctctatttgggcacgtcatctcctctatccccacgcgtctcctgctctatgtttccaaagccaagcgctctttctccatgccgctcagcctcctctctgtttcagtcgtggagcatcagcaatccacatcatctccgttggccgagcggttccctcgcggcgcccaggatccttcccagacgcgctcggctccctggtctgtctgtcaccttgccgacgcctcctctgctcctccacctgtagctcgcccctatctcctcctctccccatggcggctccccctggatccctccctgcgcgaaccctctcctgcagcacgccagtgccgaccacaatctcccatggcgcaggagctccccattctcctcttgctagggcgccgtcgctgggctcgcccagtctctcgctttctctgctccagcagcaaccgtctcaaggtattccagttcgtgagcagcagcaatcgatatagctcctccgcaccgtggcgcagccagccgtcgatgccatgtccctgcaacctcgtgtcgtcgtcgtgcccgccttggtggagaagaaggttcagttcaacactccctaagtgttcgatgatatgctccggtggccatcgtcgttcttgcaaaaaaatcaagtcggatcatgatgtggtgaggtacgttaattgatcacggagtgggagaacaagagctgagttgatctcaagggatactgatgaatgaacttgaagatttgcgtgatcgaatcaagcgccaggataagagatgctccccaagcggacgtcatctaacaacactgacttagtgttatctcaggttgtaattttgtaattttgttctgttgtggatgatgctaagtgccggtgggctcggccttcttatataagtatatcccatctttagcttctttattgaggattgccacttaagctagcatgtattttaaaacttataaatattttatacattttaaagtgtaattctttttaatcattttcttttgtaatcactccgataattgtataatgcaaacttattgtaacatgtaatcattttgcaataaagaatttatttccgctgcaaatgttggtgtgtgatttgtgtttacttaatcttgcgatcttggcgggaagtcgtttatccggggtcctcggggcactcggacagatcctgttgagttgtttggtgcacatgcatagccgtctgaggtttttgagacaaggacgggtgcatgtgggcccgataacttgggaggttctgcgacagcggcatcacgcatcactcacgtgggcgagaggctgtgtgctgtccagacaccggttagcacctgccacgcgccacgatgccaggccacagagagacacgtgcaacggaagcttgaaagaatttcaaacgaagtttaaggaactagatctgatttcaaggattaaagtttgggcaagacgtcgatggctcaacccaaacgatattggattcgttgtttcgaaagattactgaagtctgatttttgcaaaaataaattagctacaatttagacagatggagatagacacgatatcaaaatcgtgatagacgaagatgattaaaatttagtgtccattttattcaccgctatcatgtgttaaagtccgcactcgtggtcgagcagacgataaacacctcgagtgttacatgcgcgctcgcagagccgcccatgcaccggagccccacagagagcccaccccgtcgttcctgcccgaggaccgccaccgccgaccgaagccc

SEQ ID NO: 200861 - DNA, 1765 bp, Zea Mays
gctcgacctcctctatttgggcacgtcatctcctctatccccacgcgtctcctgctctatgtttccaaagccaagcgctctttctccatgccgctcagcctcctctctgtttcagtcgtggagcatcagcaatccacatcatctccgttggccgagcggttccctcgcggcgcccaggatccttcccagacgcgctcggctccctggtctgtctgtcaccttgccgacgcctcctctgctcctccacctgtagctcgcccctatctcctcctctccccatggcggctccccctggatccctccctgcgcgaaccctctcctgcagcacgccagtgccgaccacaatctcccatggcgcaggagctccccattctcctcttgctagggcgccgtcgctgggctcgcccagtctctcgctttctctgctccagcagcaaccgtctcaaggtattccagttcgtgagcagcagcaatcgatatagctcctccgcaccgtggcgcagccagccgtcgatgccatgtccctgcaacctcgtgtcgtcgtcgtgcccgccttggtggagaagaaggttcagttcaacactccctaagtgttcgatgatatgctccggtggccatcgtcgttcttgcaaaaaaatcaagtcggatcatgatgtggtacgttaattgatcacggagtgggagaacaagagctgagttgatctcaagggatactgatgaatgaacttgaagatttgcgtgatcgaatcaagcgccaggataagagatgctccccaagcggacgtcatctaacaacactgacttagtgttatctcaggttgtaattttgtaattttgttctgttgtggatgatgctaagtgccggtgggctcggccttcttatataagtatatcccatctttagcttctttattgaggattgccacttaagctagcatgtattttaaaacttataaatattttatacattttaaagtgtaattctttttaatcattttcttttgtaatcactccgataattgtataatgcaaacttattgtaacatgtaatcattttgcaataaagaatttatttccgctgcaaatgttggtgtgtgatttgtgtttacttaatcttgcgatcttggcgggaagtcgtttatccggggtcctcggggcactcggacagatcctgttgagttgtttggtgcacatgcatagccgtctgaggtttttgagacaaggacgggtgcatgtgggcccgataacttgggaggttctgcgacagcggcatcacgcatcactcacgtgggcgagaggctgtgtgctgtccagacaccggttagcacctgccacgcgccacgatgccaggccacagagagacacgtgcaacggaagcttgaaagaatttcaaacgaagtttaaggaactagatctgatttcaaggattaaagtttgggcaagacgtcgatggctcaacccaaacgatattggattcgttgtttcgaaagattactgaagtctgatttttgcaaaaataaattagctacaatttagacagatggagatagacacgatatcaaaatcgtgatagacgaagatgattaaaatttagtgtccattttattcaccgctatcatgtgttaaagtccgcactcgtggtcgagcagacgataaacacctcgagtgttacatgcgcgctcgcagagccgcccatgcaccggagccccacagagagcccaccccgtcgttcctgcccgaggaccgccaccgccgaccgaagccc

SEQ ID NO: 200862 - DNA, 2924 bp, Zea Mays
gctcgacctcctctatttgggcacgtcatctcctctatccccacgcgtctcctgctctatgtttccaaagccaagcgctctttctccatgccgctcagcctcctctctgtttcagtcgtggagcatcagcaatccacatcatctccgttggccgagcggttccctcgcggcgcccaggatccttcccagacgcgctcggctccctggtctgtctgtcaccttgccgacgcctcctctgctcctccacctgtagctcgcccctatctcctcctctccccatggcggctccccctggatccctccctgcgcgaaccctctcctgcagcacgccagtgccgaccacaatctcccatggcgcaggagctccccattctcctcttgctagggcgccgtcgctgggctcgcccagtctctcgctttctctgctccagcagcaaccgtctcaaggtattccagttcgtgagcagcagcaatcgatatagctcctccgcaccgtggcgcagccagccgtcgatgccatgtccctgcaacctcgtgtcgtcgtcgtgcccgccttggtggagaagaaggttcagttcaacactccctaagtgttcgatgatatgctccggtggccatcgtcgttcttgcaaaaaaatcaagtcggatcatgatgtggtacgttaattgatcacggagtgggagaacaagagctgagttgatctcaagggatactgatgaatgaacttgaagatttgcgtgatcgaatcaagcgccaggataagagatgctccccaagcggacgtcatctaacaacactgacttagtgttatctcaggcaagccccggtgcatttgccacctccttgctgtttttaaacttttatcacttatatgatgcattaggtggtaggagttgaatgattaaacctttgttgcataacttccttgaactattggttaccatccttgatacctgttttaaaaagctagatgtgcttagtatgctcatagactaagaacaaaatgttttgatctatgaatcatgtttttacaaagaaaagaggctggagtgatgaaggtatcaaaggccttgatgactccatcatttcagtagggtacctctgacaggtaccagattttcagaaataacttaatatgagaccagacgttgagcaggaaatgtcgcccgtctgtgtcgcttaaggaccgttccgattgttggcctgctgatctaggaccctttaactggccacatgcctcgtcatgggtaagcttagcctcggtcggaccaataccagaaaggccggcccgcaatgggagtggagagatggcgagagtagcttgtaccctccgtggcaagagactggaaggtggggtgctgtactctcggaaacatggcgggcaccatggcgagggtaacgtgtaccaaccaggccaacggctggaaggtggggtgctgtactctcggaaacatggcgggcaccatggcgagggtaacgtgtaccaaccaggccaatggctggacggtggagtactgtgctctcggttggcggggacccgttctggtcttgagaaacccgtgggcgagttgacatatgcaaggttaagtgctacatatgtcgtgtggttggagatccccagctgggtattaatcgattcggatcgccgaacttctcggatatgaagactggatcttcgaccttcagcgtagataacaagtgaaactaaagctgctaaaatgaatctagtgtaggacaagtgaatgttctagaccaggcaaatctagattcaggaaaagtacttaactggtgaagtaaaagcttggcataaggatccactactagtaagcttttctgcaaaaatgagtctttgaaatttgataagctttaccttgattcccgacaaaccagcatacccttgagagtcttttctttagtcgggtaagtcttgctgagtaattgcgtactcagggttttattccctgttgtttttcaggttgtaattttgtaattttgttctgttgtggatgatgctaagtgccggtgggctcggccttcttatataagtatatcccatctttagcttctttattgaggattgccacttaagctagcatgtattttaaaacttataaatattttatacattttaaagtgtaattctttttaatcattttcttttgtaatcactccgataattgtataatgcaaacttattgtaacatgtaatcattttgcaataaagaatttatttccgctgcaaatgttggtgtgtgatttgtgtttacttaatcttgcgatcttggcgggaagtcgtttatccggggtcctcggggcactcggacagatcctgttgagttgtttggtgcacatgcatagccgtctgaggtttttgagacaaggacgggtgcatgtgggcccgataacttgggaggttctgcgacagcggcatcacgcatcactcacgtgggcgagaggctgtgtgctgtccagacaccggttagcacctgccacgcgccacgatgccaggccacagagagacacgtgcaacggaagcttgaaagaatttcaaacgaagtttaaggaactagatctgatttcaaggattaaagtttgggcaagacgtcgatggctcaacccaaacgatattggattcgttgtttcgaaagattactgaagtctgatttttgcaaaaataaattagctacaatttagacagatggagatagacacgatatcaaaatcgtgatagacgaagatgattaaaatttagtgtccattttattcaccgctatcatgtgttaaagtccgcactcgtggtcgagcagacgataaacacctcgagtgttacatgcgcgctcgcagagccgcccatgcaccggagccccacagagagcccaccccgtcgttcctgcccgaggaccgccaccgccgaccgaagccc

SEQ ID NO: 200863 - DNA, 1839 bp, Zea Mays
ccgtactgtactgctcgtcgtcaaatcaaaggaaaattgaacgaaagcagcccaaccaaaatcccctcgccgcatctccccttcctgttcccgtgttccgttccgtcccgtccctgctcgacttctcgcgtcccgacgtcgcctcaatctcgaagcctctccggcgcagccgccgcaatctcgactccaaggcctctccgaccaaaattcatctagggttttcgcttcgtccgtcgcgatgggctccaagaagcggtcgccccagcatcccgcgtccccagccggcggagaggtcggtgctcaggcggcggggaaggccacgccggtgacggcggcgccggaaacggcgcccgtggcggtggtgccgaagcctcccgacgtggcgccattcctgaccaaggtctacgacatggtctccgacccggccaccgacgcggtcatctcctggagcgccggcggcggcagcttcgtgatctgggactcgcacgtttttgagcgcgacctgcttccgcgacacttcaagcacaaccacttcaccagcttcatacgccagctcaacacctacggatttcataaagttgatccagatagatgggaatgggccaatgaaggttttattaagggccaaaaacatcttctgaagaccatcaagagaaagaagaaatcctctcaggatgtacctagtgatctgcagtcggtgcctgtcaaaactgcacctggcactgagaatatcgagataggaaaatatggaggccttgaaaaggaggttgagacacttaagagggacaaggcccttctaatgcagcagcttgtagatttaaggcagtaccagcaaacatctagtcttgaagtgcagagtttaattcaacgcctccgtgtgatggaacagaaccagcagcagatgatggcacttttggcaatagttgtccacaatccggatttcctcaaccagctcgtgcagcagcagtgcaggagtaactggtggaatgatgatgggaacaggaaaagaaggttccaagctttggaacatggccctgtagatgattctgagacttctggtggaggcgcgcaaattattcaatattgtcctcctgttcctgaaacttccaatcaaccaacaccagcaaatgaagctttctgttcaagccctgtacaatcagtttcaagccatgcacttgagatgcccatggatgtagaaatggcttcaaacaatgttggtacacttgattcaactgggaatgattttactgacacctctgctctatgtgaatgggatgacatggatatatttggtggcggactagagcacatccttcaacagacagagcaagactttcaagtggaccctctaacaattgaagattacggttatgaccgtccatggttagagcaggactgccaggtagaagcgcaacagaattgcaaaaatcctcaatatgctgatgtcataactgaagcatgagcggtggtcccagagaattttgtccaataacggtcaagcattcatttgactccttaactatacaatagcttccttccaaaacacaggtcagtactgactgcttttctatatatcataattacgggttgacctgtccatatctcttgcataagcaactcctctagcatcaaaatgcattttgatgtatgatgtgggtctgtttgatttttctttcattgttccccacccagaatctacttctttacgactgccagctttggcaggcacgtatttctttctttgacactgagtaaatgagcttaccttattgtatgataaataactaaaaatggataagtgatcgagtatttcttgtaagtgtgtaacgacatataaaa

SEQ ID NO: 200864 - DNA, 2055 bp, Zea Mays
gcaaaagctcggttgctttcttctggcctcgtgcggaggaggcgaagggggtcggaggcctgcggcaccggagcatggcgaaccttatcggttattgctgcgacggcgacgatcgcctgctcgtcgccgagttcatgcccaacgacaccctcgccaagcaccttttccactgggaaaaccagactattgagtgggctatgcgtctgagagttgcatactacatttcccaagcattggaatactgtagtaccaaggggtggcctttatatcatgacctaaatgcatacagggtcctctttgatgagaatggtgaccctcggctgtcatgctttggtctgatgaaaaacagcagggatggaaaaagctatagcacgaacctagcatatacacctccagaatatctgagaaatgtgaaaaatatgctgttctctatttgttcatgtcagtataactggtggttttcagcagacaatcattttttaatgttgctactacaaagacatgatttctgaaagctgagttccaaaattgtagtgttgatctttttattttaaaagaaaaaatgtacatctggaatttagttttttggaaggatcagtgactcagtttaagattttctgattcctttgtatgtgctatttaaattgagcatattgtgcccttggtaagtcagttaccaggtgctgtgagatggtctggttagtgtgtccttggtctctgtctgtcattgaaatcaataagtaatgcaaacaaaaaagcaagaaatgcttcatctgtattattttctgaggaaagttttattttcaggcagggttactccagaaagtgtcattttcagttttggcactgtacttcttgaccttctcagtgggaaacgcataccgccttcacatgcgcttgatatcatgagaggcagaaacatccaagcagttatggattcacatttggagggaaactactcaattgaggtggctactacattggtgaatcttgcttctcagtgtctacaatatgagccaagagatcgtcctgacataaaaaagttggtttccattctggagcctttgcagaaaaaaatagaggtaccgtcctatgtgatgcttggaattgcaaagccagtggaagaaccacaggcacctcctactccacagcgccctctttctcccatgggagaagcttgttccagaatggaccttactgccatctatcagatcctattcacaacgcattaccgagatgatgaagggagcaatgagctgtcttttcaagaatggacacagcagatgagggatatgctggatgcaaggaaacgtggcgactctgccttcaaagacaaagattttaaggcagcaatcgattgctatactcagtttgtcgatgtggggataatggtgtcaccgactgtattcgccagacgaagcttgtgctaccttatgtgtgaccaacctgatgcggccctccgtgatgcaatgcaagcgcagatcgtctaccctgattggccaacagcattctacatgcaggcagttgcactatccaagctaaacatgcagagtgacgccgtggacatgctgaacgaggcatcacagctagaagagaagaggcaaaagagcacaagagttccttgaatggcattgccagctcagagaagtggcacgtcttctatacatataacatagattgcacactatgtagtacagtagtatattctccaacctttcccaccctgtaaaaagcgcatagtatattgcgtggtctagaattagaagtaaggagaagtgaactgcagagaagatgctctttgctccctggactctggagccctgtgatggcacttgtgtgataggttcaattttttgggcccatgtatataacatccgttgcatgggagtttagagtataggttgccggttggtcaggagggccctgtcgccgaagataataaacatgttatgtttgtgaaaaactgtctgggtatcgcttccagcagggcatgttagtaagggcttgtttgtatctcagagctaaaacaaaagtgactaaagttttagtcaggct

SEQ ID NO: 200865 - DNA, 2068 bp, Zea Mays
aaagctcggttgctttcttctggcctcgtgcggaggaggcgaagggggtcggaggcctgcggcaccggagcatggcgaaccttatcggttattgctgcgacggcgacgatcgcctgctcgtcgccgagttcatgcccaacgacaccctcgccaagcaccttttccactgtgagcccctctcgtgctctgcagttcgttgcctgtatgtaccatttgatcatgttccaaagatcggcactcgctgctatgctaatgcagtgcaattctggtaaatggggaataactgagataattgacaggagacacgcgagatgttctgctttgattacaacactaactcacgttttctgtgcgatatgttctgattctgtttattacatcagttcaaagggaaaactatattgaaactcgtgagtttattattcggagtttgatcgcttgttttgtcttcagcaacatgacgaatactgaatgtatttacctcatggttttactttaacataaatgaacaagcaaataattggaagcaacgattggcttcttctgatttattggccactgtggttttgctcacgtgcaggggaaaaccagactattgagtgggctatgcgtctgagagttgcatactacatttcccaagcattggaatactgtagtaccaaggggtggcctttatatcatgacctaaatgcatacagggtcctctttgatgagaatggtgaccctcggctgtcatgctttggtctgatgaaaaacagcagggatggaaaaagctatagcacgaacctagcatatacacctccagaatatctgagaaatggcagggttactccagaaagtgtcattttcagttttggcactgtacttcttgaccttctcagtgggaaacgcataccgccttcacatgcgcttgatatcatgagaggcagaaacatccaagcagttatggattcacatttggagggaaactactcaattgaggtggctactacattggtgaatcttgcttctcagtgtctacaatatgagccaagagatcgtcctgacataaaaaagttggtttccattctggagcctttgcagaaaaaaatagaggtaccgtcctatgtgatgcttggaattgcaaagccagtggaagaaccacaggcacctcctactccacagcgccctctttctcccatgggagaagcttgttccagaatggaccttactgccatctatcagatcctattcacaacgcattaccgagatgatgaagggagcaatgagctgtcttttcaagaatggacacagcagatgagggatatgctggatgcaaggaaacgtggcgactctgccttcaaagacaaagattttaaggcagcaatcgattgctatactcagtttgtcgatgtggggataatggtgtcaccgactgtattcgccagacgaagcttgtgctaccttatgtgtgaccaacctgatgcggccctccgtgatgcaatgcaagcgcagatcgtctaccctgattggccaacagcattctacatgcaggcagttgcactatccaagctaaacatgcagagtgacgccgtggacatgctgaacgaggcatcacagctagaagagaagaggcaaaagagcacaagagttccttgaatggcattgccagctcagagaagtggcacgtcttctatacatataacatagattgcacactatgtagtacagtagtatattctccaacctttcccaccctgtaaaaagcgcatagtatattgcgtggtctagaattagaagtaaggagaagtgaactgcagagaagatgctctttgctccctggactctggagccctgtgatggcacttgtgtgataggttcaattttttgggcccatgtatataacatccgttgcatgggagtttagagtataggttgccggttggtcaggagggccctgtcgccgaagataataaacatgttatgtttgtgaaaaactgtctgggtatcgcttccagcagggcatgttagtaagggcttgtttgtatctcagagctaaaacaaaagtgactaaagttttagtcaggct

SEQ ID NO: 200866 - DNA, 1851 bp, Zea Mays
ccacgttaagctttgcaaacactctttccactttcccgttggatcaacttgcccaggagagcgagttccaactaaaatcacaattgcaagtccaacaaaggaatggtgaccctcggctgtcatgctttggtctgatgaaaaacagcagggatggaaaaagctatagcacgaacctagcatatacacctccagaatatctgagaaatgtgaaaaatatgctgttctctatttgttcatgtcagtataactggtggttttcagcagacaatcattttttaatgttgctactacaaagacatgatttctgaaagctgagttccaaaattgtagtgttgatctttttattttaaaagaaaaaatgtacatctggaatttagttttttggaaggatcagtgactcagtttaagattttctgattcctttgtatgtgctatttaaattgagcatattgtgcccttggtaagtcagttaccaggtgctgtgagatggtctggttagtgtgtccttggtctctgtctgtcattgaaatcaataagtaatgcaaacaaaaaagcaagaaatgcttcatctgtattattttctgaggaaagttttattttcaggcagggttactccagaaagtgtcattttcagttttggcactgtacttcttgaccttctcagtgggaaacgcataccgccttcacatgcgcttgatatcatgagaggcagaaacatccaagcagttatggattcacatttggagggaaactactcaattgaggtggctactacattggtgaatcttgcttctcagtgtctacaatatgagccaagagatcgtcctgacataaaaaagttggtttccattctggagcctttgcagaaaaaaatagaggtaccgtcctatgtgatgcttggaattgcaaagccagtggaagaaccacaggcacctcctactccacagcgccctctttctcccatgggagaagcttgttccagaatggaccttactgccatctatcagatcctattcacaacgcattaccgagatgatgaagggagcaatgagctgtcttttcaagaatggacacagcagatgagggatatgctggatgcaaggaaacgtggcgactctgccttcaaagacaaagattttaaggcagcaatcgattgctatactcagtttgtcgatgtggggataatggtgtcaccgactgtattcgccagacgaagcttgtgctaccttatgtgtgaccaacctgatgcggccctccgtgatgcaatgcaagcgcagatcgtctaccctgattggccaacagcattctacatgcaggcagttgcactatccaagctaaacatgcagagtgacgccgtggacatgctgaacgaggcatcacagctagaagagaagaggcaaaagagcacaagagttccttgaatggcattgccagctcagagaagtggcacgtcttctatacatataacatagattgcacactatgtagtacagtagtatattctccaacctttcccaccctgtaaaaagcgcatagtatattgcgtggtctagaattagaagtaaggagaagtgaactgcagagaagatgctctttgctccctggactctggagccctgtgatggcacttgtgtgataggttcaattttttgggcccatgtatataacatccgttgcatgggagtttagagtataggttgccggttggtcaggagggccctgtcgccgaagataataaacatgttatgtttgtgaaaaactgtctgggtatcgcttccagcagggcatgttagtaagggcttgtttgtatctcagagctaaaacaaaagtgactaaagttttagtcaggct

SEQ ID NO: 200867 - DNA, 2513 bp, Zea Mays
gccaaagcgaactgaaccgatccgcggttgtgcccgtgccgcgcgccagcgccacgcttcctacaatcctactgtagtttaatccgcttgcacggaggagcaacgccgagcaatggcgctcgcagccccttcttccctccgcctcctcccgaccacgccatcgcaggcgccatctccgccctgtgcctcccgaccacgccatctgcgggagctccgtctctgccagagactcgccaccgccgccgccgccgccgccgccgccgcggccgcggccacggctccactcgcttcctcgcccaccacctccgcggacacggagcggaggaagcacgaactgctgcgcgcggttcaggaaacgcggcgcggattcgcagcggggcccgaccaacgcgctgccatcgaggaggccgtcgtggccgtggaggagcgtggtgcggggaagggaacgccgatagatctcgcggcgctcgatggcacctggaggctgtgttacacatcggcatcagacgtgcttgtgctgttcgaggcggccgagaggcttccactcctgcaggtgggccaaatataccagaaatttgagtgcaaagatcgatcagatggtggaactgtgaggaatgttgtaaggtggagcatcgagaacttgctggaggagcaagaaggtgcaacactgatggtctctgcgaagtttgttgtcctgtctaaacggaatatctttcttcaatttgaggaggtcgctgttgaaaatatcaagatcagcgagcaactgcagacactaatagctcctgctatacttcctcggtcatttttgagccttcaggtatatgccagcccgccaggttatatcaaataattgatcgttgacttgcacattttccttgatttaacaaaatcttaatttattctttcttggtcattgacaaatatgtgcattgatatacatttcatgtgtgccacaaaatcttaatttattctttcttggtcattgacaaatatgtgcatcggtatacatttcatgtgtcccacaatattgttctgaattctgtttgtttcttaatttatttttctgacaaatatgtggaaacttaatttattattctgacaaataaaggacacgtttcatgtgtcccacataggtttcatttgtcccacaatattgttctgacaaatatgtgcatcgatatacatttcatgtgtcccacaaaatcttaatttattctttcttggtcattgacaaatatgtgcatcggtatacattgacaaataattgatcgttgacttccacgaccacgagtagcacgacggacacgaaaatcagccaacttctctagaaacttagcaaagcagttctcagaccgatgagtggtcttttgcaatgttcacaaggctgaaagaaggtgttcctagacttctgagcagcagctaacacactgtgagaactcacaccagtaatagaactcacaccagtaatagaagacatagacttcagacgagtttcttcagcaagcaattcagacaatgtctgagccatggtgagagtatctaaactgtgaagcagccttgcacgaagagaatcaaatttaagtcgaacttccataacaaatctgtaggtaaagaacttctcaatgaacttatgggctgggcaaggcacaactgtacaagcaggtatcatggaggtcaatgcactcataagacgatcaaaggctaaataatattcatcaatggacatatcatgttgctcaatgacataagtctgctgcataagggtatgtaaaagagcaccactatcctgaacaaaccgatccttcagatgtgaccagatagtattagcagtggtgaatttggacatactcataatcatagttggtttagtgctattgaccattgcagccattaccttgccatcattgatctgccaagtcttgattgcagcagcattgcttctaccagctgctaaacctggagaatcttcagtcaaatgaaatagtaaaccatgacctcttaatgcagtctgaacacaaaacacccattctggataattctgcccatcaagcacaatattgacaacaatagcgttggccgacatattgaagagcaatgaaacactgaagaataacagatctgaaacagactggcgtgatggtgccaaaaaccccagcgggtgcagcggaagaacagtggatacactggctgcagtcttggatgagaccgtgcgaagtcatagtaaagcaacagatctggtcggggctgcactcggcgcagatacacagacggacaacgcaacgacggacgggggtgcgacgacagaaggcgggcaggggcgaacgacatggccgcaactccgggaaggggcggcgcaccgacgacagaaggcggactggggcggacggcgcatgaacaggacgcaggagtaggtccacgactgcgcatatgagatctgtgactgcgacgttaggctccgcgacggcgcaggcgcaggaggaggcggatctccgcaacggagcaggagatggcgg

SEQ ID NO: 200868 - DNA, 684 bp, Zea Mays
ccaaagcgaactgaaccgatccgcggttgtgcccgtgccgcgcgccagcgccacgcttcctacaatcctactgtagtttaatccgcttgcacggaggagcaacgccgagcaatggcgctcgcagccccttcttccctccgcctcctcccgaccacgccatcgcaggcgccatctccgccctgtgcctcccgaccacgccatctgcgggagctccgtctctgccagagactcgccaccgccgccgccgccgccgccgccgccgcggccgcggccacggctccactcgcttcctcgcccaccacctccgcggacacggagcggaggaagcacgaactgctgcgcgcggttcaggaaacgcggcgcggattcgcagcggggcccgaccaacgcgctgccatcgaggaggccgtcgtggccgtggaggagcgtggtgcggggaagggaacgccgatagatctcgcggcgctcgatggcacctggaggctgtgttacacatcggcatcagacgtgcttgtgctgttcgaggcggccgagaggcttccactcctgcaggtgggccaaatataccagaaatttgagtgcaaagatcgatcagatggtggaactgtgaggaatgttgtaaggtggagcatcgagaacttgctggagcacaactgctggtacttaaatgcatggaccttggaa

SEQ ID NO: 200869 - DNA, 1288 bp, Zea Mays
cctcccgttccctgctttctgtttggctgtatcgacgcccgcgtgcaaggaaggcattccatgtgagggcatcagctcgggttgacaagttctcaaagagtgacatcatcgtgtccccttcgattctgtctgcaaactttgcgaagcttggtgatcaggtaaaagctgtggaggtggcaggatgcgactggattcatgttgatgtcatggatgggcgctttgtgccaaacatcacaattggacccttggttgttgatgctctgcgtccagtgactgatcttccgttggatgtacatctgatgattgtggaacctgagcagcgagtccctgattttatcaaggcaggtgctgatattgttagtgtccactgtgaacagacatcgaccatccatttgcaccgaacagtcaatcagattaaaagtctaggagcaaaggcaggagttgttttgaatccagcgactccactcactgcaattgattacgttcttgatgttgttgacctggtgctgattatgtctgtgaatcctgggtttggtggccagagctttatcgagagtcaagtaaagaaaattgcagaactgagaaggttatgtgcagagaagggagtgaacccctggattgaggttgatggtggtgttggtccgaaaaatgcctacaaggttattgaagctggcgcaaatgccattgtcgcaggttctgcagtttttggggctccagactacgctgaagctatcaaaggaataaagaccagccaaagacctctagctgtagccgcataaagagctggacgtgtaatcatttactctgtgcaagtttaccagtgatgcgatctgtatagatgtgtgtcttgtccagctatacgtataccggagatgaaaggagacggaggcagtgaagaaatatccttttttttcttctcatttttcacgaggatgccgtgcactgctcccagaatgctgtgtccaatttacaaacgcacaggtggcacatgaactagcagagtagctctctcttgaaaggaaactgtatttggggtcgatgaaccctctggtgttattcttcagactggtaaacgatgtaacatgtttgataatcaataaagtgcgtcgtatggctttcctaaaaaaaagcacagcagcacacgaatgtaacatgtttgtacatcggcatctgactgagtctgaagcccttgtacatgattggaatttaccttaaaactgtctggaactttgcacattttttttttgaaaaatggcaggagctctgcctttcttaaagcggtaaagag

SEQ ID NO: 200870 - DNA, 1283 bp, Zea Mays
ctcccgttccctgctttctgtttggctgtatcgacgcccgcgtgcaaggcattccatgtgagggcatcagctcgggttgacaagttctcaaagagtgacatcatcgtgtccccttcgattctgtctgcaaactttgcgaagcttggtgatcaggtaaaagctgtggaggtggcaggatgcgactggattcatgttgatgtcatggatgggcgctttgtgccaaacatcacaattggacccttggttgttgatgctctgcgtccagtgactgatcttccgttggatgtacatctgatgattgtggaacctgagcagcgagtccctgattttatcaaggcaggtgctgatattgttagtgtccactgtgaacagacatcgaccatccatttgcaccgaacagtcaatcagattaaaagtctaggagcaaaggcaggagttgttttgaatccagcgactccactcactgcaattgattacgttcttgatgttgttgacctggtgctgattatgtctgtgaatcctgggtttggtggccagagctttatcgagagtcaagtaaagaaaattgcagaactgagaaggttatgtgcagagaagggagtgaacccctggattgaggttgatggtggtgttggtccgaaaaatgcctacaaggttattgaagctggcgcaaatgccattgtcgcaggttctgcagtttttggggctccagactacgctgaagctatcaaaggaataaagaccagccaaagacctctagctgtagccgcataaagagctggacgtgtaatcatttactctgtgcaagtttaccagtgatgcgatctgtatagatgtgtgtcttgtccagctatacgtataccggagatgaaaggagacggaggcagtgaagaaatatccttttttttcttctcatttttcacgaggatgccgtgcactgctcccagaatgctgtgtccaatttacaaacgcacaggtggcacatgaactagcagagtagctctctcttgaaaggaaactgtatttggggtcgatgaaccctctggtgttattcttcagactggtaaacgatgtaacatgtttgataatcaataaagtgcgtcgtatggctttcctaaaaaaaagcacagcagcacacgaatgtaacatgtttgtacatcggcatctgactgagtctgaagcccttgtacatgattggaatttaccttaaaactgtctggaactttgcacattttttttttgaaaaatggcaggagctctgcctttcttaaagcggtaaagag

SEQ ID NO: 200871 - DNA, 1268 bp, Zea Mays
catctcccgtgtccctcggtgggtgcaatgaaggcattccatgtgagggcatcagctcgggttgacaagttctcaaagagtgacatcatcgtgtccccttcgattctgtctgcaaactttgcgaagcttggtgatcaggtaaaagctgtggaggtggcaggatgcgactggattcatgttgatgtcatggatgggcgctttgtgccaaacatcacaattggacccttggttgttgatgctctgcgtccagtgactgatcttccgttggatgtacatctgatgattgtggaacctgagcagcgagtccctgattttatcaaggcaggtgctgatattgttagtgtccactgtgaacagacatcgaccatccatttgcaccgaacagtcaatcagattaaaagtctaggagcaaaggcaggagttgttttgaatccagcgactccactcactgcaattgattacgttcttgatgttgttgacctggtgctgattatgtctgtgaatcctgggtttggtggccagagctttatcgagagtcaagtaaagaaaattgcagaactgagaaggttatgtgcagagaagggagtgaacccctggattgaggttgatggtggtgttggtccgaaaaatgcctacaaggttattgaagctggcgcaaatgccattgtcgcaggttctgcagtttttggggctccagactacgctgaagctatcaaaggaataaagaccagccaaagacctctagctgtagccgcataaagagctggacgtgtaatcatttactctgtgcaagtttaccagtgatgcgatctgtatagatgtgtgtcttgtccagctatacgtataccggagatgaaaggagacggaggcagtgaagaaatatccttttttttcttctcatttttcacgaggatgccgtgcactgctcccagaatgctgtgtccaatttacaaacgcacaggtggcacatgaactagcagagtagctctctcttgaaaggaaactgtatttggggtcgatgaaccctctggtgttattcttcagactggtaaacgatgtaacatgtttgataatcaataaagtgcgtcgtatggctttcctaaaaaaaagcacagcagcacacgaatgtaacatgtttgtacatcggcatctgactgagtctgaagcccttgtacatgattggaatttaccttaaaactgtctggaactttgcacattttttttttgaaaaatggcaggagctctgcctttcttaaagcggtaaagag

SEQ ID NO: 200872 - DNA, 1340 bp, Zea Mays
cccaagttgctggtgatgagctctgtagactccggatcaaatggcctgactggctatgtgactttgttgtcgctcatggaggagcttatcagtctggaaatgaaggcattccatgtgagggcatcagctcgggttgacaagttctcaaagagtgacatcatcgtgtccccttcgattctgtctgcaaactttgcgaagcttggtgatcaggtaaaagctgtggaggtggcaggatgcgactggattcatgttgatgtcatggatgggcgctttgtgccaaacatcacaattggacccttggttgttgatgctctgcgtccagtgactgatcttccgttggatgtacatctgatgattgtggaacctgagcagcgagtccctgattttatcaaggcaggtgctgatattgttagtgtccactgtgaacagacatcgaccatccatttgcaccgaacagtcaatcagattaaaagtctaggagcaaaggcaggagttgttttgaatccagcgactccactcactgcaattgattacgttcttgatgttgttgacctggtgctgattatgtctgtgaatcctgggtttggtggccagagctttatcgagagtcaagtaaagaaaattgcagaactgagaaggttatgtgcagagaagggagtgaacccctggattgaggttgatggtggtgttggtccgaaaaatgcctacaaggttattgaagctggcgcaaatgccattgtcgcaggttctgcagtttttggggctccagactacgctgaagctatcaaaggaataaagaccagccaaagacctctagctgtagccgcataaagagctggacgtgtaatcatttactctgtgcaagtttaccagtgatgcgatctgtatagatgtgtgtcttgtccagctatacgtataccggagatgaaaggagacggaggcagtgaagaaatatccttttttttcttctcatttttcacgaggatgccgtgcactgctcccagaatgctgtgtccaatttacaaacgcacaggtggcacatgaactagcagagtagctctctcttgaaaggaaactgtatttggggtcgatgaaccctctggtgttattcttcagactggtaaacgatgtaacatgtttgataatcaataaagtgcgtcgtatggctttcctaaaaaaaagcacagcagcacacgaatgtaacatgtttgtacatcggcatctgactgagtctgaagcccttgtacatgattggaatttaccttaaaactgtctggaactttgcacattttttttttgaaaaatggcaggagctctgcctttcttaaagcggtaaagag

SEQ ID NO: 200873 - DNA, 904 bp, Zea Mays
cctcaccggtggcttgagagttgagagagattaaaagtctaggagcaaaggcaggagttgttttgaatccagcgactccactcactgcaattgattacgttcttgatgttgttgacctggtgctgattatgtctgtgaatcctgggtttggtggccagagctttatcgagagtcaagtaaagaaaattgcagaactgagaaggttatgtgcagagaagggagtgaacccctggattgaggttgatggtggtgttggtccgaaaaatgcctacaaggttattgaagctggcgcaaatgccattgtcgcaggttctgcagtttttggggctccagactacgctgaagctatcaaaggaataaagaccagccaaagacctctagctgtagccgcataaagagctggacgtgtaatcatttactctgtgcaagtttaccagtgatgcgatctgtatagatgtgtgtcttgtccagctatacgtataccggagatgaaaggagacggaggcagtgaagaaatatccttttttttcttctcatttttcacgaggatgccgtgcactgctcccagaatgctgtgtccaatttacaaacgcacaggtggcacatgaactagcagagtagctctctcttgaaaggaaactgtatttggggtcgatgaaccctctggtgttattcttcagactggtaaacgatgtaacatgtttgataatcaataaagtgcgtcgtatggctttcctaaaaaaaagcacagcagcacacgaatgtaacatgtttgtacatcggcatctgactgagtctgaagcccttgtacatgattggaatttaccttaaaactgtctggaactttgcacattttttttttgaaaaatggcaggagctctgcctttcttaaagcggtaaagag

SEQ ID NO: 200874 - DNA, 689 bp, Zea Mays
tgcgacattgatagatgcagctattaattcaggaaattcaggtggcccagcttttaatgataggggaaaatgtgtcggtatagcttttcagtctcttaaacatgaagatgcggagaacataggttatgtgataccgactccagttattacacatttcattgaggactacaaaaaatctggagaatacacatgctgcaattgagtacattcattctttatcaagggcacagcctgcacgttctctcaatggtgttggcctttgtcctgctagtagatcacttagcacccatgccgccactacgtcaagcacaccacagttgaaagcacaccacgtcaagcacccaggccgccactacgtcaagcaaaacagaagacgagaagaactgatgtagccatgttcatgcttccactgttgaaatgcatattcagcatagcttgctcagctcttatctgttgtttcaatgttgatttaaaagaagagctggtagttgtgggcttttgaacaatagctggagtgatatgaaacattagtgatgtagttgtgggcttttgaactgcttcaagctagagtgatatcgctgtggtgcttttgtgactgatcatctctggagcttttgtgaatgatctagctagctatctgtaaatgatctagttgtgaatgatattataattgtgatgcttttgtgaat

SEQ ID NO: 200875 - DNA, 2256 bp, Zea Mays
cgccgttcgccacaaatactccccggagagcgagtacttactggctcgccatatggcaccaacagcaaaacagcgaaacagtgcagagacaagctacaacaacctaccctaacaggccattccttccactgcacttcattcgatcctgagctatagctggctgcctgagctcgctccaagaagtgtatctatagtatagacactaggcttcgtgtggcgtgctcgagatatgcttgcagtgtcgccgtcgccggtgcggtgtgccgatgcggaggagtgcggcggaggaggcgccagcaaggaaatggaggagaccgccgtcgggcctgtgtccgactcggacctggatttcgacttcacggtcgacgacatagacttcggggacttcttcctcaggctagacgacggggatgacgcgctgccgggcctcgaggtcgaccctgccgagatcgtcttcgctgacttcgaggcaatcgccaccgccggcggcgatggcggcgtcacggaccaggaggtgcccagtgtcctgccctttgcggacgcggcgcacataggcgccgtggatccgtgttgtggtgtccttggcgaggacaacgacgcagcgtgcgcagacgtggaagaagggaaaggggagtgcgaccatgccgacgaggtagcagccgccggtaataataatagcgactccggtgaggccggctgtggaggagcctttgccggcgaaaaatcaccgtcgtcgacggcatcgtcgtcgcaggaggctgagagccggcgcaaggtgtccaagaagcactcccaagggaagaagaaagcaaaggtggattggacgccggagcttcaccggagattcgttcaggcggtggaggagctgggcatcgacaaggcggtgccgtccaggatcctcgagatcatggggatcgactccctcacgcggcataacatagccagccatctgcagaagtaccgttcccacaggaagcacatgcttgcgagggaggtggaggcagcgacgtggacgacgcaccggcggccgatgtacgctgcccccagcggcgccgtgaagaggcccgactctaacgcgtggaccgtgccgaccatcggtttccctccgccggcggggacccctcctcgtccggtgcagcacttcgggaggccactgcacgtctggggccatccgagtccgacgccagcggtggagtcaccccgggtgccaatgtggcctcggcatctcgccccccgcgccccgccgccgccgccgtgggctccgccaccgccagctgacccggcgtcgttctggcaccatgcttacatgagggggcctgctgcccatatgccagaccaggtggcggtgactccatgcgtggcagtgccaatggcagcagcgcgtttccctgctccacacgtgaggggttctttgccatggccacctccgatgtacagacctctcgttcctccagcactcgcaggcaagagccagcaagacgcgctgtttcagctacagatacagccatcaagcgagagcatagatgcagcaataggtgatgtcttaacgaagccgtggctgccgctgcccctcggactgaagcccccttcggtagacagtgtcatgggcgagctgcagaggcaaggcgtagcgaatgtgccgcaagcttgtggatgatccccggggctgcatagctgctagctcgtccctgcacgcagtgcaacaaaaggaatttgtcgacatgccttttatgttttgaattcccgtgaaccgtttatggagcactctcaactcgttcagggtcagatgaacagaacattataggagtacattctttgaggtttcaggtttgagggaaatcaacctgagtgcatccaagtacagtgtactgccacagtgccacgtcggaaaatgaagtcttgacccgaataacaagtattccctcgggttatttgtcgttttcgacaaggaaccttcgtacatgggatgaagttgtgcatgatatgaagagcgcggttcgggagaaggatcaaccagtgccgaagctacccatgagaaagcttcggattagcggtgaaaaatgaaaccgacttaaaggggaaaaggttgtctagtccttgatagattatccctgagtcaatagtaaatgtcaagggcatgaatgtaattctatacaggctgcgtcatgtgcctataaatagatgaacagtgacaccgtactgttcatgctgacttgtattcactcgtgcgtcacgcttggatttttaccttctgtc

SEQ ID NO: 200876 - DNA, 3278 bp, Zea Mays
ggctcgcaaaggactcgctaccttaagtccagcactctcccactccctcccagaccctcccacttaaacccgccgccgccgccgatgccgctccttctcccggtctccactaggctgcgaatgctcggcgcccgcgcctcgtgagggtttcatgttccaaatggactgttttaagctggggtgacgatgacaattcttcaagcagaaaatgtaacacatcatcattaaaaatgttactagagaaggagatgtctaaagaagcagagtcaaagagaagacatccaagtgtcattgccagattaatgggtcttgaggaggatttacctactaaagaaccaactgtacaccataccgtaagtgacttgagtagagatttgaatgccacaaacaacaccttacagggaaaagaacaccatcactttataatgtcgaagacacaaaactaccaatcctgtcatgaaaaaatcgaatacaatgatgtttttgaagtatctgaaggacaaccgggaacagactgttttcatgatagaacttcacagaaaggatggtcttccgagaacaagagtgagcaattcaatattgcacgagacaagatcatggaaccagaacagttagctattgaagagaagctcctttgtacaaaggagttgcctgaagctcttgtttttccatgttcaaatagagatttatttcttgaatttcctgaagaacataaccccacattctcaagacagtcgagtgggcttcatgcaaaccaagcaccgcctcaaacaaaacgcattacagtgctgaaaccaattagatctgttgatagtgatggcataagacgacccagagcagaaattggtaagcaaaatgtattgaagatgagaaggttccatcagattcctagttcaaaggaagagataccttcccaaccaagtagaataatccttttgaggcctaccccagggaagccaggtatatcaaaggcaaagctgacatccagggcaacttcatttcagttacctaaccgtaacagtctcaatggatcattagatgataaccaggcatccataggatctgcaggactagtgcatggtatgatgcagtgccggcaagatggatgtcaccaaagagatgattctttattatcttctgcatactcaaatggatatgggggagatgaaagctcattcagtgattcagaagttgattataccagtggctctgaaatcaactatattgaagattgtgataccctcagtgactccgagggaggtagccctctgtcaagacactcatggaattacataagaagatatgaaggtcaatgctcaagttcatcctttagcaaaatatcccacttttctgagtcgtcagttgtaacggaggccaaaaaacagatttcagagcgatggtcaatggttacatgcaatgagatgagtcaagtgcaactgtcgagaagaaaatgcacgttaggtgagatgctctccattaaggaagcaaaggaagacgaggccaccactgggatgttttatgtttccagcaaccagtcatgtggcctggagaatgaactgactacacgttctacaaatgtaactacttctagaaaaaatggtgacaatggggagagatcttcgaaattgccaagatcaaaatctgttccagtgatttcatccacgtctgataacatgacggtgaacatgcaagcttcaaatcctgagagctgcaaacttaaagtggctgttgtgtcaaataaaggaaaatcagctttcaagggaagagtttcagattttttcttgtctaaaagtaaaaggccaagaaggcagatgcctgcttatcatcaatctgattgtattgctgaggggcttgaaggctgtattactcataatagacaggactgcaatcataaaatggatgccatcgagaaagcgatgcattacgatgatgaattcaatagtttttcgacacgaatatcaactagcataccagatagaacaacttctggtgcatctgtttcattgggcagttcaaccggaaacctggataaactaggagtaaacaaatgcctaaatggtaaccgtgatcaaccaagccctacctcagttcttgatgcaccctctgaagatagcagttgtaatgagcctgaaacacttggaacaactacttccaagaatgcgatatcaagatcttcagcaattgaaactgtggcccgtttcttgtcattggatgacaccgcctcagagtcacagtcactttgtaacccaagaccgagttctcttctccctgatgcagatgatgatgagtcagagtgccacgtccttgtgcaaaatataatgtcatcagctggattaggcacttcacagtcacgtatggttttcgccggctggcatttacctgatcaccctcttgacccggtgctgcgtaacaaagtatctcagctgcaggagaaaagttcatacagaaggcttctttttgactgcgtgaatgttgctctaattgagatcggtgagaacgccttactgagcgccctcccatggagtaaaagaagttccagaacatggaggggcacctcatctcctgatctgggggtggaggtctggagtattctcaaggactggatacacggggcacggatgtttgtggtgagcaagagagataatgctgggatcatactggacagaattgtgaagcaggaggtcgaagcaagagggtgggtgaaactgatgatggcgcaggtggttgtcatcaccgaggagctcgaagggggagtaatggaggagctggttgaagaagcggtgctggatttttacagtctgttttcagtggtgagatatcgattgtgactggtaaaactttccacggagcagctggtttgtgtatgctcttgttttgcagctacaccggtcgttcgccgccgtatccattcccccctggttctctttctagctggttctgcttcttgtattacaaagtttgtataaacttctggtagatgagaacatggtaattgtgcagttcatgagaagttttgtaggcaaaataaagtgagccaaactttccatggtgggatctgctgtttgtgcatttcacattgttcgttcattgttaatgagcaagagcagcgaaaggttttgccagattaataagtgctgtggagcatatattatctcattgagaatgtatttattaggcgcatagtaaaatgtaatgtaaacactacatacctcaaaagacaaaacgactcataataaagattggagaatattcgaagacaattattattaataattagc

SEQ ID NO: 200877 - DNA, 3110 bp, Zea Mays
ctgctgtgcgcttcgcctccaacagcgtcagcaacagtacgcttcagcgccttctgctcatgcccaaaccccgaagcggaagccccccgaccccaaacctcgcaagcgaccccagtaatggcgaccaaggcgctatccgtctcctcgctcacctccacggcctttgcctccttttccttgccgcggccccgcaggccttcaccttcgcctcccctcctccgccttctcggtcctcgcccccgcgcctccactctctccgccgccgctcccgacgacgaggacggcgtcgacaccgtggagcagctcctccacccacgcccgcctgagacctcagcccccgccggatcccgcggccggatcgaccgcctcatgaagctccagcgccgcgccgacggcgacgccgtgcccggggggcggaggaggtggttcccttacctggacgcgttccggcccgcggccgggggcgcggagctgtccagcggggaggtcatagatgtgctggagccgcacatcctagaggcgcggcgggaccggattcgacaagccgttggcaaccggagctacgccgtttgcctcgtggtggaaggcctctccgacttcggcaacgtctcggccgcgttccgctccgcggacgcgctcggcgtgcagtccgtgcacgtcatttcctgtgatagcagcaaaaggtatagagacaacaggcatgtgagcatgggtgctgagaaatggcttgacattgagatatggaactcacctgcagaatgtttcagtgcattaaaaaaacgcggttatcgcattgcgaccacttatttgggaactgattcggtttgtgtgtatgatatggattggtctcaaccaacagctattgttgtgggcaatgagcttaggggtataagtgatgatgctctagaattgtcagatttgcactgcagcattccaatgaaaggcatggtggattcgtttaatgtatctgttgcagctggaatcctcatgcaccatgctgtttgtgatagagtttcccgcctgggccatcacggtgatctcttgcctgaagaaaataggatattgcttgctgagttctatctgcgacacagagaaagcacggctactatagttcatgaatatgccaaaatgaaggcaggaaaagttatgaccagactttgaaaacatcctgagaagctgagtgacgtgtctgccaatcaagtcttggattatctggtgcatttttctaacagaaaacgaggctattttttcctggagtttaccgctgatccctaccagattgctgggaagacgaggatccaagcccaatcattgagcagagctgttaacgattacgcatatggttttcagtgacgtggacttttgctcccaaaacagtcgcccgttaactatttttgtatgtttttgttaggatgaaagcttaatatgtttccacttgtttttcacaaacgttggcggtggttgggtttgggcggcaacgctccatgttctacagacggttacgaccggaagcttggtgtaaccgtaccagtataacctgtccttggagggttgagagcttgagatgtaaacgaactgcacttgtctacggcaggatgatgcgtctgtaacgcaaagctgtgcaactggtgaatctcgccaccgaattctgctagggaaagctacggacgtgttgaaaactggaacataaaagtcgtgccattgattctggcctcaacgatgctcgattgcatagccactcctttttctagagaatatgcaacgcgatcactgatcaggattgaaggggggatgagaaggtggacatcgttgctctagtgatttgatcaccagagatggtgttggtggtgaagcagcatcgctgcacgcactctgtgagctgtgtttgcatcaagggccatctcagtgaggatgctctgttcctcgtcttccgccacatgaactggaacccaaggctgattgctatcctgtcatgtgtgtgcaagtggtttgacgaggttgccaagcaggtgctgtggaaggagttctgtcatgcaagggcttcaaagatgatgctggatttgcattcaggtggtagccacattgttgatgggaactggaaagcgctggggaagctgctcatctattgcaatggctgcacaaaaggggggctcttcaataacatccatgttccaggccattttgtgttcaggacacgcttttctaggactgcgggcaggagtttcctgcctctgccatgcaagtcagacgtgttgtatgtgtcagatccatgtgagcatcttgatcaaggggaagaaggcgacttaggtttctttcgaggcatctttaagtcattcgccacttcaagagtgaagaagatgttgattgagaagcgggctaggtttcatccaagggagttgtgctcttattgtaagtcgaagctatggaacatgttccaggaaaatatgattccaaggagtgcttctgctagactgggtgcctatgatgattccgtcgagtattttgtatgcttgaatgggcatgttattggacttggtaccctgctaccactctcagactcggaggaggcagcagatgagtaatcatcaagaatgagtcaggtttggaagattgaagcccaggacttgcgaaaatggtactgaatcttggttgtgactagcagagagtgggatgacattggttcagcaaactgttgcacgacaagaatctgtggtgggctctgcgtcggactacccctgtgttcttgcacctgataacaaaaaaagaacccaatttcgaaggacgagaaagaaccaaatgcacacggttcagctcatccttttgaattgatcatccatcagagctagcataacataactatatacattgataagtaggttaaaatagatcaaacaatctcggagataaataatgtactcttgtagtcttgtgagtagctaacacgatatttggtataagtttcatatccttacttttcacatatgagcattcatatctgctagttataagcagcatgttgtaaaagtgttgtggaaatgattgagtaaatttgacggtggttgatagttagacaccattttctatatattgtgcacaaagagaagtatgcc

SEQ ID NO: 200878 - DNA, 1806 bp, Zea Mays
cgccattctcccgccagcacgctctcctgcgctcccgctcccacgccctcccgctttcgcgccatcccactcgcatccacgcccatgctgttgcgctctggccgccgcaatcttccatcgccgccgcaatgttcaggccgccgcgaccctgtcgaatagagagtggagaaaaagggatgggtatcggatctgcagagagtcaatcccagtttcttctaggaagggtggaagaagaggcatatcatctggagggagagtccgctgactccactatcagatccatgcgccaccaggtggttcccctcacagccaacgatcggatcccagaagatgtgccaagtggtagccaattcgacggtaccatggattctaggtattacacaaatctcctggttaatggtattgaagaatctcaagcaactcgtagtgatgtaagaatccaacatggtcgtgcaacagccaagagttctcagggtagaagcaaaaattttagagatgaggaggacattcttcttgtgtcagcttggctgaatgtgggcatggatcctattcaaggagttgatcaaacacatggcacactatggagaaggatacatgaatatttcaatgcaaacaagaaggttgaagctaggaatcacagtggttggtcaattgatgacaaggtcgcaaatgcatgtgtaatgttcaaggccgaagacccaaaggataagaagttttcatacctgcattgctggaaaatcttgaaggacaagcccaagtggatggataggcggaaggaaattggaagtgcaaaaaaatcagccactaagaaacagaagacaacgacaaattcttctccagcatcagttgcaaatgcaattgccgtagatgcccctcttgggggtgctgatcatgatgaaccatcatgtaggcccgacggtaagaagaaggagaaacaaaagctacgacaacgttcgtccatggaagttgtagactatctaattgcaaagaagaaagattctgaccttgaaaaggacttgaagaaagaggagaggtgcaataaagcctttgctctacaggaagaaaggatcaaattggacaaagaaaagtttgcgttccaaagacagctcgaagaggacagaataattggtttggaccttagcaccatgaactataaacaacagcagtattatgaagatcgtcagaacgagattcttgcaagacgtttcaatatctagaattttctagttttagttaagtatgctagatttttgcttcatagtccaagatgatttttgctgctagatttttctgttcgcatggtactcaaaaagggactgaatgttttcaagtttcgtgtattggactgaaaaaagggactgcatggtacacaagaacagaaaaaaattacaagatctcgtttggatgtttcttgaaaacgtaaatatttgatttatagattatcctcacctgttgtgaacacgtaactccacacatgattgcaggcaattgaagtggaaataaacagtaaccatgtttactgcacaactttgttcttattacataaagtagataaaaataaataaatagcacattaatcaattttatataactcagaatggttttgccacaagtgctcgatcaggtctgccttaagctgatagtgggtttccttgttcttgatatttttgtatttttgaatgaatgcatcgagttcaggtgaagaattgtgcgacactatcaccctttgtcccatgtcgtcgtagttgcaaagatattgtcccatatcgtcgaagttgtaaacttgttctcctccgtactcatccc

SEQ ID NO: 200879 - DNA, 1908 bp, Zea Mays
gccttgggcctggactctggaagacgacagaacgagccacaacccacaaacatacgcaccctctcgaccggttcgacttcagaacttccagcatcctatcagataccgaaatctccaactcccgcatcgcatcgaaccttcggcctgcaagcgaattcgtcctcccctctcctaccggcgcgaattcaaccgcccgcaaagccctaggccgatgcgtccgatccggctacccgagccgccgggtgtcgacggcatggagacgcccgagatcttctctggcagcggcactggtggcgccgccgtcgttcgccgcgccgtcctcataggcaacggctcccccggcgcagaaaaccagtgtctcggcctcgcccgcgccctcggccttgccgacaacctcacattctaccgtgtcacgaggccgagaggagggatcaatgagtggctgcactttctccccatttccatgcacaagtttatagaccaaatactcaggcagttcttccggaacacaaggttcgcaatagtggttcaggggaggaagccgcgtgtgctgaatggtgcatcagttgggttgtctgcagttctggaagcaaacgtcaagaagattgttactgtagcacgcgatacgtatgagaaggaaggtccgacgttagtcgttgcttgtggctgggacaccatatcatattcaagcttgataaggaaagtagcttcagataatgtgttcgtcatccagatccaacacccacgatctcgccttgataggtttgatttagtggtgactcctcgccatgattactatgctttaaccgctagtggacaacaagaagttccacacctgttccgcagatggattactccacaggaaccacccaggagtaatgtggctgattctgctgcgctacggcttgctgctatagcctggcatgatgaactcgcccctttgcctaagccgttgctaattgtcagcattgggggccccaccaggaattgtaaatatggtgtagatcttgccaggcagctcataacttctctgtataatgtgctagatagctgtgggagtgtcagaatctcattctctccgagaacaccatggaaggttgctgatactatatttaaagaatttgctggacatcccaaggtctatatttggaatggtgaagaacctaaccctcacatgggacatcttgcatgggctgatgcttttgtcataacagcagactcgataagtatgttaagtgaggcaggtagcacagggaaacctgtttatgttattgggaccgaacactgtaaatggaagttttcggcttttcacaagactctacgggagcgaggggttgttcgcccgttcactggattggaagatatttcaaatagctggagctaccctcccctaaatgacgccattgaagtagctactcgtgttcgtgaagtgattgcagaacgagggtggacagtgggatgatgtgatcataagtagctctctgttattctgtctaactttggtccagatatgatatatacggtaaactatagagtttggttagcatcactgtggattcagtttgtgtcgtttggaaaaaaaaaggagagaataacatagccatggaatggcctgtacaaaaggtgaccctctctttcatggtacacccccaagccaaaattttgagtaactgcacagctccgggagatttttttggctactggcaacatgttgcctgatgtaaatttaagctgctagaaggaattggagtaaatagagttgataatgagaaaatttgaagctgatgcaacgtttcgggttttgtatggttgtatgcttatgactttaccctgttttgattaaatttgtgtatgatgaaacatgcagaacccatcagcttttaccccttttgtggatttttttttttt

SEQ ID NO: 200880 - DNA, 3354 bp, Zea Mays
ctcacacttcacgcgctgagggagcaaccagaacaaggctcctctcgtcgttattgctgaggctccggccgagtagagctcaggccatgaacctctacatgcttaaacaaacgtccctcctcctaccgctgctcctttgctgtgtctgtaataccgtccgctgctcggcagccccggacaccaacaccagcgcggaaacggacgcgctcgcgctgctcgagttcaagcgcgccgccagcgatccagggggagcgctgagcagctggaacgcgagcaccagtctctgccagtggaagggcgtgacgtgcgccgacgaccccaagaacaacggagcagggcgagtgacggagctccgcctcgcggaccgcgggctgtcgggcgccatcgccggctccgtcggaaacctgaccgccctccgcgtcctcgacctgtccaacaaccggttctccggccggatacctgctgtcgacagtatccgcggcctccaagtccttgatctgagcaccaactcgttagaggggagcgttccagatgcactcacaaactgctccagcctggaaaggttgtggctctattccaacgcgcttacgggttcaattcctcgaaatataggctacctttcgaacctagtgaatttcgacctgtccgggaacaaccttaccgggaccatcccgccgtcgatcggaaacgccagcagactggacgtgctgtaccttggtggaaatcagctgacggggagcattccggacggtgtaggggagctgtcagctatgtctgtgctggaactaaacaacaatttgctgtcaggtagcatcccatcgaccctttttaatctgtcgtctcttcaaacgctggacttgggttcaaatatgctggtcgacacccttccgtctgacatgggggactggctcgtcagcctccaatctctcttcttaaacgggaaccagctccaaggtcagataccatcgtccattggcagagcttcagagctacaatctatacacatctcagccaaccgcttctctggcccgatcccagcttctctgggcaacctctccaagctctcaactctcaacctcgaggaaaacgccctcgaaacacggggagacgaccagagctgggggttcttggccgccctgggaaactgtgcccttctgaactcactctcactagataacaataatctacagggagagctaccagattcgatcggtaacctggccccaggtcttcaagtcctgcgtatgggcttcaacaacatgtcaggaacagtccctccaggcataggcaagctgcggaacctaacgacgcttgggctaagccacaacaggtttactggtgtacttggaggatggctcggaaacctggagaacctgcagtacgtagatcttgagagcaacggttttactgggcccatcccaccttctgctgggaaccttacacagctcttggcgctcaagctagcgaacaacgggttccagggctccgtaccagcgagcttcggtaaccttcagcagctcgcgtatctggatctgagctataataatctccgaggcagcgtacctggcgaggccctcacttcaccaagaatgaggacgtgtgttttgtcctacaacagtttggaaggctccataccgcttgattttagcaggcttcaggagttaactgagctatctctctcctctaacgcgttcacaggggatatccctgacagcataggccagtgtcaaatgctacagacagtcgagatggacaggaacctcctcacgggcaacgtcccagtatcgttcggcaacttgaagagcttgagcactctgaatctttcgcacaacaatttgtcaggtcccatcccgtcagcagctctcactggcctacagtacctgacacgcctagatatctcttacaatgacttcaccggagaagttccgagagacggagtgttcgcaaacgccacggctgtttcactccaaggcaaccggggactgtgcggaggagcaacgaccctccatatgccttcgtgccgaactagatctaataagagggcggaaacacagtactatctgatagaagttttgatcccagtatttggcttcatgtcgcttgcattgctgatatacttcttgctcattgagaagacgaccaggagacgacgacggcaacatttgccgttcccttcgtttggcaagcagttccctaaggtcacctaccaagatctcgcccaagcaacgaaggacttctcggagtctaacctggtcggcagaggaagctacgggtcagtgtacagatgcaggttaaaggagcacggaatggaggaggagatggcggtgaaggtcttcgacctcgagatgccaggcgcggagaggagcttcttggccgagtgcgaagcgctgaggagcatccagcatcgcaaccttctgcccatcagaaccgcgtgctcggcggtcgacaacaggggcggcatgttcaaggccttgctctacgagttcatgcctaacgggagcctggacacgtggttgcaccctagagcggcgccgccggcggggggcgggaaagctccgaagcgtctaggcttctctcagagagtgaacgtcatcgtcaacgtagccgatgtgctggactatttgcaccacgagtgcgggaggccgactgttcattgcgacctgaagcccagcaacatcctcctggacgacgacctcaacgcccttctgggagatttcggcatcgcgaggttttacgctgactccaagtcagcaccgccgccggcggtagacgacccaactagttccgtcggtgtgagagggactataggatacatcgctccagagtacgcgggaggtgtccgcctggcgtctacctctggagatgtttacagctttggtgtagttgttttggagatggtgacaggcaagcgaccaacagaccctaccttcaaagatgggctggatatcgtcaactttgtgagcagcaactttccgcatcagatatcccgcgtcgtcgatcctcgtctcagcgaggagtgcaaggagttttcccgagataaggtggaaccagaaaatgcagcttaccagtgtttactgtgcctgctacaagtagctctttcatgcacgcacccgtcaccaagtgaaagggtcagcataaaagaagtagccaacaaactgcatgcaacccagatggcatatgaaggagcgaaagaaaagaaataaaatacatgtttcagcatagtgatagtgtgataccatgctacgagaaaaagggaccagagtggttgtcttagccgtgtttgaccgcgttcctcctgccgcggctaagctgccattatacatgtccaaacgggtcgggcctaacgggtagccc

SEQ ID NO: 200881 - DNA, 626 bp, Zea Mays
cggagcatccagctcacacttcacgcgctgagggagcaaccagaacaaggctcctctcgtcgttattgctgaggctccggccgagtagagctcagagtacgcgggaggtgtccgcctggcgtctacctctggagatgtttacagctttggtgtagttgttttggagatggtgacaggcaagcgaccaacagaccctaccttcaaagatgggctggatatcgtcaactttgtgagcagcaactttccgcatcagatatcccgcgtcgtcgatcctcgtctcagcgaggagtgcaaggagttttcccgagataaggtggaaccagaaaatgcagcttaccagtgtttactgtgcctgctacaagtagctctttcatgcacgcacccgtcaccaagtgaaagggtcagcataaaagaagtagccaacaaactgcatgcaacccagatggcatatgaaggagcgaaagaaaagaaataaaatacatgtttcagcatagtgatagtgtgataccatgctacgagaaaaagggaccagagtggttgtcttagccgtgtttgaccgcgttcctcctgccgcggctaagctgccattatacatgtccaaacgggtcgggcctaacgggtagccc

SEQ ID NO: 200882 - DNA, 385 bp, Zea Mays
ccagactccagttggctcaagggccctccaaccaactcgtctgcgtggaagataaaagctccctagggtctcgcccacactgtcgtattcccaccgccgtcctgcaatcgccgtgagctgagagggagattcacgccgctgccgtgggattcacaccagcgcctccgcttgggtgccaatcgcccgctcgcaagcttcgccgagtcgtggggaaggtttccgaaggccaacgctaaggatttgtcgtcgggacccagggaattcatcaccggagttgcgcccgaccgcggagccgctcctcgccgtggttctccctgcactgcgaccctcgttgtcgaagaacccgtgaccgaggatcctggtgagcagcagattgaagtagctg

SEQ ID NO: 200883 - DNA, 7252 bp, Zea Mays
cacgtcggttcgtcggtctccaaccgacctcgtctcgtctcgtcaagcatcatctgctttctgcgactctgccgcgaagccctcttcgctttctattcatcagaccatatcgaatcaagtcagattcagggaggggaaggcaaaaccctaacctctctcactccgccgccaccgggggagcgcgaggaggacccttcatcgacccgccgcacgaacaaagctcccatggccaacctcggcggtggcgccgaggcgcacgcgcgattcaagcagtacgagtatcgcgccaactccagcctcgtcctcaccacagactcccgcccgcgcgacacccacgagcccaccggagagcccgagacgctctggggcaggatcgaccccaggtccttcggcgaccgcgccgtccagaacaggccgcccgagctcgaggagaagctctccaagtcgcgcaccaaaaagtctaagcgcgacgctgctgccgcgctcgactccgccgacctcccccgtcgcgacgccaagcgcaggcgccgcgctgcttccgcccaggaggtctccgtcctctccctcaccgacgacgccgtgtacaagccccagaccaaggagacgcgtgccgcctatgaggccttgctcagcctcatccaacagcagcttggcggccagcccctcgatgtccttgctggggcagctgatgaggtgctcgctacactcaagaatgacaaggtcaagaaccctgataagaagaaggacattgagcagctgctcaaccctatctccagccagctctttgatcagcttgtctccattggcaagctcatcaccgacttccatgatgcggcagctggtgatgcttccggtgcgccttccgccgacgctgtggacaccactctggatgatgatgttggtgttgctgttgagtttgaagaagacgaagacgaggagagtgattttgatcaggtgcaagacgagctggatgaggatgaggaagatgacatggctgagttgaatggtcctggaggtatgcagatgggtggtgagttagacgacgatgacatgcagaacgccaatcaggggctgaccgtcaatgttcaggacatcgatgcttactggctccagaggaagatatcccaggcatacggggatggggacattgatgctcaacagagccagaagcttgctgaggatatcttgaagatcattgccgagggtgacgacagagacgtcgagaatcgccttgtcatgctcttggactatgagaagtttgatctcattaagttgttgctgcgcaaccgtctcaagattgtttggtgcacccgcttagccagggccgaagatcaggaacagaggaagaatatagaggaagagatggcaagtgacccaagtttggctccgatattggagcagctacatgcaaccagagcatccgcaaaggagaggcagaagaacctggagaaaagcatcagggatgaggccaagaggctcctcaacaatgatgctgctgctgctggtgctgatggtgccagggaccacagggcagccgagtgggacatggagagtggatggctgaaaggacagaggcagttgcttgatcttgaaagcctctcgttccatcagggtggtctctttatggctaacaagaaatgtgaacttccgactggatcgtttagaacccctcataagggatatgaggaggttcatgtgccagcactgaaggctaagccctatgaaacaggagagaagattgtgaagatatctgatatgccagagtgggcacggtcagcttttgatgggatgacacagctgaacagagttcagagcagggtctatgatactgctcttttcaaaccagacaatatccttctctgtgctccgactggtgctggcaaaacaaatgtggctgtgcttaccatccttcagcagattggtctgcatatgcaggatggagagtttgataataccaagtacaaaattgtctatgtggccccgatgaaagcattggttgctgaagtcgttggaaacctgtctaagcgtttggcaggttacaatgttactgttagggagctcagtggagaccagaacttgaccaagcaacagattgatgaaacacagattattgtcacaacacctgagaaatgggacattgtgaccaggaaatcaggggacagaacctatacccaaatggtgaagctgttaatcattgatgagattcatctgctacacgataacagagggcctgttctggagagcattgttgctaggacagtcaggcagattgagacgacaaaggagaatattcgtctggttgggctctctgcgactctaccaaactatgaagatgttgcattattcttgcgcgttcgcaaagaaagcctcttctattttgacaacagttaccgaccttgccctcttgcccagcaatacattgggatcactgttaggaagccactacagaggatgcagttgatgaatgagatttgttatgagaaggttatggctgccgctggtaagcatcaagtgcttatatttgtacactcaaggaaggagacggcaaagactgccaaagccatcagagatacggcgttggcaaatgacactgtcagccgctttctgaagaatgagagtgcaagccaagagatccttggcactcatgctgaacttgtcaaaaacaatgatcttaaagaccttttgccttatggatttgctattcatcatgctgggatggcaagggttgaccgtgagcttgttgaagaactttttgctgacaagcatattcaagtacttgtatccactgctacccttgcatggggtgtcaatttgcctgcacatactgttatcataaagggtacacagatttacaatccagaaaaaggtgcttggacagaactaagccctctggatgttatgcagatgcttggtcgtgcaggaaggcctcagtatgatacgcatggagaggggataatcttgactggccacagtgaattgcagttctacctgtctcttatgaaccagcagctgcctattgagagtcagttcatatccaaattggctgatcaattgaatgcagagattgttctggggactattcagaatgctcgtgaagcatgctcgtggcttggctatacttacctctatattcggatgctccgcaatccaacattgtatggtttgccagcagatatcttggagagtgataaaacacttgatgaaaggagagctgatttgatacattccgctgcaaatctactggataggaacaatctgataaagtatgacaggaaaacaggatacttccaagttactgacctgggaaggattgccagttattattatatcagtcatggaactatttcaacatacaatgagtacttaaaacctacaatgggtgatatcgaactgtgccgactgttttctctgagtgaagaatttaagtatgtaggtgtcaggcttgatgagaaaatggaactggcaaagcttttggatcgtgtgccaatacctgtgaaagagagcttggaggaacccagtgcaaagatcaatgttctgctgcaagcatatatttctaggttgaaactggaaggcctttctcttagttctgatatggtctacatcagacagagtgctggacgtctcttacgggcactattcgagattgttttgaagaggggatgggctcaactagcggagaaagcactgaatctttgcaagatggttgataaacaaatgtggagtgtccaaactcccttgaggcagtttactggaattcctaaggagatcttgatgaaacttgagaagaaggagttggcttgggagaggtactatgatctgtcctcacaagaaattggtgagctgatccgctatcccaagatggggaggccgctgcacaagtgcatccaccagttaccaaagctgaatctttcagcccatgtccagcccattactcgtacagttttgggttttgagctgacaattacacctgatttccagtgggatgataaggtacatggatatgtggagcccttttgggttattgttgaggataatgatggcgagtacattcttcaccatgaatatttcatgcttaagaaacagtatgttgacgaagatcatacattgaacttcacagtgccgatatatgagccgctgcctcctcagtatttcatacgtgttgtgtctgacaagtggcttggttctcagacaattctccctgtctgctttaggcatttaattctaccagaaaaatatgctccaccaactgaattgcttgatctgcagcctcttcctgttagtgcattgagaaatgcaagatatgagggcctctatagtgcttttaagcatttcaatcccatccagactcaagtattcactgtcttgtataacagcgatgacagcgtgttggtcgctgcgccaacaggcagtgggaagacgatatgtgcagagtttgctatactaaggaaccaccagaaggcattgtctggcgagagcaacatgcgggttgtttatatagctcccattgaagctctcgcaaaagaaagatacagggactgggagcggaaatttggagagtttgccaaggtagttgagctcactggtgaaacggcagctgatttgaagcttctggataaaggtgaaatcataatcagtactcctgaaaagtgggatgcattgtctcgccggtggaaacagcgaaagcacatccaacaggtcagcttattcatagttgatgaacttcatctacttggatctgataagggacatgttttggaagtcattgtatctaggatgaggcgtatttccagtcatattggcagtaacatacggatcgtagcactttcagcatcacttgctaatgctaaagatcttggtgaatggattggtgccacctctcatggccttttcaacttccctccagcagtgagacctgtgccactggaaattcacatccagggtgtggatatagcgaactttgaggcaaggatgcaagcaatgacaaagcctacctacactgccatcacacagcatgcaaagaacaataaacctgccctggtgtatgtaccgacaaggaagcatgcaaggttgactgcattggacttgtgtgcgtactctagtgttgagggtgctggaactccatttcttcttgggtcaggagatgagatggatactttcaccagaggtgttgaagaagagactcttaagaatacacttaaatgtggtgttggctatttgcatgagggtctaagtgagcttgatcaggaacttgtaacccagctgttccttggtgggaggatccaagtgtgtgttgcaagcagcacaatgtgttggggaagaccattgcctgctcatttggtcgttgtcatggggactcagtattatgatgggcgggagaatgctcacaccgactatccaattacagatctgcttcaaatgatgggtcatgccagtagaccacttcaagataactcagggaaatgtgttatattgtgtcatgcacctcgcaaagagtactacaagaagtttctttttgaggccttccctgtcgaaagcaatcttcaccatttcttgcatgatcacatgaatgctgaggtggtggttggtgttgtagagaataagcaagatgctgtggattatcttacttggacgttcatgtatcggcggctagctaagaatcctaacttctacaatcttcagggtgtaagtcacaggcatctttcagaccatctttctgagctagttgagactattctgaatgatcttgaatcgagcaagtgtgtggctatagaggaggacatgtacctgaagcccctcaaccttggccttattgcttcatactactatattagctacacaactattgagcgttttagttctatgctgacccagaagactaaggtgaaaggactcctagagattctagcatctgcctcagaatatgcagagcttccgggtcgtcctggtgaggaagaattcattgagaggcttgttcgtcaccagaggttctctatcgagaaacccaagtatggggatccacatgtgaaggccaatgctctgctgcaagcccatttttcaaggcacacagtggtcggaaatctggcagctgatcagcgcgagattctcctttctgctcataggttgctccaggcaatggttgatgttatatccagcaatggttggcttagtcttgctcttagtacaatggagctgagtcaaatggtgacacaaggcatgtgggatcgggattctgtgctgcttcaagttccacacttcacaaaagacttggctcggaggtgccaggaaaatgaagggaagcccatcgagagtatctttgatctagctgagatggctgtcgatgagatgcgggatctcttacaactatcgaactctcagctgcaagacatcattgaattcatcaagcggttccccaatgttgatatgacctatgaggtccgtgagggtgatgatataagcgctggtgacaatgtaaccgtgcaggtaactctggagcgtgacatgactaacgtttcatctgaggttggtccagtccatgcgccaaggtttcccaagcctaaggaagaaggctggtggctggtgattggggacagctccacaaaccagttactggcaatcaaaagagtggcactccagaagagggcgagagtgaaacttgagttctctgctccggcagaggctgggagaaaggactacatgatttacttgatgtcagactcttacttgggctgcgatcaggagtatgaattcaccgttgatgtcaaggatgctggaggggattgatgatgaagactgtgacactatgtcgcatagaagtagaattgagtgtgtactgtaacgcgatattggaacattctgtgttgtaacctcgaacatgtggaagctgtaacttattttgcatgttgaccggtgcactttgggcgttgctgtgttatcctattctagtattgttgtaaggattgcgctcggttacacttgagccacagtattttggatcaacttgttgcttctataagcttgctgatgctataatgtttgatcgacctgttgatgcactaatggtgtgttgatgttttaacctgttctattggcaggacaggcagtaggctagttcgaaaactcaaacctcatgggggattaaggccccgttcggttccctctcagtccattgtggtttgctcactatatttactcttataattacatttatctacttgtataatatttgctcaactagctttgtatagattataac

SEQ ID NO: 200884 - DNA, 3466 bp, Zea Mays
taacaccaaacaaacatcccaaagtcgaatgggggcgctgttaaacgattggaattggctaaccaagcatggcaagcattcgcattcacatgatcctcgacggctcgacctcgacgccggtcgccggctgccccactacttctacggggccacggtcctgagttggccccaccaagcagtgagtcactccatgcgccgcgcgcttctttgccggctcgttcaaccttcccgccaaaagaatggaaattccccaatctccaccagaaaaacacagaggcaacccgcacacagatctgacacctaaccactctccctccgccaccgccatgacggccggcgctggcgagccccgccgtatagtcctcctcctagacctcgataccttcctccccacttccagctcaagcacccccgctgccgcctcctacctcgccgaagtcctgcccgccgccacctccctgctcgccgcctgccggtccccggcgtccctctccgcggggcgcctcttcttctcctccctctccccgatcctctcctcctccctcctccctaggccgctcccggccgcccccaccccgctctccttcgacctccacccggccaccctcgcgtccctcgccccgctccgctgcctggcgctccgggcgacccccgcgcacccgcgcgcccccgcctcctcgtcagtcgccaaatctctcctccagcttgagcacgactactcctgggaccacgacccccctcgccgccgtcgctgccgcggcttcgatccgccgcccaatctggtggctctcttcacgcccgtcacggaattcgatctgttcggggacgacgccagcttcgtcgagaaattccgcaaggttttcggtcctgtcagggaccgcctctcggcgattggtctacaggtgtgctgggtcgtcgtcccatccgcctccgtctccgcctctgccgccgccagtgaggggatcaggagggcggtcaccgagctgggctggtggttcactaccgccgatgcggtcgcgttggggtcggccgttgcaccgccggcgctcgtgtggggaggtgttggacttggcggcggggaaggtggacggcgaggggaggtggtgttggagatcgcggatgtggagggcaaaccacttgtctgcaagggctgtgaggtcgaggtggttggctcctcacggttgcagcaggccagcggcaatgccgtgtccaggatacatgtcaggtcggtgtgtgaggcggggaattgggagcggttgatggatggggatgttgccgtggttcgagggttccaacgggaggggagcaaggctgacggtgaagaagctgtagataaggagtattttcctcatcggattcttgaattggtccttggtgacgagaaggaccgattaggggttgccaagccaatttggcagctaattttggtgttccttagtagaaggaactattgtgcagtagtctcagtttctgatggagatggaaactccgtagatggtgttctcatgcccttctcgatgaactgtgccttacttcatcttgagaagaatgtcatgtctgccaaagcctccgagacgccaagttgtggtgcatctgatgagacaaaggtccagagtgataagaagaggagaagcaggctggtcggtaagctacttgaggtgaccacctggagtaccttctgtgacatgcttcgcaaacgtgctgatggaagcatgccggtggtggacttggaggatctatatttcagcaggtatggcaccacatccaaaaagttgcggtttctgaaatgctggatgaaacaggtgaaacagtcacgtcttagtactctatcaagtatacatacagaaggagagcagcgtcttccctcgaaggatgattcagaagcaagagttctggtttcagaagaagatgcttcagctagtcttgtcaatttttcgctggatgaagcagattgccagaaagtagacgcactagtggatgtagcaggctgcagtgaagtgggcatacctgtcgatgaagcagattgcagtaaagtggacatatcagtgggtgaagagagttccatgttctcttctatggaagaattagaagcatttctgggagctgtcccacataagattgagcaaagtctttgttctgaagatgctgatctggggagtttagctgaacgtttggttgacttgtccgtccatgcgatgttggttaaacacggaaagattgcagtgcggtactttgaacacaatgaagcggaagatggttctagtgcaaagattgcctgtgagctttccaatatcttgctgaggaaaccgaaggaactggtctcaaagtacagagaaagtaactcagcgtctgctgcatcagaacaaactgcaaaacacagtacatgttataaaatccgagagcatgagctgcagatcttgcttagaatggaaatgatcaaatctgaactcgggtctgccatagaggaaggttcaaaacagaaaatgataaaagacatctgctcgcttctgcaatttattgacatcaatctccaaggggattcttttcagtctgacggtattcttgagtatgctgaaaagaccataaagtcgaggtacatcaactccatggaggatgtgatcaagaagatctacagggagatggagtttgatttatttgatgacgacgacggagttgactactcagattctctacccagcagcagcaaccaggacgacggcaggtgccgcagccagcggggctccgacagcgcgagcgcctccgcgctccacctgctgcagcgggacgccaggagcagccggcagcgcgaggacgacgaccggcacgacaagctgacggcgagggcccgggagcggcgggaccggcagaggcggctctcctccttcaccagctgggtgcccgacctgcgccgcgtctgggcgctcaagcacccggggaaagagccgtgcgcgtgggtgccgcggtcccggtccaggtcgtgcgcgaagcggcggcgggccgcgtgcaccgatgtcgtcctcgagacgccggtgacctccggcaaaaggcacatgagcgggtcggagtccgacgacgccagacaggtggcggcgaggaggtccgccgcgctcggggccgtgtccaagaccttgtttgacgacgaggtggtcgagactgacgttagctcgagtagcacgtaagccgaccaggagattgctgttttttgtttgttgatttgatgaaaagagtcgtcgttgtcttgggcatgttcgtttcctcacccagcgtcgttgttcaggaaaggaaatagaacgaaatggcagtgatctttactgttgtcagttcagttcagttcagtgcgagtgtgcgacactgtactgcccttgcccttgtcgttttatcgagtggacactcggggatgagacagctagtgagcagggagtccgattttttttttttgtattttggcccttttttggaaaaaaat

SEQ ID NO: 200885 - DNA, 2086 bp, Zea Mays
ccacgtcatgtcgcgccaaagcttgtcaaatacagcggtcccacatcagtacgtcaccaatcgaactgaatggaccagtcgacgtcatcgcctccctcgcctatccgctcggccgttggcgctcaccaaaaccacccagaagcctccgcttgaccgcttcactcgctttccgcccgccgcgccatgagcgccgccgcctgcctgttcgctgccgccgtctccctatcattcccgtcgacctccgcaccctcttccgcaagacgccgccgcctccggagccccaccaccctcctccgctgctccccgactcgccgccgtgggccggtccggcggacactcgacgagcggctgctcgaggccgcgccggcggagaccgaagacgtccaaaccgctgttgatgtagaggatggaggagggatcgctgagggcgatgaagtgggaacagaggagatggaggagctggagcagcgaccgccgacgagggctttcgtgaagagcaggcggcagcggcaggaagaggaggaagccgcggcggggcaagaccggttcaagctcatcaatggcaaagagatatttcaagagaaggcttatctggttggtgttgagtgcaaacggacaggagggaacctgttcggcatagaggagtcccttaaggagctggagcagttggctgatacggcgggccttctggtagtcggctcaacctatcagaagctttctaccccaaatccaaggacttacattggttcaggaaaggtttctgaaatcaggactgcaatccaagcacttgatgttgagactgtaattttagacgatgagttatcccctggacaactacgtaacttggaaaagtcatttggtgggagtgtccgagtctgtgatcgaactgctcttattcttgatatttttaatcaaagggcagcaacacatgaagcttctttacaggttactttggcacagatggaatatcaacttcctaggttgacgaaaatgtggagtcacctggaacggcaggctggaggtcaagttaagggtatgggtgagaagcaaattgaagttgacaagcgcatcttgagaactcaaataagtgccttgaggaaagaattggaatctgtacggaaacaccgaaagttgtaccgcaaccgtcgccaatcagttcctattcctgttgtttctctggtaggatatacaaatgctggaaaaagtacactcctgaaccgcttaactggagctgatgtgcttgcagaggataagttatttgccacattagatccaactactagaagggttttgatgaagaatgggactgagttccttctaactgataccgtcggattcattcagaaattacccactatgctggtagcagcatttagagcaacactagaagagatatcggaatcatcagttatagttcatcttgtggacattagccatcctttagctcaacaacagatagatgctgttgaaagagtactgaaggagttggatgtcgagtcaatccccaaattagtcgtgtggaataagattgacaatacggatgaaccattgagtgtaaaagaggaggctcagaaacaaggaataatctgcatatcagcgatgaatggtgatggtttggaagatttatgtaatgcagttcaagcaaagttgaaagactcgatggttcctatagaagcttttgtcccatatgacaaaggagatctcctgaatgacatacataaggttggaatggttgaaaaaatggagtacaaggaaagtgggacatttgtaaaagctcatgtgcctctacctctggcaaggcttctcacacctctacggcagcaggtggcagccactgtgtgatgtgcatgtccccgatcccttgatgccattggcactcacaaaattaccacatcttgtagattcacaaaaggaatagctttgctgtagaaaacttagattatcttcattgtgtttctacggttctaccagagtaccgtatcaacaggtgcacaggactagatagctgtatgtacgcacaacagaaatgtaaatgttctcagcagaatttaagccccgtttggtttgggtaaaaacaaagaaaaaa

SEQ ID NO: 200886 - DNA, 1573 bp, Zea Mays
caacaacggccgcggcagccgcagagagacaaggtggacacgacaggactacaggacaccgccccgaagcggcacctgcaaggcggccgagaaaagcgcagccctgcgcccctgccacgactcggccacctctccctctggtctcctcctccacttgctcctgctcctccagacctccactccacccctccaaaaggtctagtaaaatagaaggaagccgcccccaatcgttcggtcgttcctagcccggcgcacggcgcacgaaggggttcgatcggatcggcgccggcggaggcgagatgtgggagtcggtggcgctgacgctggcgggcaccgccggcaataacatcggcaaggtcctgcagaagaagggcaccctcatcctccctccactctccctcaagctcaaggtggtcaaggcgtacgcgtcgaaccagctctggatcagcggtttccttatggacatgtgcggtgccgcgctcatgctcaccgcgctctctcaggcgccggtctccgtcgttcagcccattgctggttgcggtctcgcaatactctgcgttttctcccatttttacctcaaggaggttatgaacggcctcgattggattgccatcacgctagctggtctcggcaccataggtgtaggtgttggaggtgaggaacagaaagttgaccagatacctcttttaaatataccctggctagtgctctccattgtcatcttgtttgtaggtactgctcaacacttggcttcatatgtataaaaagcaaaggcgtgagcaagagttgactggacctgaagtgattgaggagatcatatatggcttagaatcaggcattttgtttgggatttcttcagtgatctctaagatgggatttgtgatgtccgagatgggttttccaaagattgttgtgcctgctgccatatcttgtagtgtttgctgcagtgcagtgggatttgtgtatcagactcgaggcctcaagcatgggagggcaattgttgtatctacatgtacatcagtggcatctatagtgtccggtgttgttgctggcatgattgcacttgatgaacatctgcctaaagctcccacagctcgatttttcctcttactgggatggttcttcatcatcacaggagtaatactgcttgttagttcaacccgattgattgcgcgtctacctaggcctgttcagaagtttttgaagagcaacatagagcgcacccacagcatcaggaggcctggttcagcacgagggaaggatcccatcccaacaacaacgatccatacgtcgtcactgcacttgcttgcttctccaacaaaggagaaggcctagaaaaatgttggcactagagcaacttcgtttcggcgcctcacgtttgccatgtcattgattgattgaatggttccgtgaacgtagtctagagtagcatcttaaaagcttgggtttggttattcaccatactgccctttataggtctaacagagacttggggaaaaattgctgagtttttatcaggtctcgtttttttttaaacataatcccttcatcgtacaaactgtattatttgtaa

SEQ ID NO: 200887 - DNA, 1545 bp, Zea Mays
caacaacggccgcggcagccgcagagagacaaggtggacacgacaggactacaggacaccgccccgaagcggcacctgcaaggcggccgagaaaagcgcagccctgcgcccctgccacgactcggccacctctccctctggtctcctcctccacttgctcctgctcctccagacctccactccacccctccaaaaggtctagtaaaatagaaggaagccgcccccaatcgttcggtcgttcctagcccggcgcacggcgcacgaaggggttcgatcggatcggcgccggcggaggcgagatgtgggagtcggtggcgctgacgctggcgggcaccgccggcaataacatcggcaaggtcctgcagaagaagggcaccctcatcctccctccactctccctcaagctcaaggtggtcaaggcgtacgcgtcgaaccagctctggatcagcggtttccttatggacatgtgcggtgccgcgctcatgctcaccgcgctctctcaggcgccggtctccgtcgttcagcccattgctggttgcggtctcgcaatactctgcgttttctcccatttttacctcaaggaggttatgaacggcctcgattggattgccatcacgctagctggtctcggcaccataggtgtaggtgttggaggtgaggaacagaaagttgaccagatacctcttttaaatataccctggctagtgctctccattgtcatcttgtttgtaggtactgctcaacacttggcttcatatgtataaaaagcaaaggcgtgagcaagagttgactggacctgaagtgattgaggagatcatatatggcttagaatcaggcattttgtttggactcgaggcctcaagcatgggagggcaattgttgtatctacatgtacatcagtggcatctatagtgtccggtgttgttgctggcatgattgcacttgatgaacatctgcctaaagctcccacagctcgatttttcctcttactgggatggttcttcatcatcacaggagtaatactgcttgttagttcaacccgattgattgcgcgtctacctaggcctgttcagaagtttttgaagagcaacatagagcgcacccacagcatcaggaggcctggttcagcacgagggaaggatcccatcccaacaacaacgatccatacgtcgtcactgcacttgcttgcttctccaacaaaggagaaggcctagaaaaatgttggcactagagcaacttcgtttcggcgcctcacgtttgccatgtcattgattgattgaatggttccgtgaacgtagtctagagtagcatcttaaaagcttgggtttggttattcaccatactgccctttataggtctaacagagacttggggaaaaattgctgagtttttatcaggtctcgttttttttgtttggttgctgagtgcaaaatccgaagctgttactctctgacccttcttaactctcgtcatggaaagtatgttggtcaaacttaaagactagatttatagataaatattattaatgtttgtgtttttaaataa

SEQ ID NO: 200888 - DNA, 1647 bp, Zea Mays
caacaacggccgcggcagccgcagagagacaaggtggacacgacaggactacaggacaccgccccgaagcggcacctgcaaggcggccgagaaaagcgcagccctgcgcccctgccacgactcggccacctctccctctggtctcctcctccacttgctcctgctcctccagacctccactccacccctccaaaaggtctagtaaaatagaaggaagccgcccccaatcgttcggtcgttcctagcccggcgcacggcgcacgaaggggttcgatcggatcggcgccggcggaggcgagatgtgggagtcggtggcgctgacgctggcgggcaccgccggcaataacatcggcaaggtcctgcagaagaagggcaccctcatcctccctccactctccctcaagctcaaggtggtcaaggcgtacgcgtcgaaccagctctggatcagcggtttccttatggacatgtgcggtgccgcgctcatgctcaccgcgctctctcaggcgccgcccattgctggttgcggtctcgcaatactctgcgttttctcccatttttacctcaaggaggttatgaacggcctcgattggattgccatcacgctagctggtctcggcaccataggtgtaggtgttggaggtgaggaacagaaagttgaccagatacctcttttaaatataccctggctagtgctctccattgtcatcttgtttgtactgctcaacacttggcttcatatgtataaaaagcaaaggcgtgagcaagagttgactggacctgaagtgattgaggagatcatatatggcttagaatcaggcattttgtttgggatttcttcagtgatctctaagatgggatttgtgatgtccgagatgggttttccaaagattgttgtgcctgctgccatatcttgtagtgtttgctgcagtgcagtgggatttgtgtatcagactcgaggcctcaagcatgggagggcaattgttgtatctacatgtacatcagtggcatctatagtgtccggtgttgttgctggcatgattgcacttgatgaacatctgcctaaagctcccacagctcgatttttcctcttactgggatggttcttcatcatcacaggagtaatactgcttgttagttcaacccgattgattgcgcgtctacctaggcctgttcagaagtttttgaagagcaacatagagcgcacccacagcatcaggaggcctggttcagcacgagggaaggatcccatcccaacaacaacgatccatacgtcgtcactgcacttgcttgcttctccaacaaaggagaaggcctagaaaaatgttggcactagagcaacttcgtttcggcgcctcacgtttgccatgtcattgattgattgaatggttccgtgaacgtagtctagagtagcatcttaaaagcttgggtttggttattcaccatactgccctttataggtctaacagagacttggggaaaaattgctgagtttttatcaggtctcgttttttttgtttggttgctgagtgcaaaatccgaagctgttactctctgacccttcttaactctcgtcatggaaagtatgttggtcaaacttaaagactagatttatagataaatattattaatgtttgtgtttttaaataa

SEQ ID NO: 200889 - DNA, 1541 bp, Zea Mays
caacaacggccgcggcagccgcagagagacaaggtggacacgacaggactacaggacaccgccccgaagcggcacctgcaaggcggccgagaaaagcgcagccctgcgcccctgccacgactcggccacctctccctctggtctcctcctccacttgctcctgctcctccagacctccactccacccctccaaaaggtctagtaaaatagaaggaagccgcccccaatcgttcggtcgttcctagcccggcgcacggcgcacgaaggggttcgatcggatcggcgccggcggaggcgagatgtgggagtcggtggcgctgacgctggcgggcaccgccggcaataacatcggcaaggtcctgcagaagaagggcaccctcatcctccctccactctccctcaagctcaaggtggtcaaggcgtacgcgtcgaaccagctctggatcagcggtttccttatggacatgtgcggtgccgcgctcatgctcaccgcgctctctcaggcgccggtctccgtcgttcagcccattgctggttgcggtctcgcaatactctgcgttttctcccatttttacctcaaggaggttatgaacggcctcgattggattgccatcacgctagctggtctcggcaccataggtgtaggtgttggaggtgaggaacagaaagttgaccagatacctcttttaaatataccctggctagtgctctccattgtcatcttgtttgtactgctcaacacttggcttcatatgtataaaaagcaaaggcgtgagcaagagttgactggacctgaagtgattgaggagatcatatatggcttagaatcaggcattttgtttggactcgaggcctcaagcatgggagggcaattgttgtatctacatgtacatcagtggcatctatagtgtccggtgttgttgctggcatgattgcacttgatgaacatctgcctaaagctcccacagctcgatttttcctcttactgggatggttcttcatcatcacaggagtaatactgcttgttagttcaacccgattgattgcgcgtctacctaggcctgttcagaagtttttgaagagcaacatagagcgcacccacagcatcaggaggcctggttcagcacgagggaaggatcccatcccaacaacaacgatccatacgtcgtcactgcacttgcttgcttctccaacaaaggagaaggcctagaaaaatgttggcactagagcaacttcgtttcggcgcctcacgtttgccatgtcattgattgattgaatggttccgtgaacgtagtctagagtagcatcttaaaagcttgggtttggttattcaccatactgccctttataggtctaacagagacttggggaaaaattgctgagtttttatcaggtctcgttttttttgtttggttgctgagtgcaaaatccgaagctgttactctctgacccttcttaactctcgtcatggaaagtatgttggtcaaacttaaagactagatttatagataaatattattaatgtttgtgtttttaaataa

SEQ ID NO: 200890 - DNA, 2292 bp, Zea Mays
caacaacggccgcggcagccgcagagagacaaggtggacacgacaggactacaggacaccgccccgaagcggcacctgcaaggcggccgagaaaagcgcagccctgcgcccctgccacgactcggccacctctccctctggtctcctcctccacttgctcctgctcctccagacctccactccacccctccaaaaggtctagtaaaatagaaggaagccgcccccaatcgttcggtcgttcctagcccggcgcacggcgcacgaaggggttcgatcggatcggcgccggcggaggcgagatgtgggagtcggtggcgctgacgctggcgggcaccgccggcaataacatcggcaaggtcctgcagaagaagggcaccctcatcctccctccactctccctcaagctcaaggtggtcaaggcgtacgcgtcgaaccagctctggatcagcggtttccttatggacatgtgcggtgccgcgctcatgctcaccgcgctctctcaggcgccggtctccgtcgttcagcccattgctggttgcggtctcgcaatactctgcgttttctcccatttttacctcaaggaggttatgaacggcctcgattggattgccatcacgctagctggtctcggcaccataggtgtaggtgttggaggtgaggaacagaaagttgaccagatacctcttttaaatataccctggctagtgctctccattgtcatcttgtttgtactgctcaacacttggcttcatatgtataaaaagcaaaggcgtgagcaagagttgactggacctgaagtgattgaggagatcatatatggcttagaatcaggcattttgtttgggatttcttcagtgatctctaagatgggatttgtgatgtccgagatgggttttccaaagattgttgtgcctgctgccatatcttgtagtgtttgctgcagtgcagtgggatttgtgtatcaggtacatctagttttttcgagatttgccaactgggtttgtgtcattcatcgtagcctccacaggaggtgcgatatgttgttgttcgtagaagataggccacagttgttttttctcttgtaccaattcacgaattatgtgcccacaccttcataaccttggcctttggggagggggggggtctgaagcggggttgcatagtggctgtagagacaaaagttgaaaacaaaacataaaattcataaacagcatgaccgacagggtatactgttgtaaccatccgttgaaaatactatagtcagttttttagtcatttagtgggactgagtgactttatttttcacggcgaaaagtatgtgctggttttatgcataaaatgaaactcctaggacacttacactgaaattgtaatttcaaggacatggattatttgcaaattttaatctcttgcctcactgcagatattgtactgattgttatttctattataaattgcactagtttattcgacctgttttttttttttgaaacattcgtatgtttaagatgaagcataaggactagcccaaccgttttcttgcagtgtcgttacttcatctatattctccttttatggttcttttatccatgcagactcgaggcctcaagcatgggagggcaattgttgtatctacatgtacatcagtggcatctatagtgtccggtgttgttgctggcatgattgcacttgatgaacatctgcctaaagctcccacagctcgatttttcctcttactgggatggttcttcatcatcacaggagtaatactgcttgttagttcaacccgattgattgcgcgtctacctaggcctgttcagaagtttttgaagagcaacatagagcgcacccacagcatcaggaggcctggttcagcacgagggaaggatcccatcccaacaacaacgatccatacgtcgtcactgcacttgcttgcttctccaacaaaggagaaggcctagaaaaatgttggcactagagcaacttcgtttcggcgcctcacgtttgccatgtcattgattgattgaatggttccgtgaacgtagtctagagtagcatcttaaaagcttgggtttggttattcaccatactgccctttataggtctaacagagacttggggaaaaattgctgagtttttatcaggtctcgttttttttgtttggttgctgagtgcaaaatccgaagctgttactctctgacccttcttaactctcgtcatggaaagtatgttggtcaaacttaaagactagatttatagataaatattattaatgtttgtgtttttaaataa

SEQ ID NO: 200891 - DNA, 1486 bp, Zea Mays
caacaacggccgcggcagccgcagagagacaaggtggacacgacaggactacaggacaccgccccgaagcggcacctgcaaggcggccgagaaaagcgcagccctgcgcccctgccacgactcggccacctctccctctggtctcctcctccacttgctcctgctcctccagacctccactccacccctccaaaaggtctagtaaaatagaaggaagccgcccccaatcgttcggtcgttcctagcccggcgcacggcgcacgaaggggttcgatcggatcggcgccggcggaggcgagatgtgggagtcggtggcgctgacgctggcgggcaccgccggcaataacatcggcaaggtcctgcagaagaagggcaccctcatcctccctccactctccctcaagctcaaggtggtcaaggcgtacgcgtcgaaccagctctggatcagcggtttccttatggacatgtgcggtgccgcgctcatgctcaccgcgctctctcaggcgccggtctccgtcgttcagcccattgctggttgcggtctcgcaatactctgcgttttctcccatttttacctcaaggaggttatgaacggcctcgattggattgccatcacgctagctggtctcggcaccataggtgtaggtgttggaggtgaggaacagaaagttgaccagatacctcttttaaatataccctggctagtgctctccattgtcatcttgtttgtaggtactgctcaacacttggcttcatatgtataaaaagcaaaggcgtgagcaagagttgactcgaggcctcaagcatgggagggcaattgttgtatctacatgtacatcagtggcatctatagtgtccggtgttgttgctggcatgattgcacttgatgaacatctgcctaaagctcccacagctcgatttttcctcttactgggatggttcttcatcatcacaggagtaatactgcttgttagttcaacccgattgattgcgcgtctacctaggcctgttcagaagtttttgaagagcaacatagagcgcacccacagcatcaggaggcctggttcagcacgagggaaggatcccatcccaacaacaacgatccatacgtcgtcactgcacttgcttgcttctccaacaaaggagaaggcctagaaaaatgttggcactagagcaacttcgtttcggcgcctcacgtttgccatgtcattgattgattgaatggttccgtgaacgtagtctagagtagcatcttaaaagcttgggtttggttattcaccatactgccctttataggtctaacagagacttggggaaaaattgctgagtttttatcaggtctcgttttttttgtttggttgctgagtgcaaaatccgaagctgttactctctgacccttcttaactctcgtcatggaaagtatgttggtcaaacttaaagactagatttatagataaatattattaatgtttgtgtttttaaataa

SEQ ID NO: 200892 - DNA, 1651 bp, Zea Mays
caacaacggccgcggcagccgcagagagacaaggtggacacgacaggactacaggacaccgccccgaagcggcacctgcaaggcggccgagaaaagcgcagccctgcgcccctgccacgactcggccacctctccctctggtctcctcctccacttgctcctgctcctccagacctccactccacccctccaaaaggtctagtaaaatagaaggaagccgcccccaatcgttcggtcgttcctagcccggcgcacggcgcacgaaggggttcgatcggatcggcgccggcggaggcgagatgtgggagtcggtggcgctgacgctggcgggcaccgccggcaataacatcggcaaggtcctgcagaagaagggcaccctcatcctccctccactctccctcaagctcaaggtggtcaaggcgtacgcgtcgaaccagctctggatcagcggtttccttatggacatgtgcggtgccgcgctcatgctcaccgcgctctctcaggcgccgcccattgctggttgcggtctcgcaatactctgcgttttctcccatttttacctcaaggaggttatgaacggcctcgattggattgccatcacgctagctggtctcggcaccataggtgtaggtgttggaggtgaggaacagaaagttgaccagatacctcttttaaatataccctggctagtgctctccattgtcatcttgtttgtaggtactgctcaacacttggcttcatatgtataaaaagcaaaggcgtgagcaagagttgactggacctgaagtgattgaggagatcatatatggcttagaatcaggcattttgtttgggatttcttcagtgatctctaagatgggatttgtgatgtccgagatgggttttccaaagattgttgtgcctgctgccatatcttgtagtgtttgctgcagtgcagtgggatttgtgtatcagactcgaggcctcaagcatgggagggcaattgttgtatctacatgtacatcagtggcatctatagtgtccggtgttgttgctggcatgattgcacttgatgaacatctgcctaaagctcccacagctcgatttttcctcttactgggatggttcttcatcatcacaggagtaatactgcttgttagttcaacccgattgattgcgcgtctacctaggcctgttcagaagtttttgaagagcaacatagagcgcacccacagcatcaggaggcctggttcagcacgagggaaggatcccatcccaacaacaacgatccatacgtcgtcactgcacttgcttgcttctccaacaaaggagaaggcctagaaaaatgttggcactagagcaacttcgtttcggcgcctcacgtttgccatgtcattgattgattgaatggttccgtgaacgtagtctagagtagcatcttaaaagcttgggtttggttattcaccatactgccctttataggtctaacagagacttggggaaaaattgctgagtttttatcaggtctcgttttttttgtttggttgctgagtgcaaaatccgaagctgttactctctgacccttcttaactctcgtcatggaaagtatgttggtcaaacttaaagactagatttatagataaatattattaatgtttgtgtttttaaataa

SEQ ID NO: 200893 - DNA, 1072 bp, Zea Mays
ggcaacttttataggacaatgattaaacctgttatgttgtatggtgcaaaatgttggcctacaaaaagacgacatgttcaatagataagtgttgcgaaaatgtgtgtgtagcttgttgcattggatttgtggctatacaagaaaggattgagtatggaacaatgatatacgtggtaggttaggggtagcaccaattgaagaaaagcttgtctaagaccggttgaaatggtttggacatgtctaatggagacctccagaggcatcaatccatagtgggatcctaagatgcaacagtagtagaaagagaggcagggcatttggtcgtacccctttgactaacataagccctaagaaaaccttggagggtgctttagctggcctagctggctgtgtgctgaccactgtgctgctgtcaactgccttacgctggccaagatcactgttgagtgccacagcttatggaatcctgatctttctgggttcattgtttggggatcttgtcgagtctctgatcaagcgtgacgctggtgtcaaggactctggatcactcattcctggtcacggtgggattctcgaccgagttgacagctacgtgttcacaggggcactctgttactcttttgtcagagtagctctaccctcgtatggggtctgaataaagcacctggatgtttgctggtttgtctctcctgccatcagcaatgcggtaaccgtattttaacataatgttgagtattgcttagaatgccctagacagacaatgtgatcctcctatccaagcaaattgggcgtccgagtttctgactgttgaagatagaaccgaagatcaacgtcgacagtgttacggacttggggcttgagatggcctttccagctcaaccagtctgttgcagacttgtagctttgggtgtacatagtttatcttttttttcatagggtagaaaggaaagcgtaattatccgtcgcaaaagctgttaactgtgtattgaggcagcttatgtcaatatgtactatacctgttggtatcgattgttttaatgatccaatgcatttgattggtaactaagttccc

SEQ ID NO: 200894 - DNA, 1638 bp, Zea Mays
ggtttagtcccttttagcacatatgtgaaggactaaagactaaatcattttagtccatattttagtcctagtgtttgacaaaaaagagactaaataagactaaaaactagagactaatctttagtccctctaaccaaacaccccttgagaaacagggtcgaaaatctctgctcatttcacatcgaacgctccgcctacaatcctgtactgcacgcgctccccatccgcacaacttcccgcctcccatggcggcgccggcgccgggggccacccgcctccaccccccgttcctcctgcttccttccccgccgcgaccccatcctccactccggctccgcttcctcctgccgtccccgccgcctctccgcctccgccgccgcttcccgctgctcgctgccgccgccgtctccgccggcggcggcggtggaggggaggaagccgccggcaggaaggccgataaggccaggcagctgcagaagcgggtcctcgtgggcgtcgccatcggggtgggcgcaggcggcatcgtggtcgccggcggctgggtgttcgcagccgccgtcgcagctgctgtccttgccggctcccgggagtacttcgagctcgtccgcagcactgccagcggaggcgggaccccgccgccgcgatacgtgtcccgcgcgtgctccgccatctgcgctctcatgcccatccttacgctgtactatggacgcatggatgttactgtggcattttctgcattcgttattgccatagcattgcttttacaaagaggaaatcctcgttttgctcagctaactagttcagtttttgggttgttttactgtggctatctaccttctttctgggttaagctccggtcaggattagctgcccctgccttaaatacaagtatagcataccgttggccaattcttctcggtggacaagctcactggacagttggacttgtagcaaccttgatggctattagtagcatcattgctgctgatacatctgctttcctttgtggaaggtgccacagcttatggaatcctgatctttctgggttcattgtttggggatcttgtcgagtctctgatcaagcgtgacgctggtgtcaaggactctggatcactcattcctggtcacggtgggattctcgaccgagttgacagctacgtgttcacaggggcactctgttactcttttgtcagagtagctctaccctcgtatggggtctgaataaagcacctggatgtttgctggtttgtctctcctgccatcagcaatgcggtaaccgtattttaacataatgttgagtattgcttagaatgccctagacagacaatgtgatcctcctatccaagcaaattgggcgtccgagtttctgactgttgaagatagaaccgaagatcaacgtcgacagtgttacggacttggggcttgagatggcctttccagctcaaccagtctgttgcagacttgtagctttgggtgtacatagtttatcttttttttcatagggtagaaaggaaagcgtaattatccgtcgcaaaagctgttaactgtgtattgaggcagcttatgtcaatatgtactatacctgttggtatcgattgttttaatgatccaatgcatttgattggtaactaagttccc

SEQ ID NO: 200895 - DNA, 1684 bp, Zea Mays
ggtttagtcccttttagcacatatgtgaaggactaaagactaaatcattttagtccatattttagtcctagtgtttgacaaaaaagagactaaataagactaaaaactagagactaatctttagtccctctaaccaaacaccccttgagaaacagggtcgaaaatctctgctcatttcacatcgaacgctccgcctacaatcctgtactgcacgcgctccccatccgcacaacttcccgcctcccatggcggcgccggcgccgggggccacccgcctccaccccccgttcctcctgcttccttccccgccgcgaccccatcctccactccggctccgcttcctcctgccgtccccgccgcctctccgcctccgccgccgcttcccgctgctcgctgccgccgccgtctccgccggcggcggcggtggaggggaggaagccgccggcaggaaggccgataaggccaggcagctgcagaagcgggtcctcgtgggcgtcgccatcggggtgggcgcaggcggcatcgtggtcgccggcggctgggtgttcgcagccgccgtcgcagctgctgtccttgccggctcccgggagtacttcgagctcgtccgcagcactgccagcggaggcgggaccccgccgccgcgatacgtgtcccgcgcgtgctccgccatctgcgctctcatgcccatccttacgctgtactatggacgcatggatgttactgtggcattttctgcattcgttattgccatagcattgcttttacaaagaggaaatcctcgttttgctcagctaactagttcagtttttgggttgttttactgtggctatctaccttctttctgggttaagctccggtcaggattagctgcccctgccttaaatacaagtatagcataccgttggccaattcttctcggtggacaagctcactggacagttggacttgtagcaaccttgatggctattagtagcatcattgctgctgatacatctgctttcctttgtggaagggcatttggtcgtacccctttgactaacataagccctaagaaaaccttggagggtgctttagctggcctagctggctgtgtgctgaccactgtgctgctgtcaactgccttacgctggccaagatcactgttgaggactctggatcactcattcctggtcacggtgggattctcgaccgagttgacagctacgtgttcacaggggcactctgttactcttttgtcagagtagctctaccctcgtatggggtctgaataaagcacctggatgtttgctggtttgtctctcctgccatcagcaatgcggtaaccgtattttaacataatgttgagtattgcttagaatgccctagacagacaatgtgatcctcctatccaagcaaattgggcgtccgagtttctgactgttgaagatagaaccgaagatcaacgtcgacagtgttacggacttggggcttgagatggcctttccagctcaaccagtctgttgcagacttgtagctttgggtgtacatagtttatcttttttttcatagggtagaaaggaaagcgtaattatccgtcgcaaaagctgttaactgtgtattgaggcagcttatgtcaatatgtactatacctgttggtatcgattgttttaatgatccaatgcatttgattggtaactaagttccc

SEQ ID NO: 200896 - DNA, 1881 bp, Zea Mays
cccgcgcgccgtcccaccccgccggtgcagtgtacgtgcgcgcgcgggcggcgatggccgctccgcaagcaacgcagcactgtctacgtgtcgctcgacctgcgcgacagcggcgtcagagaccgaagccttggaatgtttccggccgtccacgcagcgtttcccccgtgctccgtgtatgtctgcctccctcccccgctccgcgcgggcgagctgagcgcctgagccccataataaataggcggccagccacgtagcagcaccggccggacgcgacgcaatgcaacacgaagaagtgtgcgatactactacctgcggtgaaggcaatggtcgaggaggtgaggaagaactcgagatggaggggcactcgttgatgaggatgaagaggagggatcacttgctgctcactgacggcgccggcgccggcgccggggcggggcctcttgcggtgcagacgccgatggagcccatggagttcctgtcgcggtcgtggagcgtgtcggcgtcggagatctccaaggtgctggctggcggcgtcggcgggaggcggagctccaacttcgtcgtcgaccgcctgtccgggatgctcatgccggagacgctcgcgctcgcagcctcctcctcctccgccggcaccaacaacatcagcccccgcaagcgcaccctcaggagcaggagcgcgatctccgcgcaccaggtccaccacacggtccacgcgatcggcaagtggttccaccactgggacgcgggcagcagcaaggtggacaaggcccgcgccgagcgggcgcgcgtgcacgccgcggtctccgtggcgagcgtggcggccgcggtcgccgccgtggccgtggccgcgggcgcgagccccgaggtggacgtcaccgacgacggcgccaggatggggagcgcgctggcgtccgcgacgcagctgctggcgtcgcactgcgtcgaggccgccgagctcgcgggggccgaccacgaccaggtggcgtccgccgtggagaccgcggtcgacgtgcggagcccaggggatctgctcaccctcaccgccgcagcggccacagctctcagaggggccgcggcgatgcggcacagggcgcagcgggaggcgaggagcagggcggccgtagcgccgtacgacaaggcctgcagctaccgcgcggacgtctggtgcaaggaaggcgcgctcctcaaacgcaaccgcaaaggcgctctgcactggaagcaggtggccgtgtacatcagcaagaagtcgcaggtgatagtgaagctgaagagcaagcacatcggcggcgccttctccaagaagaagaaaggcgtcgtctacggcgtctacgacgacatcccggcgtggccggcgcgcgagggcgtcgccgcgcaaagctcggcgccggagacgtgccacttcgggctgaggacggcgcatggcctgctcgagttccagtgcgaaagcagggcacagaggcgggactgggtggaggcggtgaaggacctgatccggcaggtggccggcgggactgctctgctcgagcactccttcgagtcgctaaggctgagcgcgtcttgatttaagtttggccgtgtagtctggcatgtaaatccgcctccatttgtccaatcggtagggagaaatcgaggtgcaaatttgcagaataatgtgcagagatgtagttttttgctttttcctgggaaggtaatatgaagcgcttagagtgctggtgtatgtaacgacgtgtgtctcaaaactatctcaccttgtttaacttgaaaatagcaagccaacttaaaagagagagccacccatcagactagtttttttgggggtgattggacattttgcttagttgggtgtgcttaataaactgtaggattccagacaaccct

SEQ ID NO: 200897 - DNA, 738 bp, Zea Mays
atcccatctctcctcactgtccgtgtcgctctctctctccccatccatcaaatccgcttcgtcatctcgcttgcagtccaaccaagtcctaggaataacaccacggcgcaacaactcgcaccaccaccgccgcgcagtagctagctaccataccagctgcacgcctcagtgctagcttcgccgggcgggggcggctgggacaccagcagtgcgtgctgcgctgcgctgcgcctctccctgccactcactcgaggagcaaccgtcccagctgcaagggcgacaagaggatcgaccagctgctagtagctagctcgcacatgttcccggtcgaagtgtcggcgctcgcggcgggcggtgcgggagcggggcgtcaggctgccggcgacgccgccgggacgatgctgccgccctttttcatgggctccatctggcccgcgaccgctggcgccgctggctccgaggaggacgaggcggcgacttcctcaaggaagccctgcgggctctggtagagaggccaggcgccgccggagaccggcccaagaggcgacgggtctcggacatgaacatgcaagcggcagcatagctagcacgccgccgcaggaggcgggcagatcatctcgctcgattggtcgtcgtagctcaaatacctaattgcatgcatgctcatgtcgaatatataaaaatggtactacctccatcatctccatgtttagttagatcaaaaaaaaaaaaaaaaaa

SEQ ID NO: 200898 - DNA, 1635 bp, Zea Mays
aactgctttcggcccaaaacacttccctgctctctcggtctctcccagagtcccagctccctcactctactctggacgcgactcgaacttaaaccctagagccgcagccccggtcgctccaccgaccccaaatctcaaatcagcgggagggaactcgcacgcgaaggctgaactcatggctcgcgtctacgttgggaacctggatccgcgtgtcacggcgcgggagatcgaggacgagttccggatgtttggggttctgaggagtgtatgggttgctaggaaaccaccagggtttgccttcattgactttgatgaccgcagggatgcacaagatgccattcgtgaattggatggtaagaatggttggagggttgagctgtcaactaaagttggtggtggccgtggccgagaccgtaacggttctgatatgaagtgctatgagtgtggtgaagctggccactttgcacgtgaatgccgcttacggattggttcaggaggcttgggtagtggaaggcgtcgcagccgaagtcctagatatcgcagccgcagccgcagccgcagcccaagatatcgaaggagcccaagctatagcagaaggtaatttgctaatgacaccaattcaccacatgtattcatccagtagttttaattaagggttgggaaacacgacctagaaatcctaaaacttttgagaacgaagcaaaatttcggagataacacgttccctttaaccaagtgagtatccactatccagtatggtctcagatttgttggatagtatttaaccaaacattcgactatgcatttgacttattgagtgttgttctttatcttgcattggtactatataatacaatgcattctacaccccctcccacctgttatagctttgttagcgttggcctaatatttcaggggaacatgttgagagacttcataaaatacagatcaatgtcttcttgcctaactagcagccttttcaatgcgttattttatgttcatcctgaaaacaaatgttcggtttttccggagctacagcccgcgagatcgttctcctaggaggcgaagttacagcaggtcgccactgggatctcctgcacggagtctcagcaggtcaccgccgctgccgccgcctcctcccagaaataacagcaggtcaccaccggcagcccgagacgtgagcaggtcaccaccggcagcccgagacgtgagcaggtcgccaccaccacctcctgatgccagaagaagctatagtggatccccaggacagcagccacaacgcgacgagtccccatatgccaatgacgcctgagattctcttagctgccccaagatgctggaaaatgctaggggcccccagcatgttttgcctgtccggtcggcacaactgtaattctgtaggatcgagtctgagattttgttccagtgttttgggtttcccttgacacatcgctgctgatacaattgtggaggcaggagcacaacgtttctgttttaagtattgactggatgactttgggcgcttgtagttgtcaaggcaggacctgatttgtgttaggcttgtattactagactgcattcgaatttggagaaagtgttcatcgtgctgtatgttgagatatctcactaggtcag

SEQ ID NO: 200899 - DNA, 1194 bp, Zea Mays
aactgctttcggcccaaaacacttccctgctctctcggtctctcccagagtcccagctccctcactctactctggacgcgactcgaacttaaaccctagagccgcagccccggtcgctccaccgaccccaaatctcaaatcagcgggagggaactcgcacgcgaaggctgaactcatggctcgcgtctacgttgggaacctggatccgcgtgtcacggcgcgggagatcgaggacgagttccggatgtttggggttctgaggagtgtatgggttgctaggaaaccaccagggtttgccttcattgactttgatgaccgcagggatgcacaagatgccattcgtgaattggatggtaagaatggttggagggttgagctgtcaactaaagttggtggtggccgtggccgagaccgtaacggttctgatatgaagtgctatgagtgtggtgaagctggccactttgcacgtgaatgccgcttacggattggttcaggaggcttgggtagtggaaggcgtcgcagccgaagtcctagatatcgcagccgcagccgcagccgcagcccaagatatcgaaggagcccaagctatagcagaagcccgcgagatcgttctcctaggaggcgaagttacagcaggtcgccactgggatctcctgcacggagtctcagcaggtcaccgccgctgccgccgcctcctcccagaaataacagcaggtcaccaccggcagcccgagacgtgagcaggtcaccaccggcagcccgagacgtgagcaggtcgccaccaccacctcctgatgccagaagaagctatagtggatccccaggacagcagccacaacgcgacgagtccccatatgccaatgacgcctgagattctcttagctgccccaagatgctggaaaatgctaggggcccccagcatgttttgcctgtccggtcggcacaactgtaattctgtaggatcgagtctgagattttgttccagtgttttgggtttcccttgacacatcgctgctgatacaattgtggaggcaggagcacaacgtttctgttttaagtattgactggatgactttgggcgcttgtagttgtcaaggcaggacctgatttgtgttaggcttgtattactagactgcattcgaatttggagaaagtgttcatcgtgctgtatgttgagatatctcactaggtcag

SEQ ID NO: 200900 - DNA, 1389 bp, Zea Mays
attttttttccagaagtcacactgaaatgctatatgtagaggcctagagggggttgttaaatgtgtttgactgtatgactgctagctcgatgtgatccattggttattctttgactgtttgtagatgtggtgcaacttaaaaccacttccaggagctaatcgactgataaaacatttaaagactaacggggtgcctactgctttggcttcaaactcaccaagatgtaacatagaagccaaaattttcttccaacaagggtggaaagagtctttctctgcaattgttggtggagatgaagtagagaaggggaagccatccccgaatatatttttggaagctgcaaagagaatgaactgtgctccttcaaattgcttagtaatagaggattccttgtgttacaggtggaaaagctgcagaaatgcatgtcatagctgtaccttcaatacccaaaaagactgctgagttcagttctgctgatgaggtgatcaattccctccttgatgtgaggcctgaaaagtgggggttgccaccatttaatgattggattgaaggtaccttaccaatagaaccatggtttattggtgggcctgtgatcaaaggatttggccgtggttctaaagtactaggaataccaacagcaaatttacccgcggagaatttttccgacgtagtgtcagaacatacatcaggggtatactttggctgggcaggactttcaacgcgtggtatatataagatggttatgagcattggctggaacccatatttcgacaataccgagaagacagtagaaccttggctgcttcataatttcggcgaggacttctatggcgaggaggtgcgccttgccatcgttggctacataagacctgaggccaactttccttcgctcgagagcttgatagagagaattcacgaggatggaagagtagcagagaaggcactagacctgccaatgtatgccaagtacaaagactcgccttatctgagaaacccttcgaagcacgggagtagtactaccggtgggacccagtctgagatggattccaagtgacaacccccctacagggccactagataatatgttacttattttctctatggtaaatgcgtcggtgttgatgcagaaacaattggactctctgtgagctaactcgcttcttaattttcggaagtagatagtattcctcgaagtggtgtttttactttgtaatatagaaaaaaataaagtggggttgttgaaacttgagagtcaaattccgagacgttatgcacgttttgatttctgaattaatcgattggtatcacttgtactgtttttatacgatgatgcttgaaccattcatttgtcattttaatttgatatacttgaagtcaacaatatgctt

SEQ ID NO: 200901 - DNA, 1644 bp, Zea Mays
ccgttttacgttagccaattctgctgtcagcttgccgctgtccgctcgtcctttgagctttggttgtgtctcccaaatatcttgcctttttgttgcattggactcttctgtggttagaatggcagcacccaagcccatttctcgtcttatttctcacgtcattcttgatttggatggcaccctcttaaacacagattctgttgtaagtaaggtagtaaaaccatttattctaaagaatggaaaaacgtgggatagcaagaaagctcacaagctagttgggaagacaccttatgaagctgcagctgttgttttagaagactatggactcccttactctacagaagagttcctctcgatgattactccgatgttcagtgagcagtggtgcaacttaaaaccacttccaggagctaatcgactgataaaacatttaaagactaacggggtgcctactgctttggcttcaaactcaccaagatgtaacatagaagccaaaattttcttccaacaagggtggaaagagtctttctctgcaattgttggtggagatgaagtagagaaggggaagccatccccgaatatatttttggaagctgcaaagagaatgaactgtgctccttcaaattgcttagtaatagaggattccttgtgttacaggtggaaaagctgcagaaatgcatgtcatagctgtaccttcaatacccaaaaagactgctgagttcagttctgctgatgaggtgatcaattccctccttgatgtgaggcctgaaaagtgggggttgccaccatttaatgattggattgaaggtaccttaccaatagaaccatggtttattggtgggcctgtgatcaaaggatttggccgtggttctaaagtactaggaataccaacagcaaatttacccgcggagaatttttccgacgtagtgtcagaacatacatcaggggtatactttggctgggcaggactttcaacgcgtggtatatataagatggttatgagcattggctggaacccatatttcgacaataccgagaagacagtagaaccttggctgcttcataatttcggcgaggacttctatggcgaggaggtgcgccttgccatcgttggctacataagacctgaggccaactttccttcgctcgagagcttgatagagagaattcacgaggatggaagagtagcagagaaggcactagacctgccaatgtatgccaagtacaaagactcgccttatctgagaaacccttcgaagcacgggagtagtactaccggtgggacccagtctgagatggattccaagtgacaacccccctacagggccactagataatatgttacttattttctctatggtaaatgcgtcggtgttgatgcagaaacaattggactctctgtgagctaactcgcttcttaattttcggaagtagatagtattcctcgaagtggtgtttttactttgtaatatagaaaaaaataaagtggggttgttgaaacttgagagtcaaattccgagacgttatgcacgttttgatttctgaattaatcgattggtatcacttgtactgtttttatacgatgatgcttgaaccattcatttgtcattttaatttgatatacttgaagtcaacaatatgctt

SEQ ID NO: 200902 - DNA, 1832 bp, Zea Mays
cggctgccccctcacctcgcgtgctcgattcccatctcccccctccctgcgcacagccgcacaccagtaccaccaacaccattcaacagacgccgccgccgccgccgccgcccctcatccctgtcccgtcccgtcccgcgcgcggccgccgcatccgtccgggcctcctcgtctccccagccccgctgccgccgggttcatcagcagaagctgcttgctccgccgccgccgccctcttcctcctctactggttgtgtctcccaaatatcttgcctttttgttgcattggactcttctgtggttagaatggcagcacccaagcccatttctcgtcttatttctcacgtcattcttgatttggatggcaccctcttaaacacagattctgttgtaagtaaggtagtaaaaccatttattctaaagaatggaaaaacgtgggatagcaagaaagctcacaagctagttgggaagacaccttatgaagctgcagctgttgttttagaagactatggactcccttactctacagaagagttcctctcgatgattactccgatgttcagtgagcagtggtgcaacttaaaaccacttccaggagctaatcgactgataaaacatttaaagactaacggggtgcctactgctttggcttcaaactcaccaagatgtaacatagaagccaaaattttcttccaacaagggtggaaagagtctttctctgcaattgttggtggagatgaagtagagaaggggaagccatccccgaatatatttttggaagctgcaaagagaatgaactgtgctccttcaaattgcttagtaatagaggattccttgtgttacaggtggaaaagctgcagaaatgcatgtcatagctgtaccttcaatacccaaaaagactgctgagttcagttctgctgatgaggtgatcaattccctccttgatgtgaggcctgaaaagtgggggttgccaccatttaatgattggattgaaggtaccttaccaatagaaccatggtttattggtgggcctgtgatcaaaggatttggccgtggttctaaagtactaggaataccaacagcaaatttacccgcggagaatttttccgacgtagtgtcagaacatacatcaggggtatactttggctgggcaggactttcaacgcgtggtatatataagatggttatgagcattggctggaacccatatttcgacaataccgagaagacagtagaaccttggctgcttcataatttcggcgaggacttctatggcgaggaggtgcgccttgccatcgttggctacataagacctgaggccaactttccttcgctcgagagcttgatagagagaattcacgaggatggaagagtagcagagaaggcactagacctgccaatgtatgccaagtacaaagactcgccttatctgagaaacccttcgaagcacgggagtagtactaccggtgggacccagtctgagatggattccaagtgacaacccccctacagggccactagataatatgttacttattttctctatggtaaatgcgtcggtgttgatgcagaaacaattggactctctgtgagctaactcgcttcttaattttcggaagtagatagtattcctcgaagtggtgtttttactttgtaatatagaaaaaaataaagtggggttgttgaaacttgagagtcaaattccgagacgttatgcacgttttgatttctgaattaatcgattggtatcacttgtactgtttttatacgatgatgcttgaaccattcatttgtcattttaatttgatatacttgaagtcaacaatatgctt

SEQ ID NO: 200903 - DNA, 1774 bp, Zea Mays
gtttcgatcgaacacatccatcacacgctcctcgtgggcagcacgcgtcaggcatccagccgagattcttcgtctgtccttcctccatcctcctccacggacaaccgcggcggcaatgtgaatctcccgaacaacgcacgccacgaggagaaaataaaaacacaaaaggaaaggaaacgcgaggctaagcggaaaaaaataagcgcgattccggcagaggagtagacggttccagcaaatttggtccaacaattctttgtttggccgcttgggctccggtctctcgattcttcgtagcttggtgggagggcgccggatccagcggccatcatggttgtcgacacggtcagcgcgagcacctccataatagccccccacctgttcgaccacaggtccaggggcgccggcgcttcccaccaccacctccgccggacgttccatgtcgtcgcctgccgacccctgcccaccgccttcgccggccgccgcctcgtggcccgggtcaccaggcagccgtcgtcgcgcctcgccgattggccggtcagggcgctggctatgggggtcacgaaggaggtcagggccagccctcgcagggagtaccgggggatccccggggatggtggagacatgggggacgttggggtcaccagccccacgccgtcatggcctccgcggaacagggcagatgaccccaagctgcataacccgctgctccgcctcgagcgcatgggctgcgggtggctcggcgtcatcttcgagtgggagggggtcatcgttgaggatgatgccgaattggaaaggcaggcgtggttgaccctggcacaggaggagggcaagtcgccgcctcccgcttttctgttgcggagagtcgaagggatgaagaacgagcaggcgatttctgaggttctctgctggtctcgggatccctccgagcttaggagattggccctgaggaaggacgagatccacagcagccttcgaggtggctcctaccaccagatgaggaacggttccagggagttcatgagcacgctcgccaattacaagatccctatcgctgtggtgaccacacgcccacggaaggttattgaggaagccattgaagctgtaggcgtgcgcagcttcttcgatgcggttgtgacagcagaagacgtgtaccggggcaagcctgacccagaaatgttcctgtacgctgctcagcttctcagtttcatcccggagaggtgcatcgtgtttgggaactccaattcggcggtggaagctgcgcatgacgcacgtatgaagtgtgtcgcggtcgcaagcaagcacaagatctacgagcttagcgctgcagaccttgtggtgaagcaactagacgagctatccgtcgttgacttgaagaaccttgctgatattgagtccccggagtttggcatggaacctgaaccagagatggaggaggaggaagtgcccccaccatcgacgtctgtgggtatagatgatctattctggtaagagaccaaattgtacatttgattgattcctctccagaacacagatgtattgttgtcaactgtcatagtgatcagaaagaagggcttatcatccttctgtaatcagtagaatgtgatatgtaaaaaatgttgtctagagctcacacactgtatatacatactcagaaagaaagctgggaactgaatatatgaatcagaacatttgaatctgcagttcctgaaacaatgtaacaccacaaggtttctgtcgccgaatcaaaacgacaatatatataataaaatta

SEQ ID NO: 200904 - DNA, 1399 bp, Zea Mays
cgcggggacggaagccaggccaaactagagaagcgccaagttgccagccaaacgaacaaagctaaaacagggcgggggcgtcccttcgtggggacagccctcgtggtcgatccgcccgtgggatctcgcgcacgccaggattggagagctgcggcctccctccgccccaaccagccatgggttcccgcgttgattgcggcgcttagacgcggaggaggagagagacacggggagggggggaggccgaggcctaggaggcgtagcgctgtgcagggcgcgagcgcgttcgttcggcatggaacagaacgccggctcgttcctcgccgtgcgtcgcctctccggtggcgccatccaccaccatcgtcaccactcttccccggctgaggtcgtgggcgtgtccactgcgtggctcggtaaggggctttcatgcgtctgcgcgcagaggagggagagcgacgtgcgcctgtccttcgatttgagtcccattcaggaagagtgcttgaataggttgcagaaccggatagaggtgcagtatgatggttcaaatctggagcatcagaaagcactggaagccctttggcgttcttcttttcctggaactgaacttctagggttagtatcagaccagtggaaggagatgggatggcaagggaaagatccatctacagatttcaggggcggtggttttatatctttggagaatttactgtatttctctaggaactatccaaaatccttccaggagctccttcgtaagcagaatggtgatagagcattgtgggaatatccctttgctgtagctggtgtaaatattacattcatgctgattcagatgcttgaccttcaagcagctaagccaacgtcgttggttggagcggttttcctaaatctactcttagaaaatgatcgagcgttcgacattctttactgcataaccttcaaactgatggatcagaaatggcttgaaatgcacgccagttacatggatttcaatacggttattaaatcaacacggcgccagctcgagagggagctgttgctagaagatatccagagaatcgaggacatgccatcgtacaggtttctcgcctgctagcaattgaacctcctggtcgtaccgaacattgccacaagatagtgcagctccatacactcgaagaagaagctgagaggttggaaccacgtacaccgagcgaagggtgaatctaggttcatggactgtggatgtgttgttgctttgaattgcgctgtcgtgtttacctactccgagtccgacaacagcctcgacgccgagtgccttttcgtttcaacgatgtgctatatcttggggccacggaacggcagatcctagctttctttgtaaacaagaggatgtggaaagttggctgcgaaaaaaagg

SEQ ID NO: 200905 - DNA, 1398 bp, Zea Mays
cgcggggacggaagccaggccaaactagagaagcgccaagttgccagccaaacgaacaaagctaaaacagggcgggggcgtcccttcgtggggacagccctcgtggtcgatccgcccgtgggatctcgcgcacgccaggattggagagctgcggcctccctccgccccaaccagccatgggttcccgcgttgattgcggcgcttagacgcggaggaggagagagacacggggagggggggaggccgaggcctaggaggcgtagcgctgtgcagggcgcgagcgcgttcgttcggcatggaacagaacgccggctcgttcctcgccgtgcgtcgcctctccggtggcgccatccaccaccatcgtcaccactcttccccggctgaggtcgtgggcgtgtccactgcgtggctcggtaaggggctttcatgcgtctgcgcgcagaggagggagagcgacgtgcgcctgtccttcgatttgagtcccattcaggaagagtgcttgaataggttgcagaaccggatagaggtgcagtatgatggttcaaatctggagcatcagaccagtggaaggagatgggatggcaagggaaagatccatctacagatttcaggggcggtggttttatatctttggagaatttactgtatttctctaggaactatccaaaatccttccaggagctccttcgtaagcagaatggtgatagagcattgtgggaatatccctttgctgtagctggtgtaaatattacattcatgctgattcagatgcttgaccttcaagcagctaagccaacgtcgttggttggagcggttttcctaaatctactcttagaaaatgatcgagcgttcgacattctttactgcataaccttcaaactgatggatcagaaatggcttgaaatgcacgccagttacatggatttcaatacggttattaaatcaacacggcgccagctcgagagggagctgttgctagaagatatccagagaatcgaggacatgccatcgtacaggtttctcgcctgctagcaattgaacctcctggtcgtaccgaacattgccacaagatagtgcagctccatacactcgaagaagaagctgagaggttggaaccacgtacaccgagcgaagggtgaatctaggttcatggactgtggatgtgttgttgctttgaattgcgctgtcgtgtttacctactccgagtccgacaacagcctcgacgccgagtgccttttcgtttcaacgatgtgctatatcttggggccacggaacggcagatcctagctttctttgtaaacaagaggatgtggaaagttggctgcgtatgctttgtggccatgtgcatggataatcttgctgctcgcctgaaagaaaaaaaggccgatcttaagactg

SEQ ID NO: 200906 - DNA, 1381 bp, Zea Mays
caggagaaccctgcacgcagagcaagattgaaggggggatgagaaggtggacatcgttgctctagtgatttgatcaccagagatggtgttggtggtgaagcagcatcgctgcacgcactctgtgagctgtgtttgcatcaagggccatctcagtgaggatgctctgttcctcgtcttccgccacatgaactggaacccaaggctgattgctatcctgtcatgtgtgtgcaagtggtttgacgaggttgccaagcaggtgctgtggaaggagttctgtcatgcaagggcttcaaagatgatgctggatttgcattcaggtggtagccacattgttgatgggaactggaaagcgctggggaagctgctcatctattgcaatggctgcacaaaaggggggctcttcaataacatccatgttccaggccattttgtgttcaggacacgcttttctaggactgcgggcaggagtttcctgcctctgccatgcaagtcagacgtgttgtatgtgtcagatccatgtgagcatcttgatcaaggggaagaaggcgacttaggtttctttcgaggcatctttaagtcattcgccacttcaagagtgaagaagatgttgattgagaagcgggctaggtttcatccaagggagttgtgctcttattgtaagtcgaagctatggaacatgttccaggaaaatatgattccaaggagtgcttctgctagactgggtgcctatgatgattccgtcgagtattttgtatgcttgaatgggcatgttattggacttggtaccctgctaccactctcagactcggaggaggcagcagatgagtaatcatcaagaatgagtcaggttggtctatctctattccatggcaaatttcttcttgaaacttttcagtaaacatcaagtttcatgcgcagacatgtctggatgtacaacatagactggttcctcttcaatattagtttgtgtttgcatacacttaatgcttaatcctatttatttaatgcatagcttgatcagcatttcatattgtataccaacattttctccttggaacagcgaaggaactttgcataagcttgttgggatatcatatcacataatgcttatttgagattttttaggaatttttgacatttaaaaaggaaacattagtagcaaaactattctcaagggtttgtatgcttattttgtgatggcatcagagttagtgaatcgattcttagaatcccaaatgtttaacgtggtctctgtctatttctcacacccttatgtttgcctctacttttgaagttatatatactagtagatatttgtatggtacagcaagtcacaattggtgatcattatcttcattttagaagtggcagtacacaagtt

SEQ ID NO: 200907 - DNA, 2414 bp, Zea Mays
cttctctccttgcatttgcatacacggtcggtgcatgcgccaccttttatttagcaatccttcccccctctcgctccgcgcgcacgctgtcgtccgggggcggaatccgtccctcgtgtaataagagggcagtcgtcgtcgtcgtcgtcttctgccccggccatggccgatgcaatgcacgcatgcaacctcgtcgatcggccgtgagcccgtgagccgttgctgtctgcatctcacctggtgttgttcagggcatgtgggacgagatcggggaagcggaggaggaccggcgggggatgctgcaggcgctggaggaggagtgcctcaacgtgtaccgcgccaagctggagaaggtccgccagcaccgggcgcagctcaagcgggagatcgccgactccgtcgccgaggtcgccgccatctgcgccaccatcggcgagccgccctccaccgtgcacacggcctgctcctcgctccagggcacagggagcctgaaggaggagctgggcctgatcgcgccggagctggcggagatgaggcggcggagggacgagaggcggcgccagttcgcggacgtcgcccagcgggtcaacaagatccagcaggagatggacctgcagctaggcggcggcggaggccagggccagcctcatgctcatgtcgccgtcgacggctccgacctgacgacgaccaagctcgacgagctcagagcctatctgcggcgcctgcagcaggaaaaggaaagtcgcaccaagaaggtggcggagctcatggctacgctgcactcgtcgtccttggttctcggcatggatcccagagagacgaacagcgtcgtccatggcggcgtgcagacgcaggccagcggtatcagcgacagcgccatctcggggctggctgggggcatcgagaggctgagagagatcaaacggagtcgaatggagaagctgcaagacctgctgggcagcatgctggagctgtggaacctgatggacacgccggcggaggagcagcggcggttccagggagtggcctgcaacatcgccgcgtccgaggacgagatcacggagcccggcgcgctgtccatggccttcatacgcaacgtggaggcggaggtgatgaggctggagaacctcaaggagtgccggatgagagaactcgtcgtgaagaagcacgaggagctcaaggagatccgccgccgcgcgcgtctgcccgaggacgacactaccgtcatggtgttcgacgccatggacagcgatgctgagcgtgctatgatcctggagcggctggaattgcagatctccaaggccaaggacctggagttcagccggaaggacgtgctggagaagatggacaggtggcaggcggcgctggaggaggagtcctggctcgaggagtacagcagaaacgagaacagatacaacaccggcaaagggacgcacctcgtgctcaagcgcgcggagaaagcccgctcccttgtctgcaaaatgccggcaatggcggaagctctggtggcgaaggttgttgcttgggagaaggagagaggcgccaggttcgagtacgacggtgaggtgctgctggacctgctggaggactacggcaacgcgaggaaggagaaggagcaggaacggaagcggcagcgggaccagcggcggctggtgcagggcgcggcggcggcggaccgggacgtgtcgtcgccggtggcccgcccgccgcccaaggccatcaagaacgtcacgaggtctctgtccatagggcgcaacgccgccgccgccgccgccgccggtggcggtggcagccccaggaaggcggcgccggcgtcgtccaggcccggcacgcccagcttcctcaagtcgcccttgtcggcgcgccggggcgggggcgacgagggggcgcagatgctgtcgccggactccttcgagtgacctcttctgcttgcagttgcagtcagcattcagcacgctggaatggacagggatatcgtcgatctgcaacgcccaaattctggatggatcctccgttgaactgaaaccttttgctgtaaaaaagttctccgagggttggagtgcatgcagagcgaatgctttcgaatggcaaaaaaattggaaatcgtacggatttcatttttaaaatgaacagaaccaagtttgaaacacaagttcggtccgaataaaaactaaacaaaaatcaaacagacaccaaaagacaaccagctgtaaactccaattttataaggaaggaagcacgggcgtagtccaggccgaaaaactgttaagcccaagcacagaatattgggccaggcccacgtatagtccaggagaccaggaatcaccagtcatcagtctccactctccagtacgagagccacgcacactcccactacatttgggttatgcataacaggttggcccaaagcccac

SEQ ID NO: 200908 - DNA, 2221 bp, Zea Mays
caggagcagccgccagccagctagcagcgtccctgctgctccgcgccacacctctccgcttcattcctatccgtctcccctgctctatcgtcgtcctcctccgtcgggccggaggagcgtctctttgtcggcgcagcgtgcagagcaccgcagattcagagacacgatgatgtcgcgacagtgtgcaaaccgcatctttcttaccggaggttccagcttcctccatggcctcaaatctagagttgcatccagtaggagtcacggcaccgtcagactcaactggcgctgcgtgagaactaatctctggagggccgagcgccttggtgtcaaggctactccgtctgagcatatcattgcagtactgcaagcgtcagatattttcagtggcatcaggaaatggagcaagttgcaattggtcgccatgacaggggtgatggcatgtgtagttctggtagtcccttcttctgatgcagtcgatgctctcaagacatgcacttgcctgctaaaggaatgcaggtgactcttcatcatactgtcaacatagttttgacaccatataggggctgcttggttcggaaatagtctcgcctggccaagcaagccttgccttgccaccgtagccgagtgtaattctctcgtagaaactagccaaaatcatgcctacagaccacaaaggtttgtgtgaatttatattcagtatgtagccaatataggtcaagaagaagttagttactacttgaaactaagagctccccgatgacaagtttgtcatcttttggatgagagtaaccttagatcattttatacatttcttactcaattagtttctctctctctctttcagaatagagctggctaaatgcatagcgaacccatcctgtgcagcaaacgtagcatgcttgaacacgtgcaacaatcgacctgatgaaactgaatgtcagataaaatgcggagacctgtttgagaacagtgtagtcgatgaattcaatgattgtgctgtttcacgcaagaaatgtgttccaaaaaaatccgacgtcggcgagttccccgtccccgatccatcttcgctggttaagagcttcaacatggcagattttaatggcaaatggtacatttcaagtggcttaaacccgacgtttgacacattcgattgtcagcttcacgagtttcatgtcgagggagacaaattgatcgcgaacatcacatggagagtccgcaccccagactctggcttctttaccaggtcaaccgtgcagcgttttgtgcaggacccatcgcagcccggcatactctacaaccatgacaatgagttcctgcactatcaagatgactggtacattatctcatccaaggttgagaacaaggatgacgactacatatttgtgtactatcgtgggcgaaatgacgcatgggatggttatggtggttctgtattgtacacaagaagtaaaactgtacctgaaacaataataccggagctggaaagagctgcaaagagcgtaggtcgggacttctcgacgttcatcatgaccgacaacacctgtggtcctgagcctcctcttgtggagagaatcgagaaaactgtggtggaaggagagaagaccatcgtcagggaggtgaaggagatcgaggaggaggttgaggagctggagaaggaggaggcgtcactgtttcagaagctggcagaaggtctcatggaggtgaaacaggatttcatgaacttcttgcaggggctgagcaaggaggagatggagctgttggatcagctcaacatggaagcgactgaagttgagcaagtcttcagccgtgcactaccgttgaggaagctaaggtagctgcagagcaaaggacttggagaaaacaagccatcaagtactggccgaaacggattctatttgccacagcagtacccacagtagagattgttgaacagatacaacaaacatttttaattttcttttctttttcttttcttttcttttcttttctttgtttacccttttctgtggtcaaaacacatgcctacgttagccctatttgtaaagcatcaagagacaacgtaactttttcttgccaaacagagaaaaaaaacaagtgtacttaagactacgctgaccatctcttgcatgacaattgtttgttgttatagtttcctttgccattccatctaaatttaagtcatttccctatgtaaaatgcaaaatcaaaaggaactcttata

SEQ ID NO: 200909 - DNA, 1810 bp, Zea Mays
agctagcagcgtccctgctgctccgcgccacacctctccgcttcattcctatccgtctcccctgctctatcgtcgtcctcctccgtcgggccggaggagcgtctctttgtcggcgcagcgtgcagagcaccgcagattcagagacacgatgatgtcgcgacagtgtgcaaaccgcatctttcttaccggaggttccagcttcctccatggcctcaaatctagagttgcatccagtaggagtcacggcaccgtcagactcaactggcgctgcgtgagaactaatctctggagggccgagcgccttggtgtcaaggctactccgtctgagcatatcattgcagtactgcaagcgtcagatattttcagtggcatcaggaaatggagcaagttgcaattggtcgccatgacaggggtgatggcatgtgtagttctgaatagagctggctaaatgcatagcgaacccatcctgtgcagcaaacgtagcatgcttgaacacgtgcaacaatcgacctgatgaaactgaatgtcagataaaatgcggagacctgtttgagaacagtgtagtcgatgaattcaatgattgtgctgtttcacgcaagaaatgtgttccaaaaaaatccgacgtcggcgagttccccgtccccgatccatcttcgctggttaagagcttcaacatggcagattttaatggcaaatggtacatttcaagtggcttaaacccgacgtttgacacattcgattgtcagcttcacgagtttcatgtcgagggagacaaattgatcgcgaacatcacatggagagtccgcaccccagactctggcttctttaccaggtcaaccgtgcagcgttttgtgcaggacccatcgcagcccggcatactctacaaccatgacaatgagttcctgcactatcaagatgactggtacattatctcatccaaggttgagaacaaggatgacgactacatatttgtgtactatcgtgggcgaaatgacgcatgggatggttatggtggttctgtattgtacacaagaagtaaaactgtacctgaaacaataataccggagctggaaagagctgcaaagagcgtaggtcgggacttctcgacgttcatcatgaccgacaacacctgtggtcctgagcctcctcttgtggagagaatcgagaaaactgtggtggaaggagagaagaccatcgtcagggaggtgaaggagatcgaggaggaggttgaggagctggagaaggaggaggcgtcactgtttcagaagctggcagaaggtctcatggaggtgaaacaggatttcatgaacttcttgcaggggctgagcaaggaggagatggagctgttggatcagctcaacatggaagcgactgaagttgagcaagtcttcagccgtgcactaccgttgaggaagctaaggtagctgcagagcaaaggacttggagaaaacaagccatcaagtactggccgaaacggattctatttgccacagcagtacccacagtagagattgttgaacagatacaacaaacatttttaattttcttttctttttcttttcttttcttttcttttctttgtttacccttttctgtggtcaaaacacatgcctacgttagccctatttgtaaagcatcaagagacaacgtaactttttcttgccaaacagagaaaaaaaacaagtgtacttaagactacgctgaccatctcttgcatgacaattgtttgttgttatagtttcctttgccattccatctaaatttaagtcatttccctatgtaaaatgcaaaatcaaaaggaactcttata

SEQ ID NO: 200910 - DNA, 1334 bp, Zea Mays
cttcttatcccttgtatttggtgactggattttggaaatgaaccctgaggatgaggctgaagaagatggtgctaacatcgatctggactcacaaaggaaaggaaaatgtgttgttctgaagacatccaccagacaaaccatattccttcctgtaattgggttagttgaccccgataagctaaagcctggcgatttagttggagttaacaaagacagctacttgatactagatacattgccttcagagtatgactcacgggttaaggcaatggaagtagatgagaaacctactgaggattacaatgacattggcggacttgagaaacagattcaagagcttgtggaagcaatagtgttaccaatgacacacaaggaccgatttcaaaaattgggcattcgtccccccaaaggggttcttttgtatggaccccctgggactgggaaaacgctcatggctcgtgcatgcgctgcacagacaaatgcaacatttctgaaattggctggtccacaacttgtccagatgttcattggtgatggagctaagcttgttagagatgcttttcagcttgctaaggagaaagccccgtgcatcatctttattgatgaaattgatgccattggaacaaagcgttttgacagtgaagttagtggtgatagagaagtgcaaaggacaatgttggaattgctgaaccagcttgatggatttagcagcgatgagaggataaaggtgatagctgcaacaaatcgtgctgatattcttgatcctgctctgatgagatctggtcgtctggaccggaagattgagttccctcatccatcagaggaagcaagagctagaatcctgcagatccactcgaggaaaatgaatgtgaatccagatgtcaactttgaagagttggcgcgttcaaccgatgatttcaatggcgctcagctaaaggctgtttgcgtagaggctggcatgctcgctctacgccgagatgctacagaggttacccacgaggatttcaacgaggggatcatccaagtgcaggcaaagaagaagtccagcttgaattactacgcgggggaacgccccgtacttggtgatcattcagttgtttgtgacactgccattgtctgggcaggctaacttactatttgtactataagcaagctgttgcttttgagtcttactccgtatgagagtatcatttatgaaatattaaccaagtctgcctgccgtattggtttctttctcctcacggagaggagctcggccttccacgactgcacatttgctctgttttcagaagttcgtgtgtttaatgataaaaaatcaggtgggaaagctttcc

SEQ ID NO: 200911 - DNA, 1233 bp, Zea Mays
cagcagtgctgttctgtattcccaaattgccaccctgttctgcgtactcgtcgaaacgacgataaccacacgtctcgaaaccctaaggctgccccaaattgttatcccaaaccctagacctaaacggctccatgctgtgagaccaccaacagtgtccatggctctggacgccccggtggagcgacgggacgaggtacagatcgcgatggggaacggaaacggcgtggcgccgtctcaaccgtcgcggccagccggtcggccaacggctgctgcggcggcagcgccatacgcggacaggcggctgcggctgaacccaaatgcggatcacaagccggaagactacagcgacgtgcgcggcgagtacgcgccggccgtgtacagcgcactcgagcggcatctcccacccagcctcatcgatgccgaccgcgatgtcaagctacacttcatgcgggacattctcgcgcgctactggccgcagggcgagcgtaacaaggtgcaaaggcacagagaatataggcagaggatactccacctttacaagcctcttcatgaagaattatacaatatgcatccttcagtgttcttcttaccaacattccttgaagcagttaggagcaatacagaagaatgctttagaagtattatgactgagccaattcctggtgtttattcgtttgctatgttgcagcctactttctgtgagatgttattggaggaggtagagaactttgaaaaatgggtccatgctatgaaatttaagataatgaggcctaatacaatgaacaagtatggtgctgtccttgatgattttggcctggaagctatgctgaaccagttcatggaacagttcatagctccaatttctaaagttctttatcctgaggttggtggaggaacattggactcccatcacgcttttattgttgaatatgggaaagacagggatgttgaactaggttttcatgttgatgattcagaagttacattaaatgtttgccttggaaaacaattctttggtggtgaattatactttcgaggtattcggtgtgagaatcatgtgaattcagagacacaacatgaggaaatgtatgactacacacatattcctggttgggctgtactccaccatggtcgacacaggcatggtgctcgagctacttcatctggtctcagaataaatctgcttttgtggtgccggagtgggaacatgctgacacttatgcaggcatccaa

SEQ ID NO: 200912 - DNA, 2629 bp, Zea Mays
gtgacactggccttcttaccctttgcttctcttctctgccgctagggaggcgctgacactgttcctcttccctcctcctgctctctccccatgtcctcctcctccggtcctcggcggccatgactgctgcggcctctttcgtccgtgcctgcgcgctgcatggctgctgccagctctagatacacactcctagctaggcagctgttgccttcacctgctgccgcgcgctgctcgatcgactgcacgtcttcacagttcacaccacagagtagagtggagagagaaagccaagaagccggcaggggagagtagggagagagagagggggaggagtcgtatgatagaaagaatctggaattgctttccctctcgttttgtcccccctgcgcctccttgattattgtgttgcttgctgttcctccctgcctgcttgctccctgcttcggcttggaggccttctcatgcatcaacctccttagcatctctctccccctctcccatacatacccccttgtctgatgcctgcttctgcttgccccatcctccttcatccttcacgagttcgtctctcgatttattgtctgccacacctcccttcagctagctatcttcccctagctagctaggtaccagtagtgtgtgtatatatagatagatttatagatatagacacacacaacaagtgcaagatcaggcgaaagctactagccgcccttgcagtcttggactccattcgtcgtcgtccttgggttctcctcctcacctagctactatgttccaccatcagcaggagctcttgcaggcagaagctgcagcggcagatcgggagagcagcatgtccaacctcacctcctccacgtccggcggccccaacgcggcgcctgctgctgctgctgctgccccgccggcgcccgcggcctccggcaacaacaagcggaaacggagcctcccaggcaaccccgaccccgaggcggaggtcgtggctctctccccggcgacgctgatggcgacgaaccgtttcgtgtgcgagatctgcgggaaggggttccagcgggaccagaacctgcagctgcaccggcgcggccacaacctgccgtggaagctgaagcagcgcggcacgggcaaggaggcgcagcggaggaaggtgtacgtgtgccccgaggcgtcgtgcgtgcaccacgaccccgcccgcgcgctgggcgacctcaccggcatcaagaagcacttcttccgcaagcacggcgagaagaagtggaagtgcgacaagtgctccaagaagtacgccgtccactccgactggaaggcgcactccaagatctgcggcaccagggagtacaagtgcgactgcggcaccatcttctccaggcgggacagcttcatcacgcaccgcgccttctgcgacgcgctcaccgaggagagcgccaaggccatcggcctcaacgccatggcggccgtgccggcgcagcaccaccaccacccgatgctcttctcgccgccgcccacgcacgtcatgcagcaggacgtcgccctcctccaggagcaccaccaccaggaggtcatgcagcaggagcactgcaactacgccatgaagacggagatgccgccgtggccggggatgacctacgaccacccgctgctgcagccgctctgcaacgccgccgcaccgcagagctcggccacgtccacgccgccgccgccgacgacgatgcagcttcccgctgcctacgcgcacctatcggccacggcgctgttgcagaaggcggcgcagatgggcgccaccgtcgccggcgcgggctacacccagatggcgggggccgcgacaagcgccaccttcggcctcggcctcccggacctgcagaatacccagcagcagcagcatcaggacggcgagatcatggccgggctcgcgaggacagcctcccacggccgcggcggcgaggaaggcggcggcggcggaggcgacggcatgaccagggatttcctaggcctgcgcgccttctcccaccgcgacatcctcggcctcgccggcttggactcctcgtgcatgggcgccatcatcagtgccagcgccagcatgaactgctacgacgagccacagcagcgtgcacaggctcaggcagagcagcagcagcaaagcagcaacgagcaatggcacagcatgggcagccatcaaagctaggtcgataaaagctactttcttcttcctctcgccagccgtcatcggatatcatctcatgcatgtggtaaccacgcaagcgatcaaaccgttccgatcaaactctagcccggtccaaggatggtgatgacagattggtgatacagaggtacgcagggagttgtataattttttttttttgggttggcgaagagatcggccaacatgtaagctaagctccaatcaagggaagaaaaccatagctatatgtgacagtaataatacatgcatgcattcatcatcttttaaggttggacattgcatccattaattgtagtaataatagatcatatgatccaaatgattcttcgcaattagttcaaaagtaaatataaatatatcctgattctaatctaattcgattgttagattccgttaccatccataatctcatgtgtgcaattttggtggtaa

SEQ ID NO: 200913 - DNA, 1363 bp, Zea Mays
caagaatcaaacgggatgtatggagcttttgctttcagctttctcttttcctttttgtttctgagcgacctctgatcacgggcgggccgcgggctacaggcgggacagcttcatcacgcaccgcgccttctgcgacgcgctcaccgaggagagcgccaaggccatcggcctcaacgccatggcggccgtgccggcgcagcaccaccaccacccgatgctcttctcgccgccgcccacgcacgtcatgcagcaggacgtcgccctcctccaggagcaccaccaccaggaggtcatgcagcaggagcactgcaactacgccatgaagacggagatgccgccgtggccggggatgacctacgaccacccgctgctgcagccgctctgcaacgccgccgcaccgcagagctcggccacgtccacgccgccgccgccgacgacgatgcagcttcccgctgcctacgcgcacctatcggccacggcgctgttgcagaaggcggcgcagatgggcgccaccgtcgccggcgcgggctacacccagatggcgggggccgcgacaagcgccaccttcggcctcggcctcccggacctgcagaatacccagcagcagcagcatcaggacggcgagatcatggccgggctcgcgaggacagcctcccacggccgcggcggcgaggaaggcggcggcggcggaggcgacggcatgaccagggatttcctaggcctgcgcgccttctcccaccgcgacatcctcggcctcgccggcttggactcctcgtgcatgggcgccatcatcagtgccagcgccagcatgaactgctacgacgagccacagcagcgtgcacaggctcaggcagagcagcagcagcaaagcagcaacgagcaatggcacagcatgggcagccatcaaagctaggtcgataaaagctactttcttcttcctctcgccagccgtcatcggatatcatctcatgcatgtggtaaccacgcaagcgatcaaaccgttccgatcaaactctagcccggtccaaggatggtgatgacagattggtgatacagaggtacgcagggagttgtataattttttttttttgggttggcgaagagatcggccaacatgtaagctaagctccaatcaagggaagaaaaccatagctatatgtgacagtaataatacatgcatgcattcatcatcttttaaggttggacattgcatccattaattgtagtaataatagatcatatgatccaaatgattcttcgcaattagttcaaaagtaaatataaatatatcctgattctaatctaattcgattgttagattccgttaccatccataatctcatgtgtgcaattttggtggtaa

SEQ ID NO: 200914 - DNA, 1790 bp, Zea Mays
cacaactatagcatctatccgtaccttttccgcgcgcgcgcatcgcgattcgcgagtcgagccgagccgagccgctggcttccttctcccgactccactcccacggcggccggtctaggtagccgcgcctgcctacggccacgcccagctcgagaaaggcgtgcgcatgccgtctatggcgcctccgctataaggaggagaagcaagcgcaaggccagcaaaaagcgtcgcggggccacgatcacgaccctattttggcccgcccgcctccgcttatacgccgcgccggggaggccgctactccggctcaccttcggaccttcccctctctctctgtctctctccagcccgttccgccgcttctaccaccttcctcgcagccaaggccctctgcacggcgcctgtggtgcatgggcggcggccgcgccgtgacgacgacgacgaccgcgccgccatgaccaccaccaccacggcggcggcggcggccgtgaacgtggccgcggtcgcgcagctctgcgccgggccacggcggcgcaagccggcggcaggggctcgggtcgacctgcgctgggcgcgcctgctccgcctcgccgtcgtcaccagggtgctcggcgtcgtgcgcgaccagctgctcgcctgctcctcctgcggcggcgggggcggtggcgccgcccgccgccggtacctccgccttggcccgcccgccggagccaacgccggtcccgtgctgtcaccggtcgacagggacgacgactgcgccgccgacgccgaagccgcggcccctcgcgacgcggccgacgacgttgacaacgtcgtcagcctcaaggtcagcctgctcggcgactgccagattggcaagaccagcttcatggttaagtatgtgggagatgacggggaggaccagaacggcttgcagatgacgggcctgaatctcatggacaagatgatggccgtcaggggagctaagattgcctacagcatctgggatgtggcaggagaccaccagtccgtcgaccacatcccaatcgcgtgcaaggacgccgtggcgatcctgtacatgttcgatctcacgagccgctgcacgcttaataacatcgtagattggtacgagagggcgaggaaatggaataagacggctattccaatcctaatcgggacaaagttcgatgactttgcccagcttcctcttgaaatgcaatggaccattgttaaccagagcatacgcaagagcgatgaaggcgaccctcttcttctcgagcgcgacgcacaacatcaacgtgaacaagatcttcaagttcatcacggccaagctcttcgacctgccgtggacggtggagcgcaacctcaccatcggcgagcccatcatagacttctgacgacctcctccgctagctaagtaattagacagcacacacgacgatccttgttggtatcacgggttgacagggtcgtcgcctcctcttgccctgtgcgagtcgccggaggcatgaagttgaagtgaccgagcatgcccgtcgtcctcttcctcctgattgccgacagcagcaggcaggatgtcctctgtacataggtgacgtttccgcatgagggagcatcgtcaaaatggcaagaccgcgaggtgtgactgtagtagtgtaacacccgtctgtaacattcgccagactgtataggaatccatgttaattagagctagtttggcagccacatttttaaaagggatttccattttcctttcccttggaaaaatgtttgtcaaactaatccttaatataccctccgtttccgttgac

SEQ ID NO: 200915 - DNA, 4276 bp, Zea Mays
gtcatgggtgatggtgtcgtcgtccctgccacagtccgtcggggtcggcttgtcctcagatctcgcatgatttaggagcagcgacatcagatgttacggacgcgaggccatcaacgtcgccgccaccagcaccgatgtcggccccggcccggcggacccctccccggtggccctggctgttcttggctgatggcgatgcgggatctactggcatggagcacagacgtacagtgcaggcatggtcgcggctgttcttagtttgtttttctaaatgagagtttcagttttaggattaaatacgaattcctatctgcaggacttaccggagatgtgctcatggagctgccatatgcgctttcatgcatggtttttatccattaaggggtaaacactaccatgagatgataaatccatttcgtgtacttacagatgtttcttatatccatgtgtttcaggtcaagaagcttatcaaggagaaaaagaatgatgctggaatttctgaatatatcgatataaataaagagcttcaagaggtgagttcatttcttattttgtcttgtaatgtgatccctcatgctcgtgtagctacatgttagatacgttagattaatgatactcacaaatggatgcttgatttctcctctcatttttggggatgcatcgattcctctcttttttgttacaaggagccatgcccagcacaaggtagcatgaaaaaggttgcttgcaacataagatttgtttgggggtgttagatttttttaacttgaaaggtaagaaggttaattatgacgatggtagggactgtccgaacaaccctattaataataatgaacaatatgtaaaaatttagtgtcttcaaagttgtcctttactgattgtttggacaagaaaacgccagtattatgctggagaattccaaactatgagctacgaaaacaaaataaaaaggtctccagttaatgttcataatttaacatttttctaatatatgaaatatgtcacataactaaatgtcatatgcagtaagttcctcctgacatcatgtattatttgagctataactactttgttcttgacgtatataaaaagagttaagttgcttgcaataaactcacaacctgtgttatttcaagttacaaaaaaaccatgttacaggtgaaacatgtatccaattcaaaagtatcataaatagcaaatccagcaaagatcctgtgtaaactggactgtccttgcaagctcttgatagccacataagtgtgaaccagataacaaactattattctacatgcagttcaataggaagcatggtcacctttcgtaaagaagtaaagactatagttcatcccggtgaggtctcagttttaggttcccttcgaagtatatcacctgctattgggttaacttagggtgcatgcagacaaccagttgcactgtgagatctaatcattcgtgtttatggtgccgattttagttcctcattgtcgcttggtttatctgggaggtttgctccctgagagaaagaacaaaaacaaaaggaacctaaaagaatttctgttattacatccaccgtatgggttgtaatatactatgtctgtttcattggttcattggtttttttaggtttatggcacgatgattcatctcagagtttctgattcttatgttttgtcacaagggcaagacgacaagtcattttgctgctaaagtgttaatatgcaaactgtgtgtttgatcaagcgagaatttttccaccgtttttgtaagtaatgacttgttgtgaaaccgacatttgggctatatgatgcggtagtttgtgttgccctacagaagcacatagttgaatgtacatggcttacctcaaaaacttgtaatttacactataatgtatagataaggcgtcttcaataaatactgaaatgatttttgtttatacgatggattatataatgtgtttcctaattcgttacactattgagagacataaggattattaaatgtactatgtaacttgaaccatctgactctataagcttcggtacattgacaaccatacaatgccaaagcactgaaatatgttgtgttctgaaatatgacatataccaatggttcacagattgcttagtttctccagagcaacgccccacagatttctctctgtgtgtgtttttttctctgcaggtgatatcatatttcacaaaaatacagattttttctgatattgggcccctaactaatacatccactttggaaaacaactctttctctcaccatgcaatttctctatcctaaaatataagatatgctgggaattccagaacaaaatatggggtaaaagaaatgacacatgcatcctccttaatcatagggagatattgtgttacctatttttggctttgtgattgggttgactggaggcattagtggcaggtgcgcatgtgattggggcctaggggcattgataggtgaggagggggagttaataaacctacaatcctttataatttgtgacaagttggaatgcttcagttatttcaggatgaaggagtaccattgaaaagggaggagtttcttgtcgtgtataaatatgttagtttgttttgtgcgcagcaaaatatgttacttttaaaaattatgcaagtttatttcgaccatggtgttgaaacatgtaattcaactaatgttgttggctgaatagtttcataagtaaagcaaaaaaaaaacaatagtcatgtactaatttcaggacaagaatgattgtaggagtaggatctaggcatatttttcgtggtttggtggtgatcatccaatgaaaaggcgatgcttgttgtgtaaggtcttctacactggttcttgctcgtggtggtcgtcgctggcgccttcctcaccttttctgtggattttttgtaggtcttaacaatcgggcgacgcctgcccatccatcctctccctagtgtagtcccaacagtaaaaggggacaacaccatcccttctgtgtatggaccgtagccccgtagcattgtatgtttgattaaaatgtagcccccaaaatagtgttacttggataaattttctagatttagtattcaaaagggtgtcgattgccaagtattcaactctattttttctgttatcaattatgttctcactgtactgtacatattcaagaagttgctggttttaataatgtaatatccagaatttagattttcaaaaaatcccatagaaatcataccagtgatatagccaaagctcatactgactgaccattctttatccgcacatgcccactctagcttgcagtgaaagagttacagaagattaattctttcaaagcaccacgggagatgcttctgtgcatcatgagctactgtcagatcataaataacttgcttctgaacattcttaatagagagatggatggaatcacatgcatataagagaaacattcttcttattcttgatttagttggtacttgtacatcaattggagatggaatccttatgcctgttgtatctgttactcatcgtcactttttttatgatgctaaccattacattgtttttttactaaatctgatggttttaggatgccacttatggactatggttttgtggtttctgtagttctatatgcatcaggtagcactagggtccagattcagaatatgagtactgatcttgcacttggttgcttccccagcgtgaagatggtcaacattagactgcaatctaaattgtttactgtgaactagaacttctgcatacacatatgtggatttgtacatgtacaaaatctgcaatgcctcagattttatgtgccctcggcaactggcggaatccaaggtggcctgatagaaaaggggcttccctcgctcatcttgtaggctacagctacaaatcagataataaaactctattagaaaatgctagatgctgaaggtagggagaaagagaatcttgaagaagaaataggtgttttgagaagtcagttattgcatatgagtatggaagtcgatgagacaagaagtcttgataaaggagatgggcccaaaaaaatttcctggtttagattaattggtgtcttagactcgaggttcgcaacccagagagcagagcaatggactgaaacaaccaattgccaaattctttgaacaagatgtgcgcacatggggaatgtgggttgagaattgagatcaccagttacttgtgcctttggggtattagatcatgaaggatcaagaggttatgctgggaaaagattgtatttgtctgt

SEQ ID NO: 200916 - DNA, 2158 bp, Zea Mays
ctcttctctcgcgctgaactcgacctggcgtccgactccctcgcggccccgtcgcagggtgtcgtcatgggtgatggtgtcgtcgtccctgccacagtccgtcggggtcggcttgtcctcagatctcgcatgatttaggagcagcgacatcagatgttacggacgcgaggccatcaacgtcgccgccaccagcaccgatgtcggccccggcccggcggacccctccccggtggccctggctgttcttggctgatggcgatgcgggatctactggcatggagcacagacgtacagtgcaggcatggtcgcggctgttcttagtttgtttttctaaatgagagtttcagttttaggattaaatacgaattcctatctgcaggacttaccggagatgtgctcatggagctgccatatgcgctttcatgcatggtttttatccattaaggggtaaacactaccatgagatgataaatccatttcgtgtacttacagatgtttcttatatccatgtgtttcaggtcaagaagcttatcaaggagaaaaagaatgatgctggaatttctgaatatatcgatataaataaagagcttcaagaggtcttaacaatcgggcgacgcctgcccatccatcctctccctagtgtagtcccaacagtaaaaggggacaacaccatcccttctgtgtatggaccgtagccccgtagcattgtatgtttgattaaaatgtagcccccaaaatagtgttacttggataaattttctagatttagtattcaaaagggtgtcgattgccaagtattcaactctattttttctgttatcaattatgttctcactgtactgtacatattcaagaagttgctggttttaataatgtaatatccagaatttagattttcaaaaaatcccatagaaatcataccagtgatatagccaaagctcatactgactgaccattctttatccgcacatgcccactctagcttgcagtgaaagagttacagaagattaattctttcaaagcaccacgggagatgcttctgtgcatcatgagctactgtcagatcataaataacttgcttctgaacattcttaatagagagatggatggaatcacatgcatataagagaaacattcttcttattcttgatttagttggtacttgtacatcaattggagatggaatccttatgcctgttgtatctgttactcatcgtcactttttttatgatgctaaccattacattgtttttttactaaatctgatggttttaggatgccacttatggactatggttttgtggtttctgtagttctatatgcatcaggtagcactagggtccagattcagaatatgagtactggtatgtattttccattttgtattttttcagtattgccactatatctgcaacctactcaatcataaatcaagatcttgcacttggttgcttccccagcgtgaagatggtcaacattagactgcaatctaaattgtttactgtgaactagaacttctgcatacacatatgtggatttgtacatgtacaaaatctgcaatgcctcagattttatgtgccctcggcaactggcggaatccaaggtggcctgatagaaaaggggcttccctcgctcatcttgtaggctacagctacaaatcagataataaaactctattagaaaatgctagatgctgaaggtagggagaaagagaatcttgaagaagaaataggtgttttgagaagtcagttattgcatatgagtatggaagtcgatgagacaagaagtcttgataaaggagatgggcccaaaaaaatttcctggtttagattaattggtgtcttagactcgaggttcgcaacccagagagcagagcaatggactgaaacaaccaattgccaaattctttgaacaaggctattgcttctcagttgtccagccaagatgagaaaaaaggctaataaacaaatagtcacagcttgaagagggcaagaagatgatacatgtttgggatggggaaaaatgtgttctgcaaactccaatttacccgacaatgaattagtgtggaataattgtgtgcgtgatgccagctgccagcctacacaacgcacacagaaggatcaagaggttatgctgggaaaagattgtatttgtctgt

SEQ ID NO: 200917 - DNA, 1013 bp, Zea Mays
tcgtcatgggtgatggtgtcgtcgtccctgccacagtccgtcggggtcggcttgtcctcagatctcgcatgatttaggagcagcgacatcagatgttacggacgcgaggccatcaacgtcgccgccaccagcaccgatgtcggccccggcccggcggacccctccccggtggccctggctgttcttggctgatggcgatgcgggatctactggcatggagcacagacgtacagtgcaggcatggtcgcggctgttcttagtttgtttttctaaatgagagtttcagttttaggattaaatacgaattcctatctgcaggacttaccggagatgtgctcatggagctgccatatgcgctttcatgcatggtttttatccattaaggggtaaacactaccatgagatgataaatccatttcgtgtacttacagatgtttcttatatccatgtgtttcaggtcaagaagcttatcaaggagaaaaagaatgatgctggaatttctgaatatatcgatataaataaagagcttcaagaggatgccacttatggactatggttttgtggtttctgtagttctatatgcatcaggtagcactagggtccagattcagaatatgagtactggctacagctacaaatcagataataaaactctattagaaaatgctagatgctgaaggtagggagaaagagaatcttgaagaagaaataggtgttttgagaagtcagttattgcatatgagtatggaagtcgatgagacaagaagtcttgataaaggagatgggcccaaaaaaatttcctggtttagattaattggtgtcttagactcgaggttcgcaacccagagagcagagcaatggactgaaacaaccaattgccaaattctttgaacaagatgtgcgcacatggggaatgtgggttgagaattgagatcaccagttacttgtgcctttggggtattagatcatgaaggatcaagaggttatgctgggaaaagattgtatttgtctgt

SEQ ID NO: 200918 - DNA, 2417 bp, Zea Mays
ttttttaatttaattttagctagatgtgagagtgggaatgggaatgggcttttgcgggaagcgggaataagaaaaacaaggggaggggaatgagaacgacacactacagaatgacagcctacccctcgtccggaccgtcttgcagtgcaacgaccatacggacccctgtggtcggacccacagcgcagaaccggcacggatcctttccccaatcccatccataatccatcggccacgagctgatgcgcaagcgccgccgacctccccacctcggcttctgtctatccctcgacaaaccgacctctcccgccgccgaccgccgtcgatctaccgatcggccggacgaaagacccacctctccccaaaataggcggctgagacatacgttcctatctccccttcgctgccggagaaaagcctcgcagcctgcccctccctcaccttcacctcgatttctctgggcctccgaaccccgccgacaggagcgttccagcatctcctatcccgtgccgcgtacgtctgcacggattagcgttccttctattggtcacataatgtcttctgaagataaagcaatggctaatcgtgtcacttcacactcgccaaaagctatggtgtcggaaccagatcccaacaggatgatgatgtttagatcaaatatggagtattcacaaacaaatggccagacaaatgctgttcttggtcctgtggctatcttttgggacattgagaactgtcctgttccatgtgatgtacggccagaagatgttgctggcaatgttaggatggctttgcgcatgcatcctgttgttaggggtgcggtgacaatgctgtctgcttatggagatttcaatgctttcccaaggagactccgggagggatgccagagaactggagtcaaacttgttgatgttcctaatggacggaaagatgctgctgataaggctatactggttgatatgttcctttttgcacttgacaatcacccaccatcatccattatgctcatatctggtgatgtggacttcgctccggcattgcatatacttggccagcgtggatacaccattgtcattgctattccgtcttcagttaccgtctcatcagctctgagcagtgctgggagtttcgtgtgggactggcctagccttgcccgtggtgaaggtgttgtgatccctaggtccttggtgcgccgtctggctgattatccatgttatgtcaacagtgggaatatgggacagttccctgataatcagaatgaagaggaggccattgtatataccggaacatcaaggaatgaatatggtggcagacctcccgtcaatcaaatgtattgttataacacttcccagacaactagagaaccaagcaaagctttgtatactgttgaagatgtgaactgtggtacatcatcaaggcctcataatttatcatgtcgtcagagtgaaagtcctgagacagaccaaggtttgacagatgagcagtcatggtgggttcgtcctggtgatcttcaaggattgaagggtcaactaatacgtctgtttgaattatctggaggatgtgtcccacttgttcgtattccctcagagtatctaaaactctttggcagacatttatatgtatcagaatatggagctgttaagcttgttcatcttttcgagaagctggccgactcttttgttgtcgttggtaagggtcataaaaagatgatctgtctctgcaattctggtgataggaacctgaagaattatccaagtacgccaatcattctgacgaagaaaaacagaggaaattctgctcttgaagaaagcacgataggagcatgtcagcaattaggcagctcatcagatgaattatcagaggatgaaccaattatcaacccagatataaatgttgcatgtgtgttcaatgagcatctagacagcttcagaagggagattcaggagctccttgtttgctactcctgccctgttccgcttggtaattttgagagtttatatgagcaacggtataagaagatcattgactatgagagcttaggagtcaccggtctggaggagctagttgagaaggtgaaagacgtggtagatttgcacgaggaccaaaccagcaaaagcaagttccttattgcaaactacacaaccggttaggctctttctgttgtcttgatgtcctagttcagctcctaaagtacttcagctcgtgtttccttaacatgtgtcacacagggtcggcatctttttttaccgtgccggtatgataagtgtgaatggcatagtaagtatttgtaatggcttccctcatgcctcagctaatctgtgcaaacagggagttgtttcttgtatgcaaaaagatgattatactaaagaacagtgaccatttatttggcaaatacatctaattccagttcaagtcaa

SEQ ID NO: 200919 - DNA, 1024 bp, Zea Mays
gcactagttttttttctcttccatgtatcattaatttgattttaaaatattcaagatatctagatttggatatctcatgtcaatcgagtttttatagacagtataatatgtgatatggttcagccatgacttcggaacttcgctcattggagggtgcaagggtttcaaagatacatgtagtactacagtgggctgttgcattggttgaagtgaagccaagcttactttcaggtgaagcggagaaattcctttttgaggacatatatcaggttggagacgtggtgcttgttgcgaatgaatctgtgatcgataatgaacataaactggttggattgcacagcttggtgggctacaatgtcgtaacttcccggcgacgcaatgttggcaaggtgcgtggtttcacatttgacatcagctcaggtgctatggagtctctcgagcttgactcttttgggctttcgattgtcccttctagcttggtaagcacgtactgtttatttgtcgaagacgtgctggatatagtctccgatacagtcgtggtgcatgaagacgccgtctcacgggttcaacggttaacacagggcattttgggcactcaaaacatccacggacctggtggtgagattgacgagtacggtagatttggggggagggggaggaggaggagagcaaatggccagggaaagtctggtggccgagaactccgcagcgaaccgaagcatccggatgatgaatgggagctgccgatggactactgacacaaactcgccatgatagcattctgtttagtgctattgtattgccagaaaagtacatgctttgtacatataacataccagaggattgcgaattcagaaaagacgaaaggccctttcagccttgtcagagtttgatcgctttggcccgggtgggttagtataaaaagcgagattgtgttgccatgcaatgaccgtaaccccctttgtcttccccgacactgattgcactacactactactactactactaatcattcaaagtgacg

SEQ ID NO: 200920 - DNA, 2238 bp, Zea Mays
ctagataaggcgagcccagcattggccagccccacctgtcattggttcaaggggaggcgggggagccacggcggcggagggaattgtttaatcccccgtcaccgtctcctatcgccatcaccccacccgtcccccttggtccaggcgcaggcgcgagcgcgacgtccggcgtccggcttcggcggcggagtggagcgatcccgatccccacaaggaattccatcgctgtcgtggcgtttggtggcgctcctcccggccggcaagcaggatcagtcgacgccctcttggcttgcctttggctgtaggaaatcgcacggaggtgaggatacacgggtgcggaacgagagctaggcgaacctgtctggtacctcgcggcggagatggacgagaaggcgacgatggagagcaagctgtcctcggcggcggccttcgtggaggggggcgtgcaggacgcctgcgacgacgcctgcagcatctgcctcgacgccttctgcgacagcaacccctccacgatgaccaagtgcaagcatgactaccatcttcagtgcattcttgaatggtgccagagaagctcccagtgccccatgtgttggcagcatatcagcatgaaagatcctatgagccaagagctactagaggctgttgaacaagagaggaacatccgagctaatccttcacgtaatactgctgttttccaccatcaaatgctgggtgattttgagatccctgtaggtgcagatgatgcagaacttgaagaacgcattattcagcacttggctgccgcagctgcagtgcgtaggtcacaccgtcatcataatagaagagatgggcaccagagcagatcagaagcaagtagccacccacagtttctggtgctctcagcagacgagcgcacaatctcaggtcaagaaggggactacgaacaagcatctgctgtagcttctggccgccctttacgtacacttgttgaacaagaacgcactcgagggttagcggatgcttccagtccatctctccgttgttctactcctgctgatagtactggtagatcaaacaataggatttctgggatcgaatctacacctgtggatcaagacggaactggaccatccgctttacaatcaatggtacagggatttcataatcaaagtgcaagtggatggagggagaggtggttttctcggagcaactctttactggatcttggttctgaggtgaggagggaggtcaacgcggggattgctgcggtgtctcgcatgatggaatggcacgatgcaagggacgggacgggagcggggccttctcctacctctgcatcaagatctggttctcagtgaaacactctgcacttgaaaggaccgatgcaaatgtaaagattaaggcaagctgctggaagcgacgtgccaagtggctgggctcttcggtcagcggtcgcgattcgcaagctgccagtagacggagaaggggctgtgataccgaaagacgaacgaactgaactggtgggctggggctgccctggagaggcagagggagccgtccacattattacttggtttctttcttttttttgtttattattgagaataatgatgaatcaggtcaggtgggtgggggatgtggctgtaaactcggtgggctgtcggtgtgtccagggggaaaaaaagagagaaaaggcagcgaaagaaattgtccatacatgaagaagcccagggtcgtcgtctgtgtataggaagggattaaaaaagatgttttgttttcttctgtctttctttgctttgcttgtgttcccgttttgacaatgagaaatatcgggtaaacacacaaccttccctattatacatttcccttcattttattatacatatatactctctctctctctctctctctttctttgtcaagaatgcaacagtccgggcagtggggattgaggaatcttcaggaggatctagtttttttttatatcataaatacaatcaggtgaattcctactttagatttattggaggagaatgataaactctacatataaaccagagatgctccaactcagaagctgctggtgctagtatagtattgatgaagcaggagacagctaatccctgatggctttgcatgactgtagtatactagtggcgaacaactataactcaaaaggaacgccatgtttgctgcgagtttaatttagatgtgacttctatagtatcatgttcgctgtgagtttaatttagatgtgat

SEQ ID NO: 200921 - DNA, 1811 bp, Zea Mays
gttcaaggggaggcgggggagccacggcggcggagggaattgtttaatcccccgtcaccgtctcctatcgccatcaccccacccgtcccccttggtccaggcgcaggcgcgagcgcgacgtccggcgtccggcttcggcggcggagtggagcgatcccgatccccacaaggaattccatcgctgtcgtggcgtttggtggcgctcctcccggccggcaagcaggatcaggaaatcgcacggaggtgaggatacacgggtgcggaacgagagctaggcgaacctgtctggtacctcgcggcggagatggacgagaaggcgacgatggagagcaagctgtcctcggcggcggccttcgtggaggggggcgtgcaggacgcctgcgacgacgcctgcagcatctgcctcgacgccttctgcgacagcaacccctccacgatgaccaagtgcaagcatgactaccatcttcagtgcattcttgaatggtgccagagaagctcccagtgccccatgtgttggcagcatatcagcatgaaagatcctatgagccaagagctactagaggctgttgaacaagagaggaacatccgagctaatccttcacgtaatactgctgttttccaccatcaaatgctgggtgattttgagatccctgtaggtgcagatgatgcagaacttgaagaacgcattattcagcacttggctgccgcagctgcagtgcgtaggtcacaccgtcatcataatagaagagatgggcaccagagcagatcagaagcaagtagccacccacagtttctggtgctctcagcagacgagcgcacaatctcaggtcaagaaggggactacgaacaagcatctgctgtagcttctggccgccctttacgtacacttgttgaacaagaacgcactcgagggttagcggatgcttccagtccatctctccgttgttctactcctgctgatagtactggtagatcaaacaataggatttctgggatcgaatctacacctgtggatcaagacggaactggaccatccgctttacaatcaatggcagtacagggatttcataatcaaagtgcaagtggatggagggagaggtggttttctcggagcaactctttactggatcttggttctgaggtgaggagggaggtcaacgcggggattgctgcggtgtctcgcatgatggaatggcacgatgcaagggacgggacgggagcggggccttctcctacctctgcatcaagatctggttctcagtgaaacactctgcacttgaaaggaccgatgcaaatgtaaagattaaggtatgtgctcatgctgtgctaatgaaagccttaaattcagtgttttgttttttttctggtggcgtactgtcactgttgactggcctacggatctgagtttttgtgtaattgtttggaagcaattccattgtcgccgaaatggcgcggtagtttctctgactgctgctgctaaatactaggaactttagttttcttcaagtccaaagggtcagagttgagagcacctgagatccggcgatgcttcatggccacggtcccccagaggctattcgcaatagttgactctaaatttctctctatatatcagttttttgtgtcacattatcaacatttcataccttactttttttaggagcagctattgtttgaggagcactttaggaagacaatcaccttgcaacttctctagcatatatgaatttttgaaaaccaccttagtcacttttagtaggtctttccagcttgatgaccacttgttaacttgatgctcttcatcctaaaag

SEQ ID NO: 200922 - DNA, 1838 bp, Zea Mays
gttcaaggggaggcgggggagccacggcggcggagggaattgtttaatcccccgtcaccgtctcctatcgccatcaccccacccgtcccccttggtccaggcgcaggcgcgagcgcgacgtccggcgtccggcttcggcggcggagtggagcgatcccgatccccacaaggaattccatcgctgtcgtggcgtttggtggcgctcctcccggccggcaagcaggatcaggaaatcgcacggaggtgaggatacacgggtgcggaacgagagctaggcgaacctgtctggtacctcgcggcggagatggacgagaaggcgacgatggagagcaagctgtcctcggcggcggccttcgtggaggggggcgtgcaggacgcctgcgacgacgcctgcagcatctgcctcgacgccttctgcgacagcaacccctccacgatgaccaagtgcaagcatgactaccatcttcagtgcattcttgaatggtgtatattataattcatgtaataatttaggtgccagagaagctcccagtgccccatgtgttggcagcatatcagcatgaaagatcctatgagccaagagctactagaggctgttgaacaagagaggaacatccgagctaatccttcacgtaatactgctgttttccaccatcaaatgctgggtgattttgagatccctgtaggtgcagatgatgcagaacttgaagaacgcattattcagcacttggctgccgcagctgcagtgcgtaggtcacaccgtcatcataatagaagagatgggcaccagagcagatcagaagcaagtagccacccacagtttctggtgctctcagcagacgagcgcacaatctcaggtcaagaaggggactacgaacaagcatctgctgtagcttctggccgccctttacgtacacttgttgaacaagaacgcactcgagggttagcggatgcttccagtccatctctccgttgttctactcctgctgatagtactggtagatcaaacaataggatttctgggatcgaatctacacctgtggatcaagacggaactggaccatccgctttacaatcaatggtacagggatttcataatcaaagtgcaagtggatggagggagaggtggttttctcggagcaactctttactggatcttggttctgaggtgaggagggaggtcaacgcggggattgctgcggtgtctcgcatgatggaatggcacgatgcaagggacgggacgggagcggggccttctcctacctctgcatcaagatctggttctcagtgaaacactctgcacttgaaaggaccgatgcaaatgtaaagattaaggtatgtgctcatgctgtgctaatgaaagccttaaattcagtgttttgttttttttctggtggcgtactgtcactgttgactggcctacggatctgagtttttgtgtaattgtttggaagcaattccattgtcgccgaaatggcgcggtagtttctctgactgctgctgctaaatactaggaactttagttttcttcaagtccaaagggtcagagttgagagcacctgagatccggcgatgcttcatggccacggtcccccagaggctattcgcaatagttgactctaaatttctctctatatatcagttttttgtgtcacattatcaacatttcataccttactttttttaggagcagctattgtttgaggagcactttaggaagacaatcaccttgcaacttctctagcatatatgaatttttgaaaaccaccttagtcacttttagtaggtctttccagcttgatgaccacttgttaacttgatgctcttcatcctaaaag

SEQ ID NO: 200923 - DNA, 1482 bp, Zea Mays
gttcaaggggaggcgggggagccacggcggcggagggaattgtttaatcccccgtcaccgtctcctatcgccatcaccccacccgtcccccttggtccaggcgcaggcgcgagcgcgacgtccggcgtccggcttcggcggcggagtggagcgatcccgatccccacaaggaattccatcgctgtcgtggcgtttggtggcgctcctcccggccggcaagcaggatcagtcgacgccctcttggcttgcctttggctgtaggaaatcgcacggaggtgaggatacacgggtgcggaacgagagctaggcgaacctgtctggtacctcgcggcggagatggacgagaaggcgacgatggagagcaagctgtcctcggcggcggccttcgtggaggggggcgtgcaggacgcctgcgacgacgcctgcagcatctgcctcgacgccttctgcgacagcaacccctccacgatgaccaagtgcaagcatgactaccatcttcagtgcattcttgaatggtgccagagaagctcccagtgccccatgtgttggcagcatatcagcatgaaagatcctatgagccaagagctactagaggctgttgaacaagagaggaacatccgagctaatccttcacgtaatactgctgttttccaccatcaaatgctgggtgattttgagatccctgtaggtgcagatgatgcagaacttgaagaacgcattattcagcacttggctgccgcagctgcagtgcgtaggtcacaccgtcatcataatagaagagatgggcaccagagcagatcagaagcaagtagccacccacagtttctggtgctctcagcagacgagcgcacaatctcaggtcaagaaggggactacgaacaagcatctgctgtagcttctggccgccctttacgtacacttgttgaacaagaacgcactcgagggttagcggatgcttccagtccatctctccgttgttctactcctgctgatagtactggtagatcaaacaataggatttctgggatcgaatctacacctgtggatcaagacggaactggaccatccgctttacaatcaatggtacagggatttcataatcaaagtgcaagtggatggagggagaggtggttttctcggagcaactctttactggatcttggttctgaggtgaggagggaggtcaacgcggggattgctgcggtgtctcgcatgatggaatggcacgatgcaagggacgggacgggagcggggccttctcctacctctgcatcaagatctggttctcagtgaaacactctgcacttgaaaggaccgatgcaaatgtaaagattaagctattgtttgaggagcactttaggaagacaatcaccttgcaacttctctagcatatatgaatttttgaaaaccaccttagtcacttttagtaggtctttccagcttgatgaccacttgttaacttgatgctcttcatcctaaaag

SEQ ID NO: 200924 - DNA, 1480 bp, Zea Mays
gttcaaggggaggcgggggagccacggcggcggagggaattgtttaatcccccgtcaccgtctcctatcgccatcaccccacccgtcccccttggtccaggcgcaggcgcgagcgcgacgtccggcgtccggcttcggcggcggagtggagcgatcccgatccccacaaggaattccatcgctgtcgtggcgtttggtggcgctcctcccggccggcaagcaggatcaggaaatcgcacggaggtgaggatacacgggtgcggaacgagagctaggcgaacctgtctggtacctcgcggcggagatggacgagaaggcgacgatggagagcaagctgtcctcggcggcggccttcgtggaggggggcgtgcaggacgcctgcgacgacgcctgcagcatctgcctcgacgccttctgcgacagcaacccctccacgatgaccaagtgcaagcatgactaccatcttcagtgcattcttgaatggtgtatattataattcatgtaataatttaggtgccagagaagctcccagtgccccatgtgttggcagcatatcagcatgaaagatcctatgagccaagagctactagaggctgttgaacaagagaggaacatccgagctaatccttcacgtaatactgctgttttccaccatcaaatgctgggtgattttgagatccctgtaggtgcagatgatgcagaacttgaagaacgcattattcagcacttggctgccgcagctgcagtgcgtaggtcacaccgtcatcataatagaagagatgggcaccagagcagatcagaagcaagtagccacccacagtttctggtgctctcagcagacgagcgcacaatctcaggtcaagaaggggactacgaacaagcatctgctgtagcttctggccgccctttacgtacacttgttgaacaagaacgcactcgagggttagcggatgcttccagtccatctctccgttgttctactcctgctgatagtactggtagatcaaacaataggatttctgggatcgaatctacacctgtggatcaagacggaactggaccatccgctttacaatcaatggtacagggatttcataatcaaagtgcaagtggatggagggagaggtggttttctcggagcaactctttactggatcttggttctgaggtgaggagggaggtcaacgcggggattgctgcggtgtctcgcatgatggaatggcacgatgcaagggacgggacgggagcggggccttctcctacctctgcatcaagatctggttctcagtgaaacactctgcacttgaaaggaccgatgcaaatgtaaagattaagctattgtttgaggagcactttaggaagacaatcaccttgcaacttctctagcatatatgaatttttgaaaaccaccttagtcacttttagtaggtctttccagcttgatgaccacttgttaacttgatgctcttcatcctaaaag

SEQ ID NO: 200925 - DNA, 1540 bp, Zea Mays
gttcaaggggaggcgggggagccacggcggcggagggaattgtttaatcccccgtcaccgtctcctatcgccatcaccccacccgtcccccttggtccaggcgcaggcgcgagcgcgacgtccggcgtccggcttcggcggcggagtggagcgatcccgatccccacaaggaattccatcgctgtcgtggcgtttggtggcgctcctcccggccggcaagcaggatcaggaaatcgcacggaggtgaggatacacgggtgcggaacgagagctaggcgaacctgtctggtacctcgcggcggagatggacgagaaggcgacgatggagagcaagctgtcctcggcggcggccttcgtggaggggggcgtgcaggacgcctgcgacgacgcctgcagcatctgcctcgacgccttctgcgacagcaacccctccacgatgaccaagtgcaagcatgactaccatcttcagtgcattcttgaatggtgccagagaagctcccagtgccccatgtgttggcagcatatcagcatgaaagatcctatgagccaagagctactagaggctgttgaacaagagaggaacatccgagctaatccttcacgtaatactgctgttttccaccatcaaatgctgggtgattttgagatccctgtaggtgcagatgatgcagaacttgaagaacgcattattcagcacttggctgccgcagctgcagtgcgtaggtcacaccgtcatcataatagaagagatgggcaccagagcagatcagaagcaagtagccacccacagtttctggtgctctcagcagacgagcgcacaatctcaggtcaagaaggggactacgaacaagcatctgctgtagcttctggccgccctttacgtacacttgttgaacaagaacgcactcgagggttagcggatgcttccagtccatctctccgttgttctactcctgctgatagtactggtagatcaaacaataggatttctgggatcgaatctacacctgtggatcaagacggaactggaccatccgctttacaatcaatggtacagggatttcataatcaaagtgcaagtggatggagggagaggtggttttctcggagcaactctttactggatcttggttctgaggtgaggagggaggtcaacgcggggattgctgcggtgtctcgcatgatggaatggcacgatgcaagggacgggacgggagcggggccttctcctacctctgcatcaagatctggttctcagtgaaacactctgcacttgaaaggaccgatgcaaatgtaaagattaagagcatgcaaggctagatgaagcagaggtttgacggcacggaggcaaaacggccttgtcacgtggccagcccatctcgaattcctcgaagcaggcaagtagtagaagagcacgtgcaagcgccagagacggggcaatgtgtatagggatggagccagacagcgcgcaaaggtgcgccgccagtgacaatccgcaacacagccagcgcggttagtagcgagcgtgacagacacgagg

SEQ ID NO: 200926 - DNA, 2229 bp, Zea Mays
catgattcacgaacaagccataggcgttaggttttacaggctgacagctgcggccgtcttctgctattgctgtaaccgcggccccgcctgggatttctgagctgtgggtgatgttctggtactctcttggttgatggcgaacgcggaaggttttcggctcgtgagatgcccaaactgtctcaacgttctcccagaaccgcacaacgttacagtctacaggtgcggcggatgcggcaccacccttcgagctaaaatctgtgccagcggtggccgacatgcgtctgcaaaacaagctcgccaggactccgacagttattcggtcgctacagccgtgagcaatggcaatggggcgcctccccaaatcaaagaccaaggctcagagagctccttcggtgctgatgctccaagcaccgagcatggcagcaacggggcagggagcggcgaaaatggtggtggcatactggctgtgcagaacgctgtggtggtggctcacgacgctgagaacaaggaaaaccacaccgtggaacagcctacggagaattcagagacttgccgagcagtaagtggacatgatgatgatacagaacgccgcttgaacgcctctgagatcaaaacggttccttctgagatgagcaaggcagccgtcagtgcgcaagatcccgagcagaaggaagaaggcggaggcgaacatgcagcaaacaagaaggggtatcttgtgagggtactgtctcggtcctgtgatcttcgatcgtcacgagactcgactgatttccaatctgcacggacttctctccagtcgaaaagcttcagtgccagcgagcccctccagtcgaagatcatgaacacagtggacgagctgaagggcgacctttctgagctgttcagtaataaacctgcagacgactgcaagccgaaggcgcaccaacctccacgaccttccaattccaagcaagatggccgcacgactcgtgcagccatcgcgtccagtgcacctctcgcggcataccatcctgccgccaagcattctggctacgtgtctcgcccgagcaagtctggccaggttgctgctgcttctcgtggactgccgtcgctgcggtatcgccggcactgggtttatccgttccacttccaccacaacgtgcagacggaaacgagaccttgccgtcatgggtgctgccaccatagttgccagcagccaccctgttacagatacagaccctgcaagcaagaacctgcagcgacgcgcaggccaccggtcatggtgagcaataagcgccctcctcctcccagaaactactgcctgccagtcctacgtggcgccccgttcgtgatctgctccagctgcgtcagcctggtccagctgcccgcggagttcgccgtcccgagcaggggaacgcgccggctgcggtgcggctcctgctccgaagtcctctcctactcctacagggaccccggcgccaggaagaggctgcagtcaccgttcgggggcgacgagtacagcactgacgagtacgagcaggcttccggcggccacaacgccgccgccgccggcggcttcttcggggaggcggacccggtgtcctactccgaggagtacgggctctcgttcggcatcggccactcgaccagcaccgaggacgggcagcagccgctgtacgtgtcgaggaactcgtccttcaacaccgtcgacgaaaggacgggtactagagacggcaagcttcaccggctgatggggtactcgtcggcgagcgaggtgctgcagcactcgcccgacctgttcgaaagcttcggcaggcgcgcggccgacgcaggaagagcgcacgtcggcgggaagggcaaaggcgtttgcgtggcagagaacgacgcgtgcgagcgagacggtggtgcggtggagagatcgaaggtgaggagtggtggttggccggtccatgggatcctgaagaaggggatccacggcctggaatcactcaagctcaggtcgtagctggtggttttcgtttggcggggctctggcgatcatgtttagagttcagtggcagtgtagtcatgcttattagtggttagcttgtgtgtgagttgtttgcgattcatctctgtgtctgtgtgtgccgagttggttggtttgcaatttttgtcatgtgtgtaaagccttgcacgccgagcaatgctcgatggtgtgaatgtatatacagaattactatttggttcaattcaagataaatagtactc

SEQ ID NO: 200927 - DNA, 2344 bp, Zea Mays
cttgcgaagcgagcgcgccataacttccaagaactggggttcgagtggggcggaggttgcaacaagaggaaggagacgacgacgacgcggccgcctcggctcggaggagaaggagacacgatcacacgaggcgtaggcgacgaggaggaagcgtccaccaggggacgacgggaccctgtgcgaaaggtaaccgcggccccgcctgggatttctgagctgtgggtgatgttctggtactctcttggttgatggcgaacgcggaaggttttcggctcgtgagatgcccaaactgtctcaacgttctcccagaaccgcacaacgttacagtctacaggtgcggcggatgcggcaccacccttcgagctaaaatctgtgccagcggtggccgacatgcgtctgcaaaacaagctcgccaggactccgacagttattcggtcgctacagccgtgagcaatggcaatggggcgcctccccaaatcaaagaccaaggctcagagagctccttcggtgctgatgctccaagcaccgagcatggcagcaacggggcagggagcggcgaaaatggtggtggcatactggctgtgcagaacgctgtggtggtggctcacgacgctgagaacaaggaaaaccacaccgtggaacagcctacggagaattcagagacttgccgagcagtaagtggacatgatgatgatacagaacgccgcttgaacgcctctgagatcaaaacggttccttctgagatgagcaaggcagccgtcagtgcgcaagatcccgagcagaaggaagaaggcggaggcgaacatgcagcaaacaagaaggggtatcttgtgagggtactgtctcggtcctgtgatcttcgatcgtcacgagactcgactgatttccaatctgcacggacttctctccagtcgaaaagcttcagtgccagcgagcccctccagtcgaagatcatgaacacagtggacgagctgaagggcgacctttctgagctgttcagtaataaacctgcagacgactgcaagccgaaggcgcaccaacctccacgaccttccaattccaagcaagatggccgcacgactcgtgcagccatcgcgtccagtgcacctctcgcggcataccatcctgccgccaagcattctggctacgtgtctcgcccgagcaagtctggccaggttgctgctgcttctcgtggactgccgtcgctgcggtatcgccggcactgggtttatccgttccacttccaccacaacgtgcagacggaaacgagaccttgccgtcatgggtgctgccaccatagttgccagcagccaccctgttacagatacagaccctgcaagcaagaacctgcagcgacgcgcaggccaccggtcatggtgagcaataagcgccctcctcctcccagaaactactgcctgccagtcctacgtggcgccccgttcgtgatctgctccagctgcgtcagcctggtccagctgcccgcggagttcgccgtcccgagcaggggaacgcgccggctgcggtgcggctcctgctccgaagtcctctcctactcctacagggaccccggcgccaggaagaggctgcagtcaccgttcgggggcgacgagtacagcactgacgagtacgagcaggcttccggcggccacaacgccgccgccgccggcggcttcttcggggaggcggacccggtgtcctactccgaggagtacgggctctcgttcggcatcggccactcgaccagcaccgaggacgggcagcagccgctgtacgtgtcgaggaactcgtccttcaacaccgtcgacgaaaggacgggtactagagacggcaagcttcaccggctgatggggtactcgtcggcgagcgaggtgctgcagcactcgcccgacctgttcgaaagcttcggcaggcgcgcggccgacgcaggaagagcgcacgtcggcgggaagggcaaaggcgtttgcgtggcagagaacgacgcgtgcgagcgagacggtggtgcggtggagagatcgaaggtgaggagtggtggttggccggtccatgggatcctgaagaaggggatccacggcctggaatcactcaagctcaggtcgtagctggtggttttcgtttggcggggctctggcgatcatgtttagagttcagtggcagtgtagtcatgcttattagtggttagcttgtgtgtgagttgtttgcgattcatctctgtgtctgtgtgtgccgagttggttggtttgcaatttttgtcatgtgtgtaaagccttgcacgccgagcaatgctcgatggtgtgaatgtatatacagaattactatttggttcaattcaagataaatagtactc

SEQ ID NO: 200928 - DNA, 1038 bp, Zea Mays
attcgttctgtcgtagcctcgatagcgaagcgagggcggggggcccgctggcttcggcgcctgcatcacaaccgggcgtcgtcgctggcggtagcggagaaggagcagccgcagcagggccggtgcggccgagccggatggacgaggggtgcgcgggcgcggaggacatcgccatctaccagcgccacgcgtcgtcgctgccgaacggggtgccggcgtacaaggtggacgtgatgaaccagtgcctgggcgacccgggcggcggcgactgcgcgatcgcgggcatccacgtgcggtgcgggtggttcagctcggtgaacctggtggaccccctcaagttcaggcgcctgcgccacgacgactgcctcctcaacgacgggcggccgctgctcggcggcgacaccatctccttcgagtacgccaactcgttcccgtacgagctctccgtccgcgtcgccacgtgcgtcgaccccaccaccgccccgtagtaggccgttggctggcgccgccatccatgtcgctccgtccgcagtccgcaccacacacgataagcatagaaactccaccctcataatactactaccacgagtattatataaaatactagtacaagtcagtcagttgcagcagtaggacagtgcaaggcaggtctttggttcttggatccaaatgtaattagctggtggtttaggtgattttgttggactgtaggatcgggcgctcgagggggcggcagggactccgcgttttgttcttttgccgatgttccaaggtctcgtctcacgtgtacatggacatggcacggatcgagcggtggaagaagcctttttttttttaaaaaaaagtactagtgtgtaactggatgcgggatgtgaaatttttgggcaaccaggccggcctgctgtaatgcaaatcttttgcttttgtttcaacagggaagtgcaaagctgctattgaaggaagcgagtgcttttcgtgtgtgttggcatttgctcgctttcttctttttggttgagcttctgctgctgtctgttgccg

SEQ ID NO: 200929 - DNA, 1314 bp, Zea Mays
aaacccaaacacgctacggaatccaccgccccgaagccggcaagcggccaacccctcacgcgcatccgtccgtccggttcccgtctcgatcggacaaacctggaaccattggtcttcgccccccttgcaccagtccacgccccactcccagtctcccactcgctgcagtctggcactgttctcgggagaggcgtattgctgtcctcccgcaccgcaccacaccgcaccgcaccgcaccacgttagcggctcggggtcgggggttgggccaatcccttccccggcagacggcagtcgcatcgcatcccctccgcctcgttccttgctcggctcgccccaacttcgctgccggccgccgccgccgcattcccctcggctactcgctcctcgtcgctccccggtgatgtctggcggtaacgcatggtcgccactgccttcgcacggatttggattttgaactatcagatgaacagtatggacatgcagttgctatagagcggcttgtaccaagcctatcatacctcaggactgagctttgctctaccaatatgagtgaagcgtgcttctggaagatatattttgtgcttctccattcgaaactcagcaagcaagatgctgaaattctttcaacaccacaaatcctggaagcaagagaaggactactgcaaagttcaccgacaaagcacaagctgttatcagaaagcaggaatactacagaacctgaagagagtgagttgtcaccggcaagcatccaaaacaagcatggagtatctgaagcgccgtcattccaagaactaacttctgaccctgtgcctaatgttgaggctgacaagcatcctatctcaagtactgaggcagaaatagttgacaagtctgtaattcaagaagagttggtgatgaaaactgaggccaagagtttacccactgaggaatctaaccctgaccctgcggatgatgatgatgaaaaagaagtagatgattggctacaggatgtcgactctgtgcccagcaaaactggcaacaatactgcagttggggaggaggaagatgtatccttcagtgatctagaggatgactgaggggctgttattgagccaaccagctatcagtttactgttagacggtagcttcatgaagtgaagaacacttgctctgtggctttaccacttcactgcctggttcttccgattgcagtagcagaatcacgtaacaatgtccctcgggaacatgatacatcatcatacatgtaatctcaaggatgaactctgcatgctaaagcttatgaggcgttgagcaggatctgttgcactcacgc

SEQ ID NO: 200930 - DNA, 1951 bp, Zea Mays
tctcaaacggtgttacctattgtagggaatgtcatgcctaggtatcaagtgggctcgacaaagggtgattcaagtagtagacgacactctgaggagtggcggcaacctagcacagatgatgtgcgcatgagcaagccggggtcgagatatttcacggcgtttggggtggatctgtcccctgataatatggcagttgccattgtatattttgtgcaaggggttttaggtcttgcacggcttgctgtgagcttttacttgaaagatgatcttcatctagatccagctgagactgcagtggtatctggtttctcgtccttgccgtggctgatcaagcccctctatggctttatcagtgattccattccactctttggatatcgaagaaggtcatatctttttctgtcagggttacttggagcactttcatggagcttaatggccacagtagtgagcagtaaatacagcgcagcattctctattcttcttggctcactttctgttgccttctcagatgttgtagtggattctatggttgttgagagagcccgtggagaatctcaaagtacatctggatcactccagtcactctgttggggatcttctgcctttggaggaattgtgagtgcttatttcagtggttcacttgtggatacttatggagtaagatttgtctttggtgttacagcgtttttacccctgatgacatctgctgttgcagttcttgtaaatgaacatggcattccttctggagaacacaatacctttctctctggttccggatttgttgagagctctaagcagcatgtcaggcagctttgggcttcagtaaagcaacctaacattttgttgccgaccttgtttatatttctttggcaagcaacaccgcagtcagattctgctatgtttttcttcatcacaaataagcttggattcactccggagtttctagggcgcgtgaagcttgtaacctcttttgcatccctgcttggtgttgggctctacaactattttctgaaggaagttgctctgaggaagatttttcttgtgacaaccattataggttcagctcttgggatgacacagcttgggatcagcgatgagtggttttctattggtgattcattaatcatcacagtccttggtcaggcatcgtttatgccagtcttggtgttagctgcaaagttgtgccctccaggaatggaagccactttatttgcaactttgatgtccatttctaatgctggaagtgttactggtggtctggttggtgctggtctaactcggatatttggggtcactagggatacctttgggaacctacctctgttgattgtcgtctgcaatcttagttcattgctgcccttacctcttttaggtctccttccagagggatcaggtgacaccgataacggagaaacaaaaaataactgatttactgagggttttatctccattgttctggtactcaagtatagcataccacagtgcccagcttcaactcagatatggcccatcgagttgaaattcaaaaggccagtagagaaatacggaaatcacactggatttaagttcagtcggtcaccgccatcatcaggcagtatctcctgtgactattaacctgtgtgatggaagtgattcattgatgatctgcaaatgatctatggcgcacaggtactcacctctttttagtttctaagctaccttgtacacgaagacaaggtaggttttatctttctctagagtctttgagtttttgttgttaatgcgaccccatgaaaattagactagtggtcaaaggctattaattggggattaccttgcgaagtcaaatgtattgtgccaaaaaaaggagggagtatgtatacattattggaaacctagagtacggaaatgtaaagaaaaatacttgcacacagtttgacttgtcgtacagtgtcaggttctgcttaca

SEQ ID NO: 200931 - DNA, 1753 bp, Zea Mays
tctcaaacggtgttacctattgtagggaatgtcatgcctaggtatcaagtgggctcgacaaagggtgattcaagtagtagacgacactctgaggagtggcggcaacctagcacagatgatgtgcgcatgagcaagccggggtcgagatatttcacggcgtttggggtggatctgtcccctgataatatggcagttgccattgtatattttgtgcaaggggttttaggtcttgcacggcttgctgtgagcttttacttgaaagatgatcttcatctagatccagctgagactgcagtggtatctggtttctcgtccttgccgtggctgatcaagcccctctatggctttatcagtgattccattccactctttggatatcgaagaaggtcatatctttttctgtcagggttacttggagcactttcatggagcttaatggccacagtagtgagcagtaaatacagcgcagcattctctattcttcttggctcactttctgttgccttctcagatgttgtagtggattctatggttgttgagagagcccgtggagaatctcaaagtacatctggatcactccagtcactctgttggggatcttctgcctttggaggaattgtgagtgcttatttcagtggttcacttgtggatacttatggagtaagatttgtctttggtgttacagcgtttttacccctgatgacatctgctgttgcagttcttgtaaatgaacatggcattccttctggagaacacaatacctttctctctggttccggatttgttgagagctctaagcagcatgtcaggcagctttgggcttcagtaaagcaacctaacattttgttgccgaccttgtttatatttctttggcaagcaacaccgcagtcagattctgctatgtttttcttcatcacaaataagcttggattcactccggagtttctagggcgcgtgaagcttgtaacctcttttgcatccctgcttggtgttgggctctacaactattttctgaaggaagttgctctgaggaagatttttcttgtgacaaccattataggttcagctcttgggatgacacaggtgcttcttgtaactgggctaaatcggcagcttgggatcagcgatgagtggttttctattggtgattcattaatcatcacagtccttggtcaggcatcgtttatgccagtcttggtgttagctgcaaagttgtgccctccaggaatggaagccactttatttgcaactttgatgtccatttctaatgctggaagtgttactggtggtctggttggtgctggtctaactcggatatttggggtcactagggatacctttgggaacctacctctgttgattgtcgtctgcaatcttagttcattgctgcccttacctcttttaggtctccttccagagggatcaggtgacaccgataacggagaaacaaaaaataactgatttactgagggttttatctccattgttctggtactcaagtatagcataccacagtgcccagcttcaactcagatatggcccatcgagttgaaattcaaaaggccagtagagaaatacggaaatcacactggatttaagttcagtcggtcaccgccatcatcaggcagtatctcctgtgactattaacctgtgtgatggaagtgattcattgatgatctgcaaatgatctatggcgcacagattgtaattgtacaaatggtacttgtctcattatctgtatgataaggctgcc

SEQ ID NO: 200932 - DNA, 494 bp, Zea Mays
tgcatgcatgcacggcacggcacgagagaaggacacacgcatcccacggcaggcgtgtgtctctgtggggatccccaagccagaccagagatgggcaatgtgagcggtcgagcggaagacctcgtggacgccgacattgatgacggcaacaacatgcgacgtgcctcttcctcctctgcgggctacgtccggggcggtgggtcatcatcatccccgccggcgagcccgccgaggccgcattcaccgcggatgttcgtgccccagagtcctgtaactccgttgcaaagagctacagaaatgcctcctccggtgttcaaccagatattgatgaatcaacaataggaggattctgatggcccgcctcaaaagaaaattcccatgttgctcacgtggactcttggagggaggaatatctacgtagaaggatcatggggcaactagacatcaaagttccgtcggaccaaatatatatgtgtttccattttctcccatgc

SEQ ID NO: 200933 - DNA, 619 bp, Zea Mays
tttctgtccccctcgccatttcccacacagtgtggcgagagccggccgcgtggcggatcatcgtcgccgcccctcgcatcctcgtcgtgccgccgcaccgcaagggttgctcgtgttcgacgggatgccaccgctgggacccgggagagttattggtgcacaggtgtttcgcaagttgtcacctgtcaagtagatgtttctagtatgggcccgactccattgatggatgattaataacaaagctgaggaaaattcattctgaagcaagaaacttgctcacaagattaactgcagatgtgatttgtcggatgttgatgactggctaaatgaagagccactttaacaccacatttcaaaatcagccccttacctctggtttttttccccttacttcggatgtttggtttgcacatagactatagcttctacaatacaattaatttgtgtgagttttcttaattacacttgatgattagtggggggagaaaaagacatgaatcgatatgtcatgtaaccaatgatatggtggcctggtgagaaatttttgtgcaattttatgagaaggtatgaaacaatgttttttaagcaccatttgaggagcttcggaacttttatgaaa

SEQ ID NO: 200934 - DNA, 2426 bp, Zea Mays
caatttctatttttgattattccgtactcgatttcattttagatgataaaatatggatacatgagagattttccgtccgttttgatcctgcaaagatctgaggccgtcgtggtgtggcctggccactggccacccgtgccctatcctcttccgcacggcgtcctatatatataaggaaaggaaaaatctgccactccacacgcgttcctctctcgccgtcgccaaccatcgccgcctcgcgtccggacccgccgttcctccgaggaaatggctgcactgcaaccctcattttcaccagcaatgactttgaagagtagctgcagcgccctgaagttcccaaaaactgcactgttatctggttttggtggcattccacgccttcaagatgcgcaagacaggaacactagcgtcgcttatttgatccccaaggctgcttcagtgactgaccagtcaatagcagagccaccaaaaaccaagcaaaataggcacacagtcgacccaacagctccagaatttctgccactcccatcttttgaagaatgctttccaaggagtaccaaagaatcaagtgaaatcatccacgaggaatcaggtcatgtcctcaaggttccattccggagagtccatttgactggagatcagaagcactttgatacatatgacaccagtggtcctcaaaatataagcccaaggattggactcccaaagataaggaaggaatggattgataggagggaaaagctgggtagtcctcggtacacacaaatgtattatgctaaacagggaattgtaacagaggagatgttatactgtgccagccgtgagaaccttagtcctgaatttgttcggacagaagttgcccgtggacgagccataattccttccaacaagaggcacctggaattggaacccatgattgttggaagaaacttccttgtaaaggtgaatgcaaatattgggaattcagctgttgtgagctccattgaggaggaagttcacaagctccagtgggccacgatgtggggagctgatactgtcatggacctttcaacagggcgacatatccatgagacgcgggaatggattattcgcaactctccggttcctattgggactgttcctatttaccaagcacttgagaaagtaaatggtattgctgaaaatctgagctgggaaatttttagggataccttgattgaacaagctgagcagggcgttgattacttcacaatccatgctggtgtcctgcttcgttacattcctcttacagcaaagagaatgacgggcatagtttcacgtggtggctcaatccatgcaaaatggtgcttaacttatcacaaggagaactttgcatatgaacattgggatgacattcttgacatatgcaatcagtatgatgtggcattatcaattggtgatggtttgaggcctggttccatttatgatgcaaatgatagtgcacagtttgcagaactgctgactcaaggtgaactaacacgtcgagcatgggcgaaagatgtgcaggtgatgaatgaaggcccgggtcacatcccaatgcataaaattcctgaaaacatggagaaacagttggagtggtgtaatgaagcgcctttctatacattgggtcctttgacaactgatattgcacctggttatgatcacatcacttcagccattggtgctgccaacattggagctcttggcactgcacttctttgctatgtaacaccaaaggagcaccttgggttgcccaatcgtgatgatgtcaagactggtgtaatatcctacaaaatttctgctcatgctgctgatttggcgaagggtcatccctatgcacaagcttgggatgatgcacttagcaaggcaaggtttgagtttagatggcttgaccaatttgctttatctctggatccagtaactgctatggctttccatgatgaaacattgccctctgagggtgccaaagtggcacatttctgctcaatgtgtgggcccaagttttgttcaatgaaaatcacggaggatatcaggaagtatgctgatgaaaatggttatggaacagtagaggaagctgtgatacaaggaatgaatgctatgagtgctgaatttttggctgcaaggaaaacaattagtggggaacaacatggtgaagcaggaggggagatctatgtaccagaaagctatgcagctcagaaataaggtttcctcggagacatccattccaaatgaggctaaggcatcagcagctgttctggctagtggctaaggcatcagcagctgttctaccatcttatctaatgagatggtaagcagtatgtgaataaagctggtgttgcttaccttcagtttgtgaatgccattatgtactgtaataaaaaactctgtattgtactccctagcattatcattatgcttttgtctaacaa

SEQ ID NO: 200935 - DNA, 3559 bp, Zea Mays
cacgagcaccgaccggctacgcagcacggaggacgggaggtgcgccgtcgctcgccggcgatgatcctccacccctgacacgcccgcgattaggttccgtcctctgccgccgcgcaaacgatgtctgccgtcgaccgcggtcgttcccgcgcccgcgacacgagtcagcagcgaactcaacgggaatccggcgacccccagaaatggctgcactgcaaccctcattttcaccagcaatgactttgaagagtagctgcagcgccctgaagttcccaaaaactgcactgttatctggttttggtggcattccacgccttcaagatgcgcaagacaggaacactagcgtcgcttatttgatccccaaggctgcttcagtgactgaccagtcaatagcagagccaccaaaaaccaagcaaaataggcacacagtcgacccaacagctccagaatttctgccactcccatcttttgaagaatgctttccaaggagtaccaaagaatcaagtgaaatcatccacgaggaatcaggtcatgtcctcaaggttccattccggagagtccatttgactggagatcagaagcactttgatacatatgacaccagtggtcctcaaaatataagcccaaggattggactcccaaagataaggaaggaatggattgataggagggaaaagctgggtagtcctcggtacacacaaatgtattatgctaaacagggaattgtaacagaggagatgttatactgtgccagccgtgagaaccttagtcctgaatttgttcggacagaagttgcccgtggacgagccataattccttccaacaagaggcacctggaattggaacccatgattgttggaagaaacttccttgtaaaggtgaatgcaaatattgggaattcagctgttgtgagctccattgaggaggaagttcacaagctccagtgggccacgatgtggggagctgatactgtcatggacctttcaacagggcgacatatccatgagacgcgggaatggattattcgcaactctccggttcctattgggactgttcctatttaccaagcacttgagaaagtaaatggtattgctgaaaatctgagctgggaaatttttagggataccttgattgaacaagctgagcagggcgttgattacttcacaatccatgctggtgtcctgcttcgttacattcctcttacagcaaagagaatgacgggcatagtttcacgtggtggctcaatccatgcaaaatggtgcttaacttatcacaaggagaactttgcatatgaacattgggatgacattcttgacatatgcaatcagtatgatgtggcattatcaattggtgatggtttgaggcctggttccatttatgatgcaaatgatagtgcacagtttgcagaactgctgactcaaggtgaactaacacgtcgagcatgggcgaaagatgtgcaggtgatgaatgaaggcccgggtcacatcccaatgcataaaattcctgaaaacatggagaaacagttggagtggtgtaatgaagcgcctttctatacattgggtcctttgacaactgatattgcacctggttatgatcacatcacttcagccattggtgctgccaacattggagctcttggcactgcacttctttgctatgtaacaccaaaggagcaccttgggttgcccaatcgtgatgatgtcaagactggtgtaatatcctacaaaatttctgctcatgctgctgatttggcgaagggtcatccctatgcacaagcttgggatgatgcacttagcaaggcaaggtttgagtttagatggcttgaccaatttgctttatctctggatccagtaactgctatggctttccatgatgaaacattgccctctgagggtgccaaagtggcacatttctgctcaatgtgtgggcccaagttttgttcaatgaaaatcacggaggatatcaggaagtatgctgatgaaaatggttatggaacagtagaggaagctgtgatacaaggaatgaatgctatgagtgctgaatttttggctgcaaggaaaacaattagtggggaacaacatggtgaagcaggaggggagatctatgtaccagaaagctatgcagctcagaaataaggtttcctcggagacatccattccaaatgaggctaaggcatcagcagctgttctggctagtggctaaggcatcagcagctgttctaccatcttatctaatgagatggggtgcctgtgttctcaacagtctgagagcctcttagcctggactgttgtgagatgggctgagaaagtccctttgaacctgaacaggataatgcctgcgaagggagtgtgcaattctattttcctgttttccaggaacctatcaaccttttggtggaaattgaggtattgtccatgattgcatggagctcagcaacaaggtacctgttctctacttgtttgcatttctcaaggggaagattcttaacaggtatcagcttcgtcatgacatctaacaattttatttataatgttcaagttatttagttaaatctacacgaccatgaaatttgtcaaagcatttcctagtcctatattatctagttttacttctacgtctatctgttctttgattgtgcgctccatctattctttgatgaagcttgcgagttctactttctagacctattgagataggaccttttggcacggtacaatatcaatactgttttggtgaagggagtatatttacagtagtacaaaaggagatggctaaacctgctacaattttttttagatggacgatgtttgtcaattgagggtgggaagtaccgaccagattgcatttgacttcatccggccatccggtctattaataaataaccaaggaagtggttcttggcaactaccttttcccgttcttgtggtttttttttcaaataggcgtgcttaaatatttcggtcttttaaattaatattataaaattctcgtctgaatatttttcaagtctagtattatgcatgataatttacatatgcatgttgtctgaaagcagaagcagattctcaaggcacctgctaattcaaaaccaaaaataggttgtaacttcgaagttgctgcattggtgaagaataatatattttagttttactctcagctgattgcttgtttgtcatgtttcactccatgcttcactctcggctgtattctgcattataccttgtttatatccaactgccatggccgatgtgagatgttaaatgtgtcggtgaagtaaataattctgctgtggcttttccgctttctgtggttccaatgggctattcccatttgcaaatattgtgtccataaggcggatttccaaatcctgcggagttgaggtgggcacctaatttcttgacgtttctgatcaatttctcatgttatcacaatgtcccttataagtgcttcccgagcagaattgagatgttaattattataaacttccattttggtttatctgaaaccaggaattctatatgaatgtctccttgagtatagtttcattattgtttaaaag

SEQ ID NO: 200936 - DNA, 3477 bp, Zea Mays
caatttctatttttgattattccgtactcgatttcattttagatgataaaatatggatacatgagagattttccgtccgttttgatcctgcaaagatctgaggccgtcgtggtgtggcctggccactggccacccgtgccctatcctcttccgcacggcgtcctatatatataaggaaaggaaaaatctgccactccacacgcgttcctctctcgccgtcgccaaccatcgccgcctcgcgtccggacccgccgttcctccgaggaaatggctgcactgcaaccctcattttcaccagcaatgactttgaagagtagctgcagcgccctgaagttcccaaaaactgcactgttatctggttttggtggcattccacgccttcaagatgcgcaagacaggaacactagcgtcgcttatttgatccccaaggctgcttcagtgactgaccagtcaatagcagagccaccaaaaaccaagcaaaataggcacacagtcgacccaacagctccagaatttctgccactcccatcttttgaagaatgctttccaaggagtaccaaagaatcaagtgaaatcatccacgaggaatcaggtcatgtcctcaaggttccattccggagagtccatttgactggagatcagaagcactttgatacatatgacaccagtggtcctcaaaatataagcccaaggattggactcccaaagataaggaaggaatggattgataggagggaaaagctgggtagtcctcggtacacacaaatgtattatgctaaacagggaattgtaacagaggagatgttatactgtgccagccgtgagaaccttagtcctgaatttgttcggacagaagttgcccgtggacgagccataattccttccaacaagaggcacctggaattggaacccatgattgttggaagaaacttccttgtaaaggtgaatgcaaatattgggaattcagctgttgtgagctccattgaggaggaagttcacaagctccagtgggccacgatgtggggagctgatactgtcatggacctttcaacagggcgacatatccatgagacgcgggaatggattattcgcaactctccggttcctattgggactgttcctatttaccaagcacttgagaaagtaaatggtattgctgaaaatctgagctgggaaatttttagggataccttgattgaacaagctgagcagggcgttgattacttcacaatccatgctggtgtcctgcttcgttacattcctcttacagcaaagagaatgacgggcatagtttcacgtggtggctcaatccatgcaaaatggtgcttaacttatcacaaggagaactttgcatatgaacattgggatgacattcttgacatatgcaatcagtatgatgtggcattatcaattggtgatggtttgaggcctggttccatttatgatgcaaatgatagtgcacagtttgcagaactgctgactcaaggtgaactaacacgtcgagcatgggcgaaagatgtgcaggtgatgaatgaaggcccgggtcacatcccaatgcataaaattcctgaaaacatggagaaacagttggagtggtgtaatgaagcgcctttctatacattgggtcctttgacaactgatattgcacctggttatgatcacatcacttcagccattggtgctgccaacattggagctcttggcactgcacttctttgctatgtaacaccaaaggagcaccttgggttgcccaatcgtgatgatgtcaagactggtgtaatatcctacaaaatttctgctcatgctgctgatttggcgaagggtcatccctatgcacaagcttgggatgatgcacttagcaaggcaaggtttgagtttagatggcttgaccaatttgctttatctctggatccagtaactgctatggctttccatgatgaaacattgccctctgagggtgccaaagtggcacatttctgctcaatgtgtgggcccaagttttgttcaatgaaaatcacggaggatatcaggaagtatgctgatgaaaatggttatggaacagtagaggaagctgtgatacaaggaatgaatgctatgagtgctgaatttttggctgcaaggaaaacaattagtggggaacaacatggtgaagcaggaggggagatctatgtaccagaaagctatgcagctcagaaataaggtttcctcggagacatccattccaaatgaggctaaggcatcagcagctgttctggctagtggctaaggcatcagcagctgttctaccatcttatctaatgagatggtaagcagtatgtgaataaagctggtgttgcttaccttcagtttgtgaatgccattatgtactgtaataaaaaactctgtattgtactccctagcattatcattatgcttttgtcttctttgtatcacaatgggattgttagtgatgaaaattgcaccaggggtgcctgtgttctcaacagtctgagagcctcttagcctggactgttgtgagatgggctgagaaagtccctttgaacctgaacaggataatgcctgcgaagggagtgtgcaattctattttcctgttttccaggaacctatcaaccttttggtggaaattgaggtattgtccatgattgcatggagctcagcaacaaggtacctgttctctacttgtttgcatttctcaaggggaagattcttaacagatggacgatgtttgtcaattgagggtgggaagtaccgaccagattgcatttgacttcatccggccatccggtctattaataaataaccaaggaagtggttcttggcaactaccttttcccgttcttgtggtttttttttcaaataggcgtgcttaaatatttcggtcttttaaattaatattataaaattctcgtctgaatatttttcaagtctagtattatgcatgataatttacatatgcatgttgtctgaaagcagaagcagattctcaaggcacctgctaattcaaaaccaaaaataggttgtaacttcgaagttgctgcattggtgaagaataatatattttagttttactctcagctgattgcttgtttgtcatgtttcactccatgcttcactctcggctgtattctgcattataccttgtttatatccaactgccatggccgatgtgagatgttaaatgtgtcggtgaagtaaataattctgctgtggcttttccgctttctgtggttccaatgggctattcccatttgcaaatattgtgtccataaggcggatttccaaatcctgcggagttgaggtgggcacctaatttcttgacgtttctgatcaatttctcatgttatcacaatgtcccttataagtgcttcccgagcagaattgagatgttaattattataaacttccattttggtttatctgaaaccaggaattctatatgaatgtctccttgagtatagtttcattattgtttaaaag

SEQ ID NO: 200937 - DNA, 3571 bp, Zea Mays
caatttctatttttgattattccgtactcgatttcattttagatgataaaatatggatacatgagagattttccgtccgttttgatcctgcaaagatctgaggccgtcgtggtgtggcctggccactggccacccgtgccctatcctcttccgcacggcgtcctatatatataaggaaaggaaaaatctgccactccacacgcgttcctctctcgccgtcgccaaccatcgccgcctcgcgtccggacccgccgttcctccgaggaaatggctgcactgcaaccctcattttcaccagcaatgactttgaagagtagctgcagcgccctgaagttcccaaaaactgcactgttatctggttttggtggcattccacgccttcaagatgcgcaagacaggaacactagcgtcgcttatttgatccccaaggctgcttcagtgactgaccagtcaatagcagagccaccaaaaaccaagcaaaataggcacacagtcgacccaacagctccagaatttctgccactcccatcttttgaagaatgctttccaaggagtaccaaagaatcaagtgaaatcatccacgaggaatcaggtcatgtcctcaaggttccattccggagagtccatttgactggagatcagaagcactttgatacatatgacaccagtggtcctcaaaatataagcccaaggattggactcccaaagataaggaaggaatggattgataggagggaaaagctgggtagtcctcggtacacacaaatgtattatgctaaacagggaattgtaacagaggagatgttatactgtgccagccgtgagaaccttagtcctgaatttgttcggacagaagttgcccgtggacgagccataattccttccaacaagaggcacctggaattggaacccatgattgttggaagaaacttccttgtaaaggtgaatgcaaatattgggaattcagctgttgtgagctccattgaggaggaagttcacaagctccagtgggccacgatgtggggagctgatactgtcatggacctttcaacagggcgacatatccatgagacgcgggaatggattattcgcaactctccggttcctattgggactgttcctatttaccaagcacttgagaaagtaaatggtattgctgaaaatctgagctgggaaatttttagggataccttgattgaacaagctgagcagggcgttgattacttcacaatccatgctggtgtcctgcttcgttacattcctcttacagcaaagagaatgacgggcatagtttcacgtggtggctcaatccatgcaaaatggtgcttaacttatcacaaggagaactttgcatatgaacattgggatgacattcttgacatatgcaatcagtatgatgtggcattatcaattggtgatggtttgaggcctggttccatttatgatgcaaatgatagtgcacagtttgcagaactgctgactcaaggtgaactaacacgtcgagcatgggcgaaagatgtgcaggtgatgaatgaaggcccgggtcacatcccaatgcataaaattcctgaaaacatggagaaacagttggagtggtgtaatgaagcgcctttctatacattgggtcctttgacaactgatattgcacctggttatgatcacatcacttcagccattggtgctgccaacattggagctcttggcactgcacttctttgctatgtaacaccaaaggagcaccttgggttgcccaatcgtgatgatgtcaagactggtgtaatatcctacaaaatttctgctcatgctgctgatttggcgaagggtcatccctatgcacaagcttgggatgatgcacttagcaaggcaaggtttgagtttagatggcttgaccaatttgctttatctctggatccagtaactgctatggctttccatgatgaaacattgccctctgagggtgccaaagtggcacatttctgctcaatgtgtgggcccaagttttgttcaatgaaaatcacggaggatatcaggaagtatgctgatgaaaatggttatggaacagtagaggaagctgtgatacaaggaatgaatgctatgagtgctgaatttttggctgcaaggaaaacaattagtggggaacaacatggtgaagcaggaggggagatctatgtaccagaaagctatgcagctcagaaataaggtttcctcggagacatccattccaaatgaggctaaggcatcagcagctgttctaccatcttatctaatgagatgtctgagagcctcttagcctggactgttgtgagatgggctgagaaagtccctttgaacctgaacaggataatgcctgcgaagggagtgtgcaattctattttcctgttttccaggaacctatcaaccttttggtggaaattgaggtattgtccatgattgcatggagctcagcaacaaggtacctgttctctacttgtttgcatttctcaaggggaagattcttaacaggtatcagcttcgtcatgacatctaacaattttatttataatgttcaagttatttagttaaatctacacgaccatgaaatttgtcaaagcatttcctagtcctatattatctagttttacttctacgtctatctgttctttgattgtgcgctccatctattctttgatgaagcttgcgagttctactttctagacctattgagataggaccttttggcacggtacaatatcaatactgttttggtgaagggagtatatttacagtagtacaaaaggagatggctaaacctgctacaattttttttagatggacgatgtttgtcaattgagggtgggaagtaccgaccagattgcatttgacttcatccggccatccggtctattaataaataaccaaggaagtggttcttggcaactaccttttcccgttcttgtggtttttttttcaaataggcgtgcttaaatatttcggtcttttaaattaatattataaaattctcgtctgaatatttttcaagtctagtattatgcatgataatttacatatgcatgttgtctgaaagcagaagcagattctcaaggcacctgctaattcaaaaccaaaaataggttgtaacttcgaagttgctgcattggtgaagaataatatattttagttttactctcagctgattgcttgtttgtcatgtttcactccatgcttcactctcggctgtattctgcattataccttgtttatatccaactgccatggccgatgtgagatgttaaatgtgtcggtgaagtaaataattctgctgtggcttttccgctttctgtggttccaatgggctattcccatttgcaaatattgtgtccataaggcggatttccaaatcctgcggagttgaggtgggcacctaatttcttgacgtttctgatcaatttctcatgttatcacaatgtcccttataagtgcttcccgagcagaattgagatgttaattattataaacttccattttggtttatctgaaaccaggaattctatatgaatgtctccttgagtatagtttcattattgtttaaaag

SEQ ID NO: 200938 - DNA, 1317 bp, Zea Mays
atatgtggttggccatcataagagaatctccttaaaaatgaacaataacggcactgtggaaggcaaggtccttgacccctgaacaaaaggtagagcttgtagaagaggaatcagaaacagaagagttccaaaacgtggaaggagaatctttcttagggatagaggatgcccaaatgtcaggagtgttctcatccacaaaaccttttgatgtaacaacactcatgggcatatttgagggtggtcctttggagtgccgggtgatggagaaagttggctgtatggactactctgttacagcatgggaacctgtcagagctgatatttaccagaggcaagttcattataaatttgacaagaaatcagtacggcatggaggagaagcgatgagcactcagcagaagtcccctttgcctaataagaatggctggcttgttgaagaagtgatgacgcttgaaggtatccctgttggtgaatgtttcaatctccatattcgataccaactagagaacaatgtatccaagcagaagacttgcactatccaggtatctattggcatagtatggttaaagaactgcaagaaccgaaaaaagatcacgcatgatatagcaaccaatgcatcttctcgcctgaagaagatattcagccaatttgagaaggaacctataccagcaaagtaggaaccttgtttttgtctgcgtcctacttttgctgctgcacatatgctagcactatgtattttcttgctgcccatgctgagcaaagatcagggacatagtgaggaagttgcaacccaaggcaaagccctcaagaagacttttataaagcaaccgtattgcaagattttagattagagaactgtacagcctggaatgtggtttagcttaaccatgtatacataacattcaaacattgtttttgacttctacaaaaagctacaatccataaagacaaaacactataaaagcacaacaagtaggtactgattaaagctaagtgctaactaatccttgttagcttttggatgtacctaaacttgcaaaaaccttcaaattatctcttaccctattttgaaggtggttttcttttttagttaaaaatggtgatgttgggggccttcggcttccgaaggtcctcaaaaacgtgatttgacaatgttttctaagtatgcgagcaggtatcttcagaatcaggaattaggttgcgggtatacagaagcatggtcaagacgaagcttgactgggacggcgatcatgacgaaggataagatgatcacgaagctatatgcagaagagcttcggcatcacggcggaaagggga

SEQ ID NO: 200939 - DNA, 1046 bp, Zea Mays
cagatcgagaagaccgtccagtacctcatcgcctcagggatgacggagacgaacccgtacatgggcttcgtctacacgtcgttccaggagcgcgccaccttcatctcccacggcaacacggcgcgccacgccaggcggtacggcgacaccaagctggcgcagatctgcggcacaatcgccgccgacgagaagcgccacgagtcggcgtacgagcggatcgtcgagaagctgttcgaggtggacccggactacacggtgcgcgccttcgcggacaccatgaggaagaaggtggccatgcccgcccacctcatgtacgacggccaggacgacgggctgttcgcgcgcttcagcgctgtcgcgcagcgcatcggtgtctacacggccagggactacgtcgacatcctcgagttcctggtccgccggtggggcgtccaggaactcacggggctgtccggggaaggccgccgcgcgcaggagttcgtgtgcgagctggggccccggttcaggaggctggaggagagggcgcacgacaacaaggccaaggatccggagttcgcgccattcagctggattcacgggcgccaggttcagctttgattaaagatgatgactgggggattcgccgactctctccgtcctcagatgatatgttgtactgtactagcatataactaagaattgattgaagttgctgtaaaatgcatcaaagtacatccgctcttgtttttggtgctagagcattgtaaaatgcagggaggccgggagagcgatgaaaacagaatggaagatatattgcctcagcgatgcacgcaagtactagtctgtatgcaacaataataattcatgaaatcagataccgaccacagacttacaaatctacagttggcgcccagttgatgtcaaacaaagtgagaaaccaagagttttgagtatacattgtactggttttttacgactcaaaggaccccaaagaaaggattggtgatggcagaattcagctcggctccagctgtgttcaggatagccttgtcgactttttcccttgc

SEQ ID NO: 200940 - DNA, 1771 bp, Zea Mays
atcatgcattcttcatggcgacggtgaccagtttgagcttctcaggcagctgcagacacgggccacgctatactgcccggccggcggccagttctcgtagtagtcagctacttaatgatcagctagctagagcatcgcggagattacaagtggcggcgggcatggcggtggcggcgttcccttcctgcggcgccttcgcccctccttgcctagtgagtacaaggagagccttctcctcggtggtggccatggcttccgcagcccccaggaagcccttcgcccctcctcgcgaggtacaccgccccgtggcgcactcgctgcccccgcagaagcgggagatcttcgagtcgctcgagtcgtgggcggcggacaacatcctggtgctcctcaagcccgtggagaggtcctggcagccgcaggactacctgccggacgccgcctccgagtccttcgacgacgaggtccgggagctgcgagagcgcgcccgggagatccccgacgactacttcgtctgcttcgtgggcgacatggtcaccgaggaggcgctgccgacgtaccagaccatgctcaacaccctggacggcggcgtccgcgacgagaccggcgccagctcgaccagctgggcggtgtggaccagggcgtgggccgccgaggagaacaggcacggcgacctcatgaacaaatacctcttcctgacggggagggtggacatgaggcagatcgagaagaccgtccagtacctcatcgcctcagggatggatcccaagacggagacgaacccgtacatgggcttcgtctacacgtcgttccaggagcgcgccaccttcatctcccacggcaacacggcgcgccacgccaggcggtacggcgacaccaagctggcgcagatctgcggcacaatcgccgccgacgagaagcgccacgagtcggcgtacgagcggatcgtcgagaagctgttcgaggtggacccggactacacggtgcgcgccttcgcggacaccatgaggaagaaggtggccatgcccgcccacctcatgtacgacggccaggacgacgggctgttcgcgcgcttcagcgctgtcgcgcagcgcatcggtgtctacacggccagggactacgtcgacatcctcgagttcctggtccgccggtggggcgtccaggaactcacggggctgtccggggaaggccgccgcgcgcaggagttcgtgtgcgagctggggccccggttcaggaggctggaggagagggcgcacgacaacaaggccaaggatccggagttcgcgccattcagctggattcacgggcgccaggttcagctttgattaaagatgatgactgggggattcgccgactctctccgtcctcagatgatatgttgtactgtactagcatataactaagaattgattgaagttgctgtaaaatgcatcaaagtacatccgctcttgtttttggtgctagagcattgtaaaatgcagggaggccgggagagcgatgaaaacagaatggaagatatattgcctcagcgatgcacgcaagtactagtctgtatgcaacaataataattcatgaaatcagataccgaccacagacttacaaatctacagttggcgcccagttgatgtcaaacaaagtgagaaaccaagagttttgagtatacattgtactggttttttacgactcaaaggaccccaaagaaaggattggtgatggcagaattcagctcggctccagctgtgttcaggatagccttgtcgactttttcccttgc

SEQ ID NO: 200941 - DNA, 1468 bp, Zea Mays
acggagggagaggtacgcacatcgaaaaccaccgattcactccatcgtccgccgaggcgctcgcgcacgtcgagaagcaccaggcagccttaaggccgaggcatccacgtttctggaggaccatgtcattctctggagtatccttcgttggaaacagctatctgccgccatcatctgcccctcccacacacgtctattccggcggctaccatctgctcgtggtcaatggctactcgcgcacaaagcaggacacccccaacggcagctgcctacggtcaaacccgttcaagatcggaggccatcgttggaccatcgagtgctaccctaacggctacgaacaggagaacagcgactacatatccttttatctcgttcttgacgatttcaacgtcgtcgagcctgtcgtggcgcagtatgcgtttagcttctttggccaggttcagccgtcagagtcatcgttgttgctcgccgccggtgcaaggggaccgtaccgtttctctagcacggacgcattcagcttcccctatttgatgaatagacagcagttcgagaaatcgaagcatctcagggacgacagtttcactatcaggtgtgacgtggccatcgtcaagaatgtcaacatcggggaagcggccgccgccaggcggttcgttaccgtgcctcctccttccattctgcaccacctcggcaatctcctcctgtcgcaggtgggcgccgacgtgacatttcaggtcggcggcgagaagttcatggcgcaccggtgcgtgtttgccgcccgctccgctgtcttcagggccgagctctttggctccatgaaggagggggcggcagacaccgtggtgcacatccatgacatggacgccaaggtattcaggctgttgctcggtttcatgtacaccgatcatgtgccggacattgaagaggaggaggaagaagaagaagagtatatgtggcaggacctgcttgtggctgcagatagatatgacatcccgaggcttcgactgatctgtgagtacatgatgtgctcatacatcgacacggatacggtggcagatatgcttgagcttgctgacaagcaccggtgcaatggactgaaggatgcatgcttggatttcctcaactctccgccaaatctgcagcaagtaatggcggctggcgacctagatgatctcgctatcagctgtcctgctgtccttatagaacttatcgccaagcttacgtcgtctcttaagcttgataaatgataatatggttgtaggttttagtttatgaaaaaaaatcattttttattttacattgagagatcattggattacgaatttacggtgtcaaattataattctatgcatgcaaactcgcaaacccgcacctagagagatgttattgttttttttttgcagttcatgtttatatttttttagagggagggtataagttcatgtttatgttgaccctactaggactggag

SEQ ID NO: 200942 - DNA, 1482 bp, Zea Mays
tttctgtccccctcgccatttcccacacagtgtggcgagagccggccgcgtggcggatcatcgtcgccgcccctcgcatcctcgtcgtgccgccgcaccgcaagggttgctcgtgttcgacgggatgccaccgctgggacccgggagagattttgctgttgtagaaggttgtgtggaagttggatctcttttccattttggcatcagttctgttattatctgaaggctgtgcatcagtcctggatgcagctaatgtactgcagtaaatgataatctctggaaatttcgtcaggttctcctttgctcagaaaagctggctcaagaaccactagcaaggattttaaaatggcaaacattgcattcaaaaggcgagttatcaggctcactgctagccttttcttgaagaccatgcttgttcataaccttgaggaggcagtggcttcttggaaagcaaggaaatcaagtggttgattgcctgatggatgtatcatgggcattttgttggtccagtcttagttggcccccctgtgtgtgccagttcgtgggtcgcctctgctacgcatttttccagggggaccatctcttatatctgctgcatcctcatcttggtagctttcaatctcgtgatggttacttctagtgccccaccatcatggcatttccatgtgtattctttctttggtagccccatgttttgcatccatgcagcgattctgcaatgaaactgctaggttgaacatcaaaagggaacaaaaaggtggagaccggctttaaaagattaggacatgaaaatccccaggtgtcagcatcgcttatgcggtatgcccccatcatttctgatgaaccgcaggatagaacagtagaagcagggagatgctggagcgagggaacaaaatccccatggggatattgcattgtttcttcaggaggcaggggctttggtgcatgtagccgtacatcgccgttggtgtctccggctccggccccgggccgcagtcgaggtttacgccgaacagccggagccgccgcgacggtggcggcggtgccgaagctgcactgcagctcctgttgtctctgtcggactgagattctcctgcaattgttcaccccacagcagtgcataagaggacaacctgtgcctgcctccgtcgaggacgctatatggcggacaccaaccaactgcaaattaaaagagagaatacttctctaatctctctgtgttagagagcacctcctgttgttggaggatcgggatgcaggacgacgcaagagaattggggatatgtgtgacgtgattattaatctcacgtggcattatgctttctgctcctcctcctcctctgtggcttcaagttcccaagcatcacaatattcgagcattggaatgggaagtatatataggatcaagattggacctggacaaagatctgcccgcccttagcctgtccgtccaatttccgaaagcctttcgactcagacggt

SEQ ID NO: 200943 - DNA, 998 bp, Zea Mays
agtgcacgccaagcagaaccggtttacctcaccctatgcgtggcgctggcctcgtcggcggtgggcgcgtacctgcacgtcgtctggaacatcggcgggatgctgaccatgctcggctgcgtcggcagcatcgcctggctcttctcggtgcccgtctacgaggagaggaagaggtacgggctgctgatggcggctgccctcctggaaggggcgtcggttggacccctcatcaagctcgccgtggaatttgacccaagcatcctggtgacagcgttcgtggggactgccattgcgttcgcgtgcttctcttgcgcggccgtggtggccaagcgcagggagtacctctacctgggcggactgctatcttctggcctctccatcctgctctggctgcagttcgccgcctccatcttcggccaatccactagcagcttcatgtttgaggtctactttgggctgctcatcttcctgggctacatggtgtacgacacgcaggaggtcatcgagagggcgcaccacggcgacatggactacatcaagcacgccctcaccctcttcaccgacttcgtggctgtccttgtccgcatccttgtcatcatgctcaagaacgcggctgacaagtcggaggacaagaggaggaagaggaggaggtggtgaaaatctgtgtgcgaacacagcactcaagggaagggaaggccactggtgcgtctgaaatgaagctcccacataactaggtgtatacatacatatataggagcgaggagttactttggggtggaactgaactgtgcaagtgtcgttcctttgttttctcttgctctgtcatcagtgagcctgttgatagttttgtcctgtcctgtgaatgaatgtgacaaatctccaccagtttagcgtctggcattctgaccaaatgggaggcactgttccatcctactactagcaacacggcttcgtttcagtttctttagctgcaggacaactacgtagatcgaatctcc

SEQ ID NO: 200944 - DNA, 418 bp, Zea Mays
gtgctattggtatgtcgaggagcttcaaccaggaatgatatatgtgttctctgtccactgatgcggctggagcgtcatgtcaacggctcaccctccccctaacaaattaaactagactgatgagtggagcttcatgttgggatgatccatgcaccttttaagttttggaacgtcgtactcaaatgtagcttgtgttagttgaacctatcgtactttcttttggaattaaattatatgatatttaaacatgtttgatgtttaatacttgtgttggatgctttatgcttcaaatatatatgcattatacaaaaagttgtgtacacttatgttgtttgatgaaattgtatgcacgatttggattgaattcaattgaatgctgattttcattaattgatgatgaattaaacgtcataaatag

SEQ ID NO: 200945 - DNA, 1376 bp, Zea Mays
gccatgcactgtccctgcgccgcagttgactccgtttgtctcgcggtctcgcccccgtctcgctctccgacgactggtgtgccgccgccgtcctgtgccaggtgctaaggccttcgtcagtatcttcgccggcgacgagcacccaccagctccttgatttctagaaagaaaggaggggttgttttcctacatcttgatcatttggagatttttctgtcattctaatggaggtaaaggaagtatgtgtccaagatatgttggttgacctggagaaaggcaagtgcttgctacccatagaggacaatagtgggatgaaggttaattcaatagctgggcatgcaagtacaatgcggcccagctcatgggatgatcttgtagcactgaaggatgataagagtcaccacatatgttgtttctcttcacaccgtcaagattcatctgttaaaagtggagagcctatgaaagctgaaggggagatcaaggttgggattttggataagtcaactgctgataaggaaaataaaaaatggtataagaagccgccacgacctccaagatcacagactacttcaccattagaccctgctgatcagaagctcatcagtgcactatcggagcttgcggtgttaaagaaggctaggattgagcgtatgaaggcattgaagaagatgaagaattccaaaccagcatcttccattgggaacttggtggctttgatcattaccgtcatcttatgtttcttcatactttggcaaggcttgctgatgaaataaaacactgtaagtcgttagactacttcagccccgagtgatcatgtcagaaataagactgcctaaaactcaccgccttcaattatacagggtttttctcaagtaatactggagtggctacgatgatggaaatccatggtgagatcaggagtgtcactgaataattagattgctgggcttcgttcgtcatagtcgcgtcgtggcgagtcccctctgattttgcatatgctccacggaatcaccgttgtccggtttgctccccaggccctgtacagtgtaaacttctgaaagttgaaattgccctttgcagaatactggtgttgtaaattatcactggttgattggtgatattttgtaactgttttttttaacaagggctgttattttgttgaagccatttaggaagagaaaactattgcttttttagtgacatcgtggagttaatttgcttggatgaattttaagaaactagtgcaactggttaggtatctgtatattgctacggtttctataaatcacataggtagatcttatttagatgagatagtttcagacatgtttcaaacctttacgatgagcatccgatggtttgtgagaatggtggcg

SEQ ID NO: 200946 - DNA, 1988 bp, Zea Mays
catctttgctgcaagcctgcaacaggtcttgatgaccacggcgttgtggcagacatttgttggaactcccttttggatggcacctgaggttattcaaaattctgaagggtacaatgagaaggcagatatctggtctttaggtatcactgccattgaaatggctaaaggtgaaccccctctggcagatattcatcccatgagagttcttttcatcatacctcgtgaaaatcctccgcagcttgatgagcatttctcgaaaccaatgaaagagtttgtctcactatgtttaaagaagaatccagcagagaggcctagtgccaaggagcttcttaagcatcgtttcataaaaaatgcccgaaagactccaaagcttttggagcgaataagagagcggccaaaatttgcagcaaaaagcatggatgccacacaaaatgggcaaacacatgatgaagaggaggattttggtacaggcactatcaaggtcaataggacaaaagatacagctccatctttgagtcaaggaacagttaggaaatctgcagtcagagatttttctgatagatcagagggcacaggaactgtccgagttgtttcaaggcctcctcaaatcgcctccacgaaggatggtagatctgatatgcctcaaagtccaaaagcaccaatacgcacagctgatcgagaaaatcagtggaggtcatcagggactggatctgaagaatctctctctctcagagatactcagagcggacgagggagagtagaaagttctactgatgacaatgatcactctgtaagtgggtcaggaactgttgtgttacgctctccaagagcatctcagttgtactcaacagctagcaaccacagtgccaagcctcccagcagattctcctcttatgaagatatgtctaatagtgggacagttgttcggacccaaaatgaagacccagaaactccacgatcttcaaggtcaaggctggggatccaagaaaaaacatcaaatgctcctcttgaggatagtgccattaaccttgcagaggcaaaggctgctttgcaggctgggttaagaaagggaaatgctcgagaaagaccttttatcaacaggcatgaaaagggatcacatgagcatagatcttctggagtaaatagtcaagaggttcaaagcgaggatgtggacacgcagaaaggtcacaaattacggcaattacctgatgggcagtcagcctctcgtgctagttctgtagcttcacctgcagtctcatcattgctactcccttccctgaaagaggctactggtgacaagtttgatcggcctgctgttcatgccttccttgattccttgatggatttagaacgtgatatacctggatcatgcgaagtactggttggcagattgctacaccggctagggagctcaaaggattcctcattgcaaggtcttcaggagacggcgatgtcaattttcactaaggaacctgaacctccctctgaaaaagcaggcgacaagaagttagctaatatgccaccattggctgctcctaccgtgagcccactggcaaggttccttctcacaaggtggcaaaaccaagtttctcaagatcttaactctgtttgatccctgcgatgcagaaaagtgatttcatgttcgattcggtgtataattaatatttttcagtgtacataatgcaaactttagaactttatttcatccagtcggtctcaaccacctgttatttcatttgttttgttcatggcgaatactccctctgtccccaattaaaatttgttttacaattaatgtatgtgttgtatatatatgtttagtttcataatcatccatatgaatatggatgtaaaaatctagagctagtacgagtactatttttgggctagtttgagaacgtcattttccaaggattttcattttctcaagtaaaattagtttattttttcttaggtcatgtttttctctttattttgaggaattggaa

SEQ ID NO: 200947 - DNA, 2033 bp, Zea Mays
cacggagcaaaatggccatgtggtttgacctgtttatgattgctgcttacactggcgtttacaagttcatcatggtcacatgtggcttgagggtgtatgtggttcatgacatttgttggaactcccttttggatggcacctgaggttattcaaaattctgaagggtacaatgagaaggcagatatctggtctttaggtatcactgccattgaaatggctaaaggtgaaccccctctggcagatattcatcccatgagagttcttttcatcatacctcgtgaaaatcctccgcagcttgatgagcatttctcgaaaccaatgaaagagtttgtctcactatgtttaaagaagaatccagcagagaggcctagtgccaaggagcttcttaagcatcgtttcataaaaaatgcccgaaagactccaaagcttttggagcgaataagagagcggccaaaatttgcagcaaaaagcatggatgccacacaaaatgggcaaacacatgatgaagaggaggattttggtacaggcactatcaaggtcaataggacaaaagatacagctccatctttgagtcaaggaacagttaggaaatctgcagtcagagatttttctgatagatcagagggcacaggaactgtccgagttgtttcaaggcctcctcaaatcgcctccacgaaggatggtagatctgatatgcctcaaagtccaaaagcaccaatacgcacagctgatcgagaaaatcagtggaggtcatcagggactggatctgaagaatctctctctctcagagatactcagagcggacgagggagagtagaaagttctactgatgacaatgatcactctgtaagtgggtcaggaactgttgtgttacgctctccaagagcatctcagttgtactcaacagctagcaaccacagtgccaagattctcctcttatgaagatatgtctaatagtgggacagttgttcggacccaaaatgaagacccagaaactccacgatcttcaaggtcaaggctggggatccaagaaaaaacatcaaatgctcctcttgaggatagtgccattaaccttgcagaggcaaaggctgctttgcaggctgggttaagaaagggaaatgctcgagaaagaccttttatcaacaggcatgaaaagggatcacatgagcatagatcttctggagtaaatagtcaagaggttcaaagcgaggatgtggacacgcagaaaggtcacaaattacggcaattacctgatgggcagtcagcctctcgtgctagttctgtagcttcacctgcagtctcatcattgctactcccttccctgaaagaggctactggtgacaagtttgatcggcctgctgttcatgccttccttgattccttgatggatttagaacgtgatatacctggatcatgcgaagtactggttggcagattgctacaccggctagggagctcaaaggattcctcattgcaaggtcttcaggagacggcgatgtcaattttcactaaggaacctgaacctccctctgaaaaagcaggcgacaagaagttagctaatatgccaccattggctgctcctaccgtgagcccactggcaaggttccttctcacaaggtggcaaaaccaagtttctcaagatcttaactctgtttgatccctgcgatgcagaaaagtgatttcatgttcgattcggtgtataattaatatttttcagtgtacataatgcaaactttagaactttatttcatccagtcggtctcaaccacctgttatttcatttgttttgttcatggcgaatactccctctgtccccaattaaaatttgttttacaattaatgtatgtgttgtatatatatgtttagtttcataatcatccatatgaatatggatgtaaaaatctagagctagtacgagtactatttttgggctagtttgagaacgtcattttccaaggattttcattttctcaagtaaaattagtttattttttcttaggtcatgtttttctctttattttgaggaattggaa

SEQ ID NO: 200948 - DNA, 2145 bp, Zea Mays
gatctcttcaagctggtcctcctctggatgaaatgtctattgcatgcattctgagggacttgttacacgcaattgagtatctacattccgaaggaaaaattcaccgtgatattaaagcggcaaatatcctcctcactgaaagtggagacgtgaaggttgcggactttggtgtttctgcacagctgactaaaacaatgtctaggaggaagacatttgttggaactcccttttggatggcacctgaggttattcaaaattctgaagggtacaatgagaaggcagatatctggtctttaggtatcactgccattgaaatggctaaaggtgaaccccctctggcagatattcatcccatgagagttcttttcatcatacctcgtgaaaatcctccgcagcttgatgagcatttctcgaaaccaatgaaagagtttgtctcactatgtttaaagaagaatccagcagagaggcctagtgccaaggagcttcttaagcatcgtttcataaaaaatgcccgaaagactccaaagcttttggagcgaataagagagcggccaaaatttgcagcaaaaagcatggatgccacacaaaatgggcaaacacatgatgaagaggaggattttggtacaggcactatcaaggtcaataggacaaaagatacagctccatctttgagtcaaggaacagttaggaaatctgcagtcagagatttttctgatagatcagagggcacaggaactgtccgagttgtttcaaggcctcctcaaatcgcctccacgaaggatggtagatctgatatgcctcaaagtccaaaagcaccaatacgcacagctgatcgagaaaatcagtggaggtcatcagggactggatctgaagaatctctctctctcagagatactcagagcggacgagggagagtagaaagttctactgatgacaatgatcactctgtaagtgggtcaggaactgttgtgttacgctctccaagagcatctcagttgtactcaacagctagcaaccacagtgccaagcctcccagcagattctcctcttatgaagatatgtctaatagtgggacagttgttcggacccaaaatgaagacccagaaactccacgatcttcaaggtcaaggctggggatccaagaaaaaacatcaaatgctcctcttgaggatagtgccattaaccttgcagaggcaaaggctgctttgcaggctgggttaagaaagggaaatgctcgagaaagaccttttatcaacaggcatgaaaagggatcacatgagcatagatcttctggagtaaatagtcaagaggttcaaagcgaggatgtggacacgcagaaaggtcacaaattacggcaattacctgatgggcagtcagcctctcgtgctagttctgtagcttcacctgcagtctcatcattgctactcccttccctgaaagaggctactggtgacaagtttgatcggcctgctgttcatgccttccttgattccttgatggatttagaacgtgatatacctggatcatgcgaagtactggttggcagattgctacaccggctagggagctcaaaggattcctcattgcaaggtcttcaggagacggcgatgtcaattttcactaaggaacctgaacctccctctgaaaaagcaggcgacaagaagttagctaatatgccaccattggctgctcctaccgtgagcccactggcaaggttccttctcacaaggtggcaaaaccaagtttctcaagatcttaactctgtttgatccctgcgatgcagaaaagtgatttcatgttcgattcggtgtataattaatatttttcagtgtacataatgcaaactttagaactttatttcatccagtcggtctcaaccacctgttatttcatttgttttgttcatggcgaatactccctctgtccccaattaaaatttgttttacaattaatgtatgtgttgtatatatatgtttagtttcataatcatccatatgaatatggatgtaaaaatctagagctagtacgagtactatttttgggctagtttgagaacgtcattttccaaggattttcattttctcaagtaaaattagtttattttttcttaggtcatgtttttctctttattttgaggaattggaa

SEQ ID NO: 200949 - DNA, 2286 bp, Zea Mays
gatcaacttacccggtcgatactgagatatctgttttgtcacaatgccggtgcccatatattaccgattattacggctcttatcttcaccagactaaattgtggatagtaatggaatacatggctggtggttctgttgctgatcttcttcaagctggtcctcctctggatgaaatgtctattgcatgcattctgagggacttgttacacgcaattgagtatctacattccgaaggaaaaattcaccgtgatattaaagcggcaaatatcctcctcactgaaagtggagacgtgaaggttgcggactttggtgtttctgcacagctgactaaaacaatgtctaggaggaagacatttgttggaactcccttttggatggcacctgaggttattcaaaattctgaagggtacaatgagaaggcagatatctggtctttaggtatcactgccattgaaatggctaaaggtgaaccccctctggcagatattcatcccatgagagttcttttcatcatacctcgtgaaaatcctccgcagcttgatgagcatttctcgaaaccaatgaaagagtttgtctcactatgtttaaagaagaatccagcagagaggcctagtgccaaggagcttcttaagcatcgtttcataaaaaatgcccgaaagactccaaagcttttggagcgaataagagagcggccaaaatttgcagcaaaaagcatggatgccacacaaaatgggcaaacacatgatgaagaggaggattttggtacaggcactatcaaggtcaataggacaaaagatacagctccatctttgagtcaaggaacagttaggaaatctgcagtcagagatttttctgatagatcagagggcacaggaactgtccgagttgtttcaaggcctcctcaaatcgcctccacgaaggatggtagatctgatatgcctcaaagtccaaaagcaccaatacgcacagctgatcgagaaaatcagtggaggtcatcagggactggatctgaagaatctctctctctcagagatactcagagcggacgagggagagtagaaagttctactgatgacaatgatcactctgtaagtgggtcaggaactgttgtgttacgctctccaagagcatctcagttgtactcaacagctagcaaccacagtgccaagcctcccagcagattctcctcttatgaagatatgtctaatagtgggacagttgttcggacccaaaatgaagacccagaaactccacgatcttcaaggtcaaggctggggatccaagaaaaaacatcaaatgctcctcttgaggatagtgccattaaccttgcagaggcaaaggctgctttgcaggctgggttaagaaagggaaatgctcgagaaagaccttttatcaacaggcatgaaaagggatcacatgagcatagatcttctggagtaaatagtcaagaggttcaaagcgaggatgtggacacgcagaaaggtcacaaattacggcaattacctgatgggcagtcagcctctcgtgctagttctgtagcttcacctgcagtctcatcattgctactcccttccctgaaagaggctactggtgacaagtttgatcggcctgctgttcatgccttccttgattccttgatggatttagaacgtgatatacctggatcatgcgaagtactggttggcagattgctacaccggctagggagctcaaaggattcctcattgcaaggtcttcaggagacggcgatgtcaattttcactaaggaacctgaacctccctctgaaaaagcaggcgacaagaagttagctaatatgccaccattggctgctcctaccgtgagcccactggcaaggttccttctcacaaggtggcaaaaccaagtttctcaagatcttaactctgtttgatccctgcgatgcagaaaagtgatttcatgttcgattcggtgtataattaatatttttcagtgtacataatgcaaactttagaactttatttcatccagtcggtctcaaccacctgttatttcatttgttttgttcatggcgaatactccctctgtccccaattaaaatttgttttacaattaatgtatgtgttgtatatatatgtttagtttcataatcatccatatgaatatggatgtaaaaatctagagctagtacgagtactatttttgggctagtttgagaacgtcattttccaaggattttcattttctcaagtaaaattagtttattttttcttaggtcatgtttttctctttattttgaggaattggaa

SEQ ID NO: 200950 - DNA, 2663 bp, Zea Mays
cacgagtcctgacctccctacccccatctccagcccctccgacgcggccccaccatctccacctcccggccgaacagacacgaaccagggaccaacgacaaatctcgcgacctctcgaaatgagcggtaccggaagcagcgtgtagcgcgagacgaacgccgccctaatccaaaccctagaggcgggaggaagacggcgagcgaacgcagcaacgattcctgatctctaatatcctagcacggcggcggccgcggccggatctaggggtaacgaaggatgtcggactcggcatcgatggcggccgccatcgaggcgcggttcagcagccgcgacctcatcggctgcggttccttcggcgacgtctataaaggtgaggatgacattgaagacatccaaaaggagatatctgttttgtcacaatgccggtgcccatatattaccgattattacggctcttatcttcaccagactaaattgtggatagtaatggaatacatggctggtggttctgttgctgatcttcttcaagctggtcctcctctggatgaaatgtctattgcatgcattctgagggacttgttacacgcaattgagtatctacattccgaaggaaaaattcaccgtgatattaaagcggcaaatatcctcctcactgaaagtggagacgtgaaggttgcggactttggtgtttctgcacagctgactaaaacaatgtctaggaggaagacatttgttggaactcccttttggatggcacctgaggttattcaaaattctgaagggtacaatgagaaggcagatatctggtctttaggtatcactgccattgaaatggctaaaggtgaaccccctctggcagatattcatcccatgagagttcttttcatcatacctcgtgaaaatcctccgcagcttgatgagcatttctcgaaaccaatgaaagagtttgtctcactatgtttaaagaagaatccagcagagaggcctagtgccaaggagcttcttaagcatcgtttcataaaaaatgcccgaaagactccaaagcttttggagcgaataagagagcggccaaaatttgcagcaaaaagcatggatgccacacaaaatgggcaaacacatgatgaagaggaggattttggtacaggcactatcaaggtcaataggacaaaagatacagctccatctttgagtcaaggaacagttaggaaatctgcagtcagagatttttctgatagatcagagggcacaggaactgtccgagttgtttcaaggcctcctcaaatcgcctccacgaaggatggtagatctgatatgcctcaaagtccaaaagcaccaatacgcacagctgatcgagaaaatcagtggaggtcatcagggactggatctgaagaatctctctctctcagagatactcagagcggacgagggagagtagaaagttctactgatgacaatgatcactctgtaagtgggtcaggaactgttgtgttacgctctccaagagcatctcagttgtactcaacagctagcaaccacagtgccaagcctcccagcagattctcctcttatgaagatatgtctaatagtgggacagttgttcggacccaaaatgaagacccagaaactccacgatcttcaaggtcaaggctggggatccaagaaaaaacatcaaatgctcctcttgaggatagtgccattaaccttgcagaggcaaaggctgctttgcaggctgggttaagaaagggaaatgctcgagaaagaccttttatcaacaggcatgaaaagggatcacatgagcatagatcttctggagtaaatagtcaagaggttcaaagcgaggatgtggacacgcagaaaggtcacaaattacggcaattacctgatgggcagtcagcctctcgtgctagttctgtagcttcacctgcagtctcatcattgctactcccttccctgaaagaggctactggtgacaagtttgatcggcctgctgttcatgccttccttgattccttgatggatttagaacgtgatatacctggatcatgcgaagtactggttggcagattgctacaccggctagggagctcaaaggattcctcattgcaaggtcttcaggagacggcgatgtcaattttcactaaggaacctgaacctccctctgaaaaagcaggcgacaagaagttagctaatatgccaccattggctgctcctaccgtgagcccactggcaaggttccttctcacaaggtggcaaaaccaagtttctcaagatcttaactctgtttgatccctgcgatgcagaaaagtgatttcatgttcgattcggtgtataattaatatttttcagtgtacataatgcaaactttagaactttatttcatccagtcggtctcaaccacctgttatttcatttgttttgttcatggcgaatactccctctgtccccaattaaaatttgttttacaattaatgtatgtgttgtatatatatgtttagtttcataatcatccatatgaatatggatgtaaaaatctagagctagtacgagtactatttttgggctagtttgagaacgtcattttccaaggattttcattttctcaagtaaaattagtttattttttcttaggtcatgtttttctctttattttgaggaattggaa

SEQ ID NO: 200951 - DNA, 2840 bp, Zea Mays
caaacacgagtcctgacctccctacccccatctccagcccctccgacgcggccccaccatctccacctcccggccgaacagacacgaaccagggaccaacgacaaatctcgcgacctctcgaaatgagcggtaccggaagcagcgtgtagcgcgagacgaacgccgccctaatccaaaccctagaggcgggaggaagacggcgagcgaacgcagcaacgattcctgatctctaatatcctagcacggcggcggccgcggccggatctaggggtaacgaaggatgtcggactcggcatcgatggcggccgccatcgaggcgcggttcagcagccgcgacctcatcggctgcggttccttcggcgacgtctataaagggtttgacaaggaactgaataaagaggttgctataaaagtcattgatttggaagaagctgaggatgacattgaagacatccaaaaggagatatctgttttgtcacaatgccggtgcccatatattaccgattattacggctcttatcttcaccagactaaattgtggatagtaatggaatacatggctggtggttctgttgctgatcttcttcaagctggtcctcctctggatgaaatgtctattgcatgcattctgagggacttgttacacgcaattgagtatctacattccgaaggaaaaattcaccgtgatattaaagcggcaaatatcctcctcactgaaagtggagacgtgaaggttgcggactttggtgtttctgcacagctgactaaaacaatgtctaggaggaagtgccttatcacggagcaaaatggccatgtggtttgacctgtttatgattgctgcttacactggcgtttacaagttcatcatggtcacatgtggcttgagggtgtatgtggttcatgacatttgttggaactcccttttggatggcacctgaggttattcaaaattctgaagggtacaatgagaaggcagatatctggtctttaggtatcactgccattgaaatggctaaaggtgaaccccctctggcagatattcatcccatgagagttcttttcatcatacctcgtgaaaatcctccgcagcttgatgagcatttctcgaaaccaatgaaagagtttgtctcactatgtttaaagaagaatccagcagagaggcctagtgccaaggagcttcttaagcatcgtttcataaaaaatgcccgaaagactccaaagcttttggagcgaataagagagcggccaaaatttgcagcaaaaagcatggatgccacacaaaatgggcaaacacatgatgaagaggaggattttggtacaggcactatcaaggtcaataggacaaaagatacagctccatctttgagtcaaggaacagttaggaaatctgcagtcagagatttttctgatagatcagagggcacaggaactgtccgagttgtttcaaggcctcctcaaatcgcctccacgaaggatggtagatctgatatgcctcaaagtccaaaagcaccaatacgcacagctgatcgagaaaatcagtggaggtcatcagggactggatctgaagaatctctctctctcagagatactcagagcggacgagggagagtagaaagttctactgatgacaatgatcactctgtaagtgggtcaggaactgttgtgttacgctctccaagagcatctcagttgtactcaacagctagcaaccacagtgccaagcctcccagcagattctcctcttatgaagatatgtctaatagtgggacagttgttcggacccaaaatgaagacccagaaactccacgatcttcaaggtcaaggctggggatccaagaaaaaacatcaaatgctcctcttgaggatagtgccattaaccttgcagaggcaaaggctgctttgcaggctgggttaagaaagggaaatgctcgagaaagaccttttatcaacaggcatgaaaagggatcacatgagcatagatcttctggagtaaatagtcaagaggttcaaagcgaggatgtggacacgcagaaaggtcacaaattacggcaattacctgatgggcagtcagcctctcgtgctagttctgtagcttcacctgcagtctcatcattgctactcccttccctgaaagaggctactggtgacaagtttgatcggcctgctgttcatgccttccttgattccttgatggatttagaacgtgatatacctggatcatgcgaagtactggttggcagattgctacaccggctagggagctcaaaggattcctcattgcaaggtcttcaggagacggcgatgtcaattttcactaaggaacctgaacctccctctgaaaaagcaggcgacaagaagttagctaatatgccaccattggctgctcctaccgtgagcccactggcaaggttccttctcacaaggtggcaaaaccaagtttctcaagatcttaactctgtttgatccctgcgatgcagaaaagtgatttcatgttcgattcggtgtataattaatatttttcagtgtacataatgcaaactttagaactttatttcatccagtcggtctcaaccacctgttatttcatttgttttgttcatggcgaatactccctctgtccccaattaaaatttgttttacaattaatgtatgtgttgtatatatatgtttagtttcataatcatccatatgaatatggatgtaaaaatctagagctagtacgagtactatttttgggctagtttgagaacgtcattttccaaggattttcattttctcaagtaaaattagtttattttttcttaggtcatgtttttctctttattttgaggaattggaa

SEQ ID NO: 200952 - DNA, 1065 bp, Zea Mays
tcagcgagctggatggcaacctgctgggatcaaacgacctggacaagtacacggcgagctggatcgaattgtctcacgttaacaacatcgggatcaccggctcgggcacgctggacggccaggggaccgccgtttatagcaagagcaagaccgacaacgtgaaggcgatgcccaacacactggtgctgtttcacgtgatcaacgccactgtcgccggaatcaaactactcaactccaagttcttccacatcaacatcgacaactcagagagcatcaccgtgaaggacgtgaacatcaccgcgcccgccgacgttgagaacacggacggcgtccacgtcggaggctcctccaagatcagcatcctcaactcgaccatcggcaccggcgacgactgcgtctcgattgggcccgggtgcaacggcgtcttggtggacagcatcacctgcggccccgggcagggcatcagcgtcggctgcctaggccgctacaaggacgagaaggacgtgagcgacatcacggtgcggaactgcgtgctcaagaacaccaccaacggcgtgcgcatcaagtcgtacgtggacgccgagtccgtgctgacggcctcccatctcaccttcgagaacatcaggatggaggaggtggccaaccccatcgtcatcgaccagtacttctgcccgcagaaggtatgccctggcaagcggagcaactcctcgcatgtctccgtcaaggacgtcacgttccgcaacatcaccggcacgtcgtccacgcccgaggccatcagcctgctctgctcggagacgcagccatgcagcggcgtctccctcatcgatgtcaacgtggagtacgccggcaagaacaacaaaaccatggccgtctgcagcaacgccaagggcaccgccaagggaagcatcgaggcactggcttgcctggagattgcactctgcgtgccatgaccacgtcaagggccacttccccgtcatgcagtgccgaccgtggatgtcgcgcgacgagtctagaaaagcttgatcgttcagctgctcagcatggcgggggaagcggatctcatgc

SEQ ID NO: 200953 - DNA, 1529 bp, Zea Mays
gtcatttcgtgtaaatagcagacggtgctcctctgtctcttgcaatcttccggaacatccatcgatctccccccagcggcgaggagagccggcggccacaggaaggagaaatggcttccgcacacaacgctctccgggtgtttttcatcctagccgtggtatgtgccgtatgcacagcgaaaaggacaggagccaacaaggaagaatcggcggcagcccccggtggcgctgctggaggcagcggcgggacgttcgacatctccaagctcggcgcgaccagcgacggcaagacggactgcacaaaggcagtccaggacgcgtggacgtcagcgtgcgaagcgaccggaagcgccacggtggtgatccccaagggcgactacctggtcggccctctcaacttcactgggccatgcaaggggagcaacatcgccatccagctggatggcaacctgctgggatcaaacgacctggacaagtacacggcgagctggatcgaattgtctcacgttaacaacatcgggatcaccggctcgggcacgctggacggccaggggaccgccgtttatagcaagagcaagaccgacaacgtgaaggcgatgcccaacacactggtgctgtttcacgtgatcaacgccactgtcgccggaatcaaactactcaactccaagttcttccacatcaacatcgacaactcagagagcatcaccgtgaaggacgtgaacatcaccgcgcccgccgacgttgagaacacggacggcgtccacgtcggaggctcctccaagatcagcatcctcaactcgaccatcggcaccggcgacgactgcgtctcgattgggcccgggtgcaacggcgtcttggtggacagcatcacctgcggccccgggcagggcatcagcgtcggctgcctaggccgctacaaggacgagaaggacgtgagcgacatcacggtgcggaactgcgtgctcaagaacaccaccaacggcgtgcgcatcaagtcgtacgtggacgccgagtccgtgctgacggcctcccatctcaccttcgagaacatcaggatggaggaggtggccaaccccatcgtcatcgaccagtacttctgcccgcagaaggtatgccctggcaagcggagcaactcctcgcatgtctccgtcaaggacgtcacgttccgcaacatcaccggcacgtcgtccacgcccgaggccatcagcctgctctgctcggagacgcagccatgcagcggcgtctccctcatcgatgtcaacgtggagtacgccggcaagaacaacaaaaccatggccgtctgcagcaacgccaagggcaccgccaagggaagcatcgaggcactggcttgcctggtctgatgatgaccttccttttgcatgcatgcatggagattgcactctgcgtgccatgaccacgtcaagggccacttccccgtcatgcagtgccgaccgtggatgtcgcgcgacgagtctagaaaagcttgatcgttcagctgctcagcatggcgggggaagcggatctcatgc

SEQ ID NO: 200954 - DNA, 2746 bp, Zea Mays
cggagaaggacacggggaacgcaacatggctgtggtcattgcctcattggagtgaaccggtggtgggcagtgcggagtgccagcccagccagcagtaaccgccgaagcaaccggtgaggagggaggggaggggctggccgcatccactctccccttccacttgcaggcattgcctgttctccactccagttcccagctccgcagctcgaggacggaacggagggagatagggccaggggaagggacggagagccccgtctccaattcacaacactgccacggccggagccggaggaggaaggcgccagccgtagtccacaggcaacgcaagggaatgccactgttctagtctcgctctcgcagatctgctccgccgcgccctgttcaccgggaattctggagctgagggcgcaggttcgagcagaagctcggagcatggccatggccgagggggagaagcaccatgcccggtgccggtggtaggtagggctctctgatatcgcaggcctttcacgcggcccggcccaaaggcttcccgtccgtaccgtcggctagccgaggacggaaaccgagatcgggtgattgcttgactcgggagctgagccgaggtcgcaatggcgtcgtgggacaacctcggagagctctccaacatcgcgcagctcacggggctggacgccgtcaagctcatttccctcatcgtcagggcggcgtccacggcgcggctgcacaagcgcaactgccgccgcttcgcgcagcacctcaagctcatcggcggcctgctggagcagctccgcgtgtcggagctcaggaagtacccggagacgcgggagccgctggagcagctcgaggacgcgctccgccggggctacctgctcgtcaactcctgccaggaccgctcctacctctacctcctcgccatgggctggaacatcgtctaccagttccgcaaggcgcagagcgagatcgacaattacctccgcctcgtcccgctcatcacgctcgtcgacaatgcccgcattcgggtcggtaatcggctttcatctctctcccttttctacccaagctgtttgtttacattcttctcacgcattcgggtaggctcctagactggatgtgggccttgtaggctttttcaaccagaaacactggaattcttatctgatggggatattctggtttatgcgcaccattctttggttctactagagtactggactactggtatcgatcggggtgcctagaatatcttctattcttcttttgaggttctaatagtcactaggggtggtttttctgcatgatctgattggattcttgttttctgttagttggccatgaagctggcacgaccaagaatctctgatgtttttgggtacttctttatgctgtcgttttcattgttcacgcacctgcaaagtgaacttgtagacagttgtaggttaagttgaattctgtatagtgttgccaattgttttgctccagtgaaatacatttttttttcttaactataccctgtttatcttattcttcatcttttcttttcctaggatcggcttgagtatattgagagggaccaatgtgaatattcctttgacgaggaagacaagaaagtgcaagatgctcttttgaatcctgacccttgctcgaatcctacaattgtgctcaagaagactctctcatgttcctatccaaacttgcctttcaatgaggccctccgaaaggaaagtgagaagcttcaggttgaacttcaaaggtcacagagcaacatggatctgggttcgtgtgaggttatccaacacctgcttggagtaaccaaaactgtggaatctacaattccagagaaagaaacaaatgttaaagctccagaaaagaagggttcaaactacagtgaatccaaaggagagactgcaaaatcgtttgatgatgatgacgactatcctaagaagcaaaacgatgactatcctaagaagcaaaaggaaacctgcagcacacaacgatgctcttcacaagttccatatggtcatgatcttgtctcaagtagaggatcgtacagcgatgaatggcatgcagatttacttggctgctgttcagaaccggctttgtgtttgaagaccttgttcttcccctgtggaaccttctcgagaattgcttcaatcgccaaggacaggccaatgtcttctggggaggcttgcaatgatattatggcgtactccctaatattgtcctgctgctgttatacatgctgtgtaaggagaaagcttcgtcaaaagttggacattgcgggaggctgctgtgacgacttcctttcacatctgctgtgttgttgctgcgcgcttgttcaagaatggcgggaagttgagattcgcggagcttatagcgaaaagacgaaggtcacaccaccagcatgccagtatatggagcactgaacagctgtatgcccgtacgggtagacccgaacttctgtaaagatattaacagaatatctgatatcgtactgcaagagcagtggtactacactgctcctgtgtagtgtttattcttactgtctattgttcgtcctggtcctggaacttgcatgtatatgttggggcatagcaccagagtatgtactctgtaaaaacacatcagttacaggctggtagagcctaacatcgcttaacaccgtcagttattggcaaaaaagttctttgtgcgtgtgcgtgtttaccttaatagcagttaaaaaaaagaagagctttagtcacag

SEQ ID NO: 200955 - DNA, 2698 bp, Zea Mays
cggagaaggacacggggaacgcaacatggctgtggtcattgcctcattggagtgaaccggtggtgggcagtgcggagtgccagcccagccagcagtaaccgccgaagcaaccggtgaggagggaggggaggggctggccgcatccactctccccttccacttgcaggcattgcctgttctccactccagttcccagctccgcagctcgaggacggaacggagggagatagggccaggggaagggacggagagccccgtctccaattcacaacactgccacggccggagccggaggaggaaggcgccagccgtagtccacaggcaacgcaagggaatgccactgttctagtctcgctctcgcagatctgctccgccgcgccctgttcaccgggaattctggagctgagggcgcaggttcgagcagaagctcggagcatggccatggccgagggggagaagcaccatgcccggtgccggtggtaggtagggctctctgatatcgcaggcctttcacgcggcccggcccaaaggcttcccgtccgtaccgtcggctagccgaggacggaaaccgagatcgggtgattgcttgactcgggagctgagccgaggtcgcaatggcgtcgtgggacaacctcggagagctctccaacatcgcgcagctcacggggctggacgccgtcaagctcatttccctcatcgtcagggcggcgtccacggcgcggctgcacaagcgcaactgccgccgcttcgcgcagcacctcaagctcatcggcggcctgctggagcagctccgcgtgtcggagctcaggaagtacccggagacgcgggagccgctggagcagctcgaggacgcgctccgccggggctacctgctcgtcaactcctgccaggaccgctcctacctctacctcctcgccatgggctggaacatcgtctaccagttccgcaaggcgcagagcgagatcgacaattacctccgcctcgtcccgctcatcacgctcgtcgacaatgcccgcattcgggatcggcttgagtatattgagagggaccaatgtgaatattcctttgacgaggaagacaagaaagtgcaagatgctcttttgaatcctgacccttgctcgaatcctacaattgtgctcaagaagactctctcatgttcctatccaaacttgcctttcaatgaggccctccgaaaggaaagtgagaagcttcaggttgaacttcaaaggtcacagagcaacatggatctgggttcgtgtgaggttatccaacacctgcttggagtaaccaaaactgtggaatctacaattccagagaaagaaacaaatgttaaagctccagaaaagaagggttcaaactacagtgaatccaaaggagagactgcaaaatcgtttgatgatgatgacgactatcctaagaagcaaaacgatgactatcctaagaagcaaaaggaaacctgcagcacacaacgatgctcttcacaagttccatatggtcatgatcttgtctcaagtagaggatcgtacagcgatgaatggcatgcagatttacttggctgctgttcagaaccggctttgtgtttgaagaccttgttcttcccctgtggaaccttctcgagaattgcttcaatcgccaaggacaggccaatgtcttctggggaggcttgcaatgatattatggcgtactccctaatattgtcctgctgctgttatacatgctgtgtaaggagaaagcttcgtcaaaagttggacattgcgggaggctgctgtgacgacttcctttcacatctgctgtgttgttgctgcgcgcttgttcaagaatggcgggaagttgagattcgcggagcttatagtgagtttcctacttgaatgcttctagtaaaccatggattaaattagggctgggttattcagttccggaaacagaagggctagctgcctccctgataataataaatttaaaacattgtagtagagcgccttgtatcttccacgagtacttagcgtggtggtaggtcctctggttcggaggctctagtttggaagaaagggaagccaaacccaagaaggggaaacctctcataaataaatgacacctctagacattgctcactttagaaaaaagtcagtggctaaaggaatttgagtttccaaactagcccttagtgctatacctcgtggaggtcaccccaaggagtcgagttttattctcaacatcgattcagtaatattaacttccttgtgactccccaggggtcatgtttttttaagcaccgtctttcgacatcgattcagtaatactagtttccgtgtgcctcatttcgtgcaggcgaaaagacgaaggtcacaccaccagcatgccagtatatggagcactgaacagctgtatgcccgtacgggtagacccgaacttctgtaaagatattaacagaatatctgatatcgtactgcaagagcagtggtactacactgctcctgtgtagtgtttattcttactgtctattgttcgtcctggtcctggaacttgcatgtatatgttggggcatagcaccagagtatgtactctgtaaaaacacatcagttacaggctggtagagcctaacatcgcttaacaccgtcagttattggcaaaaaagttctttgtgcgtgtgcgtgtttaccttaatagcagttaaaaaaaagaagagctttagtcacag

SEQ ID NO: 200956 - DNA, 1507 bp, Zea Mays
ggggaacgcaacatggctgtggtcattgcctcattggagtgaaccggtggtgggcagtgcggagtgccagcccagccagcagtaaccgccgaagcaaccggtgaggagggaggggaggggctggccgcatccactctccccttccacttgcaggcattgcctgttctccactccagttcccagctccgcagctcgaggacggaacggagggagatagggccaggggaagggacggagagccccgtctccaattcacaacactgccacggccggagccggaggaggaaggcgccagccgtagtccacaggatcggcttgagtatattgagagggaccaatgtgaatattcctttgacgaggaagacaagaaagtgcaagatgctcttttgaatcctgacccttgctcgaatcctacaattgtgctcaagaagactctctcatgttcctatccaaacttgcctttcaatgaggccctccgaaaggaaagtgagaagcttcaggttgaacttcaaaggtcacagagcaacatggatctgggttcgtgtgaggttatccaacacctgcttggagtaaccaaaactgtggaatctacaattccagagaaagaaacaaatgttaaagctccagaaaagaagggttcaaactacagtgaatccaaaggagagactgcaaaatcgtttgatgatgatgacgactatcctaagaagcaaaacgatgactatcctaagaagcaaaaggaaacctgcagcacacaacgatgctcttcacaagttccatatggtcatgatcttgtctcaagtagaggatcgtacagcgatgaatggcatgcagatttacttggctgctgttcagaaccggctttgtgtttgaagaccttgttcttcccctgtggaaccttctcgagaattgcttcaatcgccaaggacaggccaatgtcttctggggaggcttgcaatgatattatggcgtactccctaatattgtcctgctgctgttatacatgctgtgtaaggagaaagcttcgtcaaaagttggacattgcgggaggctgctgtgacgacttcctttcacatctgctgtgttgttgctgcgcgcttgttcaagaatggcgggaagttgagattcgcggagcttatagcgaaaagacgaaggtcacaccaccagcatgccagtatatggagcactgaacagctgtatgcccgtacgggtagacccgaacttctgtaaagatattaacagaatatctgatatcgtactgcaagagcagtggtactacactgctcctgtgtagtgtttattcttactgtctattgttcgtcctggtcctggaacttgcatgtatatgttggggcatagcaccagagtatgtactctgtaaaaacacatcagttacaggctggtagagcctaacatcgcttaacaccgtcagttattggcaaaaaagttctttgtgcgtgtgcgtgtttaccttaatagcagttaaaaaaaagaagagctttagtcacag

SEQ ID NO: 200957 - DNA, 2470 bp, Zea Mays
ccggtggtgggcagtgcggagtgccagcccagccagcagtaaccgccgaagcaaccggtgaggagggaggggaggggctggccgcatccactctccccttccacttgcaggcattgcctgttctccactccagttcccagctccgcagctcgaggacggaacggagggagatagggccaggggaagggacggagagccccgtctccaattcacaacactgccacggccggagccggaggaggaaggcgccagccgtagtccacaggcaacgcaagggaatgccactgttctagtctcgctctcgcagatctgctccgccgcgccctgttcaccgggaattctggagctgagggcgcaggttcgagcagaagctcggagcatggccatggccgagggggagaagcaccatgcccggtgccggtggtagggcggcgtccacggcgcggctgcacaagcgcaactgccgccgcttcgcgcagcacctcaagctcatcggcggcctgctggagcagctccgcgtgtcggagctcaggaagtacccggagacgcgggagccgctggagcagctcgaggacgcgctccgccggggctacctgctcgtcaactcctgccaggaccgctcctacctctacctcctcgccatgggctggaacatcgtctaccagttccgcaaggcgcagagcgagatcgacaattacctccgcctcgtcccgctcatcacgctcgtcgacaatgcccgcattcgggtcggtaatcggctttcatctctctcccttttctacccaagctgtttgtttacattcttctcacgcattcgggtaggctcctagactggatgtgggccttgtaggctttttcaaccagaaacactggaattcttatctgatggggatattctggtttatgcgcaccattctttggttctactagagtactggactactggtatcgatcggggtgcctagaatatcttctattcttcttttgaggttctaatagtcactaggggtggtttttctgcatgatctgattggattcttgttttctgttagttggccatgaagctggcacgaccaagaatctctgatgtttttgggtacttctttatgctgtcgttttcattgttcacgcacctgcaaagtgaacttgtagacagttgtaggttaagttgaattctgtatagtgttgccaattgttttgctccagtgaaatacatttttttttcttaactataccctgtttatcttattcttcatcttttcttttcctaggatcggcttgagtatattgagagggaccaatgtgaatattcctttgacgaggaagacaagaaagtgcaagatgctcttttgaatcctgacccttgctcgaatcctacaattgtgctcaagaagactctctcatgttcctatccaaacttgcctttcaatgaggccctccgaaaggaaagtgagaagcttcaggttgaacttcaaaggtcacagagcaacatggatctgggttcgtgtgaggttatccaacacctgcttggagtaaccaaaactgtggaatctacaattccagagaaagaaacaaatgttaaagctccagaaaagaagggttcaaactacagtgaatccaaaggagagactgcaaaatcgtttgatgatgatgacgactatcctaagaagcaaaacgatgactatcctaagaagcaaaaggaaacctgcagcacacaacgatgctcttcacaagttccatatggtcatgatcttgtctcaagtagaggatcgtacagcgatgaatggcatgcagatttacttggctgctgttcagaaccggctttgtgtttgaagaccttgttcttcccctgtggaaccttctcgagaattgcttcaatcgccaaggacaggccaatgtcttctggggaggcttgcaatgatattatggcgtactccctaatattgtcctgctgctgttatacatgctgtgtaaggagaaagcttcgtcaaaagttggacattgcgggaggctgctgtgacgacttcctttcacatctgctgtgttgttgctgcgcgcttgttcaagaatggcgggaagttgagattcgcggagcttatagcgaaaagacgaaggtcacaccaccagcatgccagtatatggagcactgaacagctgtatgcccgtacgggtagacccgaacttctgtaaagatattaacagaatatctgatatcgtactgcaagagcagtggtactacactgctcctgtgtagtgtttattcttactgtctattgttcgtcctggtcctggaacttgcatgtatatgttggggcatagcaccagagtatgtactctgtaaaaacacatcagttacaggctggtagagcctaacatcgcttaacaccgtcagttattggcaaaaaagttctttgtgcgtgtgcgtgtttaccttaatagcagttaaaaaaaagaagagctttagtcacag

SEQ ID NO: 200958 - DNA, 826 bp, Zea Mays
cgacttgcgagtgtatgagatctgactcctgtgcatcatcagaactatgactgatcattgccttgatgtaattctgatgctcttcacaagttccatatggtcatgatcttgtctcaagtagaggatcgtacagcgatgaatggcatgcagatttacttggctgctgttcagaaccggctttgtgtttgaagaccttgttcttcccctgtggaaccttctcgagaattgcttcaatcgccaaggacaggccaatgtcttctggggaggcttgcaatgatattatggcgtactccctaatattgtcctgctgctgttatacatgctgtgtaaggagaaagcttcgtcaaaagttggacattgcgggaggctgctgtgacgacttcctttcacatctgctgtgttgttgctgcgcgcttgttcaagaatggcgggaagttgagattcgcggagcttatagcgaaaagacgaaggtcacaccaccagcatgccagtatatggagcactgaacagctgtatgcccgtacgggtagacccgaacttctgtaaagatattaacagaatatctgatatcgtactgcaagagcagtggtactacactgctcctgtgtagtgtttattcttactgtctattgttcgtcctggtcctggaacttgcatgtatatgttggggcatagcaccagagtatgtactctgtaaaaacacatcagttacaggctggtagagcctaacatcgcttaacaccgtcagttattggcaaaaaagttctttgtgcgtgtgcgtgtttaccttaatagcagttaaaaaaaagaagagctttagtcacag

SEQ ID NO: 200959 - DNA, 1193 bp, Zea Mays
gttcatatatgcatgcactttttcacatccccggtaaatccatcggcataagctcgattttgctagggttggttctggtggggagagctgcatttgttttcccattgtcgtttttgtccaacctgacaaagaagtctccattggagaaaataacatttagacagcaaattgtaatatggtgggccggactgatgagaggtgccgtgtccattgctctcgcttacaacaagttcacgagatctggacacactgagctgcacggcaacgcgataatgatcaccagcacgatcactgtggtcctgtttagcactatggtgtttgggatgatgacgaagccattgatccggctgctgctccctgcctgcagcaacacggccacctccgagccgtcctcacccaagtccctgcactcgcctctcctgacgagcatgcagggctcggacatcgagacggggtcggcacagattgtgaggccgtccagcctccggatgctcctaagcaagccaacccacacggtgcactactactggcgcaagttcgacgacgcgctcatgcggcccatgtttggcggccgcgggttcgtgcccttctcccctggatcgcccactgagcagagcgtccacgacggacggtgaacaaagccgcgtctgacaccaagagacgagcaggacatgcttttggctgctaatcgtcagatgatgatgtttttgtttgttgacagcttctgatggtgcgttagcaatggcaacgaggtgtcagttggtttggattagcaggatgaagaagagcaaccctggtaactagggcggggggattgagtttgtgcatgacaaggctgcaaacttttgtatgtagataaaaaaaacacccatttggccatttgtattgtatgttattgtatgtaagctagcaggcctgtacaactgcttttaggtcttcgtttggatgggcgaaattctggcaaatagcagcacatccactctgtgttctgatctaagcatcttggtttgattttgaaatggactcggtgtgtaggatagcttttggaagttgttttgccacaactcggtttttctagggtgcgtacagtgtctatcaagtgtgtttttttggctatgcaagtcgatactgatttctgcaaatttgtcatgtcaacaaaatagaagccaccatgacatacttttttagcggat

SEQ ID NO: 200960 - DNA, 5898 bp, Zea Mays
ctttaatcaagcatccaaacacgcactaatatattaggcgaacactaaagacaagggaggaaagacatatctgagggagatatgacacggcggcagcagcagatccagctatcaccatgacggactcggggaggaggccaccaactaccaaacccatcgcacacgtcctgctcccctccccttctcgtcgcgtcggcattgcattgcacgcctcgcccggcgcctgctcccttgcattttccattgacctcccccccgccccctctcgtccgtctcctcctccccaaagcttcgaattttcccgagccggagccacaccttctttctccccgcgtcccacgattcgccgtcggaaagaggcaaggcaacggaaaccgagccgtcctgcgtgagctggggcggggtcccccgtctgggtgccttccgtgccactctcctgcaacgcggggcgcattgtcttgctgcccccttgagaagggaagattcccgccatctattaatcctcctctcgtatgccgttttctgcctggggaggacacaaacgcagcgccgcgggaaagccgggcgccgcatggatcgaggcatccggtgttcctgtctcaagacccagttttggcgtcttggcgtagcgggacggaggaggacgacggggtttcggagcgcagggtcgcggcggcacgccgggatctccgaggcgccgcgctgttgagtgttgacgccttctcgttcctgggaggaggtgatttctctgctgagggcctggggagtctcttggttcagtccctctccctctgcagtttatttgctttttttaggtaggtggagtgtggagttgttgggtgggagagggcctggaatttatttcgagctgcttctttggagaccattgtttctcgaatctgagttcctcttcttcggagggagttgtcaattgcgttctgattgatttggacaagatcggaaggaactggcactctcggtgggcgtacaaaaactctgagcttgtggccttatcgacttcttgggggcatctgggagtagcttcagcgattcacttgagtctggaggaatggcgccgaccaagaggatggagaagctcaagctcagcacattgttgactttcatgcgttgccacaggggctctagtgatgaccactcacggattgggacagtggggttctcccgagtcgtttacgtcaacgagcctgatatgcttgaagaggagggattcaactaccccttgaatgaagtgtcgacgacaaagtacactctggccaccttccttcccaagtccctcttcgagcagttcaggagggtggccaatttctacttccttgtctctggtatccttgccttgactccacttgcaccttacacggcagtgagcgcgcttgcaccgctctgtgtcgtgattgtagccaccatggcaaaagaaggggttgaggactggcggaggaaacaacaggatcatgagctcaataatcggatagtcaaagtgcataggggaagtggccattttgaagagacaaaatggaagaatatcaaagttggagatgtaataaaactggagaaggataatttctttcccgctgatatgattctgctttcatctagctatccggatggaatatgttatgtagagaccatgaaccttgatggtgaaacaaatttgaaaattaaacaagctctcgaggtgacattggatttacaggaggacacaaagttcagagaagtcagacaaacaataaaatgtgaagacccaaatgcgaacctctactcctttgtcggttcaatggaatggagaggccagcagtatcccctgtcacccctacagcttcttctccgggactcaaaactacggaacacagactacatatatggggctgtcatcttcacaggtcatgatacaaaagtgatgcaaaatgcaacagatccaccatctaaaagaagtaagattgagaagaaaatggatcaaattatttacgttctgatgtcttctctactcatgattgcattacttggttccatcttctttgggatctggaccaaagaggacgtaagagatggtgggctcaaacggtggtatcttcggccagatgctactactatattctatgatccaaagagagcagctctggcatctttctttcatttgttgacggccttgatgctgtacagctacttcatacccatttctttgtatatatccattgagatagtcaagatcttgcaagctctatttatcaaccaggatattgaaatgtatcatgaagaatcagataagccaactcatgctcgtacttcgaatctaaatgaagaactaggtatggttgatacaattctatccgataagactggaacattaacatgcaacatgatggagttcatcaagtgttcaattgctggcacagcctatggtaagggcgtcactgaagttgagagagctatggctatgaggaaaggtgacagtttagatgatgacattgaaaatggagactacaaagacaaaaaaaatcacaacagtcccaatgttaaagggttcaatttcaaggatccacgaataatggatgggaattggattcatgagcctaacaaagatatgataagagattttttccggctcctagccatctgccacacatgcattgctgaaatagacgaaaatgagaaggtttcatacgaagctgagtcccctgatgaagctgcatttgttattgcggcaagagaactagggtttgagttttacaagaggtcactggcaactataattattcgtgagcaggatccaagttggaatgttgttgagaaaaggtacagaaagtatgaactcttaaatatattggagttcagtagctcaaggagacggatgtccgtgatagtcaaagaaccagagggaaggatattacttctcagcaagggtgctgatagtgtgatgttcaaaaggcttgcaccaaatggaagaaaatatgaagaagaaacaagaagacacataaatgagtattctgactctggtctaagaaccttggttctagcataccgtgtcttagatgagaaagagtacaaggaattcaatgaaaaactgaacactgccaaagcatctgtaagtgctgatagagatgtaaaaattgagcaggctgctgatagcattgaacaggacttgattcttcttggtgctactgcagttgaagataagctccagcaaggggtgcctgaatgcatagacaagcttgcgcaagccggaattaagatatgggtcctgactggcgacaagatggagacagctatcaatattgggtttgcatgtagcctgcttaggcaagacatgacacagataattgtcacactggaacaacctgacatcatcgcgttggagaaagatggtgacaaatataaaatttttaaggcatcaaagaaaaaggttatgagtcagatagaggatggaatcaaacaaattccaccttcaactaaaattagcactgcatcatttgcactaatcattgatggtaaatcaataccttatgctttggaagatgatgtcaagtttaagttcttggatcttgctatcaactgtgcatcagtgatatgttgccgatcttcaccaaaacagaaggcactggtcacaagatttgttaagcaagtaacacataaagtgactttagcaataggtgatggggcaaatgatgttggcatgcttcaagaagctgacataggggttggcatcagtggtgctgaaggaatgcaggctgtcatggctagtgatgttgctgttgcccaattccgctttttggaacggctacttctggtgcatggacattggtgttaccggcgtatttcagtgatgatatgctatttcttctacaagaatgttacttttggtgtcactctctttctctacgaagcatttgcatctttctctgggaagccagcttataatgattggttcttgtcactctataatgtcttcttcacctcccttcctgtcattgctttgggagtctttgaccaggatgtgtctgccaggctatgcatacagtatccacagctataccaagaaggagtgcagaatatattattcagttggtgtcggatacttggctggatgcttaacggtgttatgaatgctgtcttaatatttttcttctgcatcacaacctttgaggaccaggtgttccgccgggatggtcaagttgcaggcttggatgctctaggcgtcgccatgtacacttgtattgtatgggttgtcaactgtcaaatggcgctctctgtgaactacttcaccataatccagcacatattcatatggggcagcattgcagtatggtacctcttcctcatagtttatggttccatgaacccgaggttctcaactacagcctacatggtcttcatcgaacagctggccccagccctctcattttggttggtgacactttttgttgtgctggcaacacttgtcccctacttcacgtatgccgcgatccagatccggtttttcccaatgttccacaacaagattcagtggaagcggtacttggggaaggctgaagacccagaagtggcaaggcagttgtcatcacgacaccggacgtcgtcgcagcagaggatggtcggtatctctgctcgtcgggacggcaaggctatgcaaataacaagggagacagagatagaagttcaggagtagcattgtcagtagattttgcgttttgtacagcttataggatattgtctccggcaggatgacagctgaactgattggaaaccggaatgtttctggattgctgcttctatgatggctgtcatggaagctgatggtagagcaagactacaaattgcttagataggtcacaactcacaaggaggccaagagatcctgttgtaaagttcaattttagcagttcaaggctgtgtttcccccccccccccccctgcttctcttacatcatagatgcttgtaaccagattggtagaatttcgttgtttttattcctctttaccccccttgcctgccccctctcaactgtattttaaacaataatgtaaggcatcttgtttgagtggctttcatgctttattttggaaagaatcataattgagtgatatagaatgtaagattggcctctaatatttgtttccatgacttttcaaatatggggaggccacaaaggtgcctttgtgccatcaccaaaaaatttcgtacacttgttcttattcaattttcctaggaaaaaattattcttctgtactactgattaataagtggaagaaaatgggtattttggagaaaacaacactttctatgtgaaaacaacatatcctgatttgattcaactgttaatggtgagccagcatggcaaaaaaataaaaaaattgtatagaactaagataaaatcaaggcttactgtatgaaagatgaataaatgaaccaagaggtaaataaacttcaaatagtgacacagagagaactcaaggatcaacattacatggatttacaatatttgtcttactcctttccgttctattattagtataccatactaacctgctgcagttacaaccgtctccagtagcttatccaaactcatattcaaaatactatctacaaacagtacaatatacagtgtaaaatagatatatttagtgaccatgtgggtgcaatgtacagtggtttacccatatgatcatcaaaaccacagttttgtactatagattataccgtttgtagagcttgtagagtatagcttgaatacatgtatgagtctgctggagatgatttaagggaagcaaagaaagcaactaacttgagccgctgagcgcccggttaggttgacaggtttacgtttcacggctccggcagcggcagcggcagtggctgcgatgcagccggctgctttgtctccg

SEQ ID NO: 200961 - DNA, 3284 bp, Zea Mays
cgcactaatatattaggcgaacactaaagacaagggaggaaagacatatctgagggagatatgacacggcggcagcagcagatccagctatcaccatgacggactcggggaggaggccaccaactaccaaacccatcgcacacgtcctgctcccctccccttctcgtcgcgtcggcattgcattgcacgcctcgcccggcgcctgctcccttgcattttccattgacctcccccccgccccctctcgtccgtctcctcctccccaaagcttcgaattttcccgagccggagccacaccttctttctccccgcgtcccacgattcgccgtcggaaagaggcaaggcaacggaaaccgagccgtcctgcgtgagctggggcggggtcccccgtctgggtgccttccgtgccactctcctgcaacgcggggcgcattgtcttgctgcccccttgagaagggaagattcccgccatctattaatcctcctctcgtatgccgttttctgcctggggaggacacaaacgcagcgccgcgggaaagccgggcgccgcatggatcgaggcatccggtgttcctgtctcaagacccagttttggcgtcttggcgtagcgggacggaggaggacgacggggtttcggagcgcagggtcgcggcggcacgccgggatctccgaggcgccgcgctgttgagtgttgacgccttctcgttcctgggaggaggtgatttctctgctgagggcctggggagtctcttggttcagtccctctccctctgcagtttatttgctttttttaggtaggtggagtgtggagttgttgggtgggagagggcctggaatttatttcgagctgcttctttggagaccattgtttctcgaatctgagttcctcttcttcggagggagttgtcaattgcgttctgattgatttggacaagatcggaaggaactggcactctcggtgggcgtacaaaaactctgagcttgtggccttatcgacttcttgggggcatctgggagtagcttcagcgattcacttgagtctggaggaatggcgccgaccaagaggatggagaagctcaagctcagcacattgttgactttcatgcgttgccacaggggctctagtgatgaccactcacggattgggacagtggggttctcccgagtcgtttacgtcaacgagcctgatatgcttgaagaggagggattcaactaccccttgaatgaagtgtcgacgacaaagtacactctggccaccttccttcccaagtccctcttcgagcagttcaggagggtggccaatttctacttccttgtctctggtatccttgccttgactccacttgcaccttacacggcagtgagcgcgcttgcaccgctctgtgtcgtgattgtagccaccatggcaaaagaaggggttgaggactggcggaggaaacaacaggatcatgagctcaataatcggatagtcaaagtgcataggggaagtggccattttgaagagacaaaatggaagaatatcaaagttggagatgtaataaaactggagaaggataatttctttcccgctgatatgattctgctttcatctagctatccggatggaatatgttatgtagagaccatgaaccttgatggtgaaacaaatttgaaaattaaacaagctctcgaggtgacattggatttacaggaggacacaaagttcagagaagtcagacaaacaataaaatgtgaagacccaaatgcgaacctctactcctttgtcggttcaatggaatggagaggccagcagtatcccctgtcacccctacagcttcttctccgggactcaaaactacggaacacagactacatatatggggctgtcatcttcacaggtcatgatacaaaagtgatgcaaaatgcaacagatccaccatctaaaagaagtaagattgagaagaaaatggatcaaattatttacgttctgatgtcttctctactcatgattgcattacttggttccatcttctttgggatctggaccaaagaggacgtaagagatggtgggctcaaacggtggtatcttcggccagatgctactactatattctatgatccaaagagagcagctctggcatctttctttcatttgttgacggccttgatgctgtacagctacttcatacccatttctttgtatatatccattgagatagtcaagatcttgcaagctctatttatcaaccaggatattgaaatgtatcatgaagaatcagataagccaactcatgctcgtacttcgaatctaaatgaagaactaggtatggttgatacaattctatccgataagactggaacattaacatgcaacatgatggagttcatcaagtgttcaattgctggcacagcctatggtaagggcgtcactgaagttgagagagctatggctatgaggaaaggtgacagtttagatgatgacattgaaaatggagactacaaagacaaaaaaaatcacaacagtcccaatgttaaagggttcaatttcaaggatccacgaataatggatgggaattggattcatgagcctaacaaagatatgataagagattttttccggctcctagccatctgccacacatgcattgctgaaatagacgaaaatgagaaggtttcatacgaagctgagtcccctgatgaagctgcatttgttattgcggcaagagaactagggtttgagttttacaagaggtcactggcaactataattattcgtgagcaggatccaagttggaatgttgttgagaaaaggtacagaaagtatgaactcttaaatatattggagttcagtagctcaaggagacggatgtccgtgatagtcaaagaaccagagggaaggatattacttctcagcaagggtgctgataggttagtgctctatttacactagatttcaatgtttagctgcagatcatcttcataagcatagtttctgtgaacagtgtgatgttcaaaaggcttgcaccaaatggaagaaaatatgaagaagaaacaagaagacacataaatgagtattctgactctggtctaagaaccttggttctagcataccgtgtcttagatgagaaagagtacaaggaattcaatgaaaaactgaacactgccaaagcatctgtaagtgctgatagagatgtaaaaattgagcaggctgctgatagcattgaacaggacttgattcttcttggtgctactgcagttgaagataagctccagcaagggggaaccatgcctgttcatgtactcat

SEQ ID NO: 200962 - DNA, 2409 bp, Zea Mays
gcaagctgcacactggaggcgggggtcaagatatattcacttcgtgtggattcagtgcactccgaggcttacaaggtgcttggtgggataaaccgtgccggaaggggtgaagaggctgatttggaggaaggcagcaatgttgaacctgcacaggatgaagcaatcaataaaaaggatgctgataggaggatttcacctgcttcaacgttggagtcgtcatttgaggctctcaatgtaaagaaatttgatgtttgatgaaggtggggcaaagggccttttgttgtataaccttggagtttatggtagctgccgtgtgctgttcgattcatttgaagctccagacaaatgcatcttaagtgatatgcaaactgagcaggctgagacaattgacctttcatttgctaaagagcaaattgaggaaatggtcactcaaatgcgtctatgtaatgatatttctccaaccctgagggatattgttgctcaatttgatgaagaaaaccaaaggccatcacataggttatctcctggtcaaatgccagtaatggaagatcagatggatgatggtaatgaagcagacgataacgatagcatgctacctgattctggaacttgggattttggtgattgtcatgaccatgaggatacatatgatcaaaactgtaatccaatggattccatctcaacaaactttcaagaggaattcaatgaatacactgttgagattcctcagggtactattgtaaacgatagagttgacaaaattgcatctcttgtgttacttggcatggcctcatcaaaagcaaatgcttgggcaggacctgagcactggaaatatcggaaagctaaagatttggaggctgctccaacttcatcaggtgattcagaaataacaaataagataaagaaaagaaccaaggataaacctgacattggtttcacaaaagcattggacaatgagcttccaaatatcttcgcggctcccaaaaatccaaagacattactgtttcctgcaaacagggctatttgcagcaataaacttccagaagattgccattaccggcctgaaagccttgttaaattatttcttctcccagatgttttgtgtcttgctaagagaagaaaatcacttgatgctccagtggataataatgatgactttatcccatctgaaccttgggaagatgacaacttttgcaatgaccacattgatgaaggacatgtgtgtagtgatgtagaagagccagtaaatcttatcaataaaccgagacaggtcaacaagattgatatacagtatgacaaggtatcaaaacaagtggatgttcatgctttaaaagaagtgctttggaatcacatccatgcatctgctgagactggtcaggaaagagaggaacctggaccaccgctgcgcctatctcaggtgttacatgaccttccaagcagcagcccagatgctgtagcaactgatatttcgccacacctgtatttcatctgccttctgcatctggcaaatgagcacaacttgaagctctgtgatcgccccatgttggatgaaatagacatatacatgccgccgacttcaccgcttgtgaagtgaaccatgctgtaccggagatgctagtcttttttattttgtttattgttgaccggcctaaaccaacgccatgattattgggtagtgatctctgattgttgctaaggtgcccgtcgtgacatgctcagctcactgatgtaacttgaaaaatgaaacttcatatattttttaaagtagtgatgctcggaacgatactgcattgacttatgcctttcaacagactagagttaaagatggtccgagtcgtcgttcggagcaaggagtgcgcgctgccagatcgcagcggaagctcgatcgcccgtcggggcgttgtgttgggcagagctacggagggcggctgcacgtatcagcgaggagagtgcggtgctccgacagtcctcgctcggctgtcggtcggggacatcgcgtcgggtggagccgcggacggctgctggtcgaacgacaccagctaaggtcgtgtcgtcgtcgttcgtcgctccgtctcggcttccaccatcagcggccgcgctcgcgctcgcgacaaggtttctcgcgatctggacggtcaggtaagagtctttctcaaggcagtcgggtggggggggggggggtcaacgttgaggttggccattgtggcttgcctctcaacgggggccggtctgaggtcagtatcatgcgacagtacgcgcggaagggttgccgccggaaaacgcttgcgcctacggaagcagatggcattcgtgctttggcggtggaagcgaagaatttgttgcatccggaaaatgttactgatgcctgttgggggccttcggcttccgaaggtcctcaaaaacatgatt

SEQ ID NO: 200963 - DNA, 3174 bp, Zea Mays
gtgaaggtgtatatgtttaaacccccgtcctcagtcacgccgcacctaacccttcgtcagtttcagtttggcacctccgaagcttccgtccgaatctctgctgcctccttcctcggccaggcttgcgggcgatggcggcggagcagaccgccgagcagttccggggccaggcgcggctgccccacttcgcgtccccgcggcgctacgacctgcgcctcacgcccgacctccccgcctgcgtcttcactggctcggtggcggtttccatcggcgtggccgcgcccacccgcttcctcgtactcaacgcagccgagctcgacgtcgcgaccgggggcgtcagcttcgcgcctcagggctccgaccaggtgctacaacctttggaggttaccaacgtgccagaagatgagatcctgattattcgcttcaatgaggtgctttctatcggggagggaactttgacgattgcattcaaggggactttgaatgataagatgcatggattctacagaagtgtgtatgagcttaatggagagaagaaaaacatggctgtaacacagtttgaaccagctgatgcaaggcgctgcttcccttgttgggatgagcctgctttcaaggctgttttcaaaattactctagaagttccttctgagacgattgctctgtcaaatatgccagtaattgaagagaaggtcaatggccctaccaaaatagtctacttccaagaatctcggataatgtctacatacttagtggctgttattgttggcaatttttgactatgtggaagatttcaccacagatggtactagggtccgtgtttacacacaagtcggtaagagtgcgcaggggaggtttgctctagaggttgccttgaagacattggtcctgtttaaggagtattttgctgtgccataccccctccccaaaatggacatggttgctattccagattttgcagctggagccatggagaactatggcttggttacataccgtgaaacagcattgctatttgatgagatgcactctgcagctgccaataagcaacgggttgcagttgttgtagctcatgaattagctcatcaatggtttggaaatcttgtcacaatggaatggtggacacatctgtggcttaatgagggctttgcgacttgggtgtcttacttagctgcagatcagttctttcctgaatggaatgtttggactcagtttctagaggaatctacagtaggtttcaagttggatgctcttgcaggttcacatccaattgaggtggacataaatcatgttgatgaaatagatgagatatttgatgctataagctataggaaaggagcttctgtcattcgtatgctgcaaaactatcttggggctgaggtctttcagaattctttggctgcatacatcaaaagatttgcgtattcaaatgcaaagactgaggacttatgggctgcccttgaagaggggtctggtgaaccagttagaacattaatgcattcatggaccaaacagcaaggttatcctgtcattaatgtgaaactcaaggatggaaagttccaactggagcagacacaatttctttcaagtggatctacaggagttgggcaatgggttgttcccatcacactatgttgttgttcctactcgcgccaagcgaagttcctttttcatgggaaacaagaagattttgatttgtcagcgtccgggtttacggactgccaaaagaaagatggcttctggattaaacttaatgtcaaccagactagcttctatagggtgagctatgatgaggaacttgcagcccgacttcgatatgcaattgaaaccaacaaactgggtgcagcagacagatatggcgtacttgatgatgcctatgccctctgtatggctggcaaacaaaagctagtctccttgctgcatttgatttctgtgtacaaggatgagactgagtatactgtgcttgcacacataatcacgacaagtctgcacattgccgagatgatggttattgctgctccagaggagttggttcatctgaagaagttcctaattgatttcctggagccatttgcgctgaaacttggctgggatgctaagagtgacgagggccatctgaacgctttgttaagaggtacactcttaaccgctcttgcagaacttggccatgaggctaccataaatgaagctgttcgtcgatttaatgtctttctggaagacagagagacaccactcctccctcccgatgttcgaaaggcagcatatgttgctttgatgcagacagtgagcaaatcaaacaaaactggctatgaatcactactgaggatatatagggaaaccgatctaagccaggagaaagttcgttctttggcatcatcccctgaccatgatgttgtccgtgaagtattgaatttcatattgtcacctgaggtgaggaatcaggacgcaatatttttgctaagaggggtgagttcaggggcacacgaggtagcatggcaatggctgaaggaaaactgggattacatattgggagcctactctggaactctgctcacctatttcgtcaacataactgtctcgccactggccaccgatgaacatggtgatgaggcggaggagtttttcaagagcagaaccaaggcgaacatcgcgaggactgtgaggcagagcatcgagagggtgaggatcaatgcccaatgggtcaagaacatcaaggccgaggctgacctcggcaatgttctcaagaagctggcttacaagcactgatcagagacggtccactttcatttctgtgttaatcctagtaccgagatgtaactttgttctctggaataagtggattaataaagggcactttcgtttgtgtgtcgtcctgagctgccttgtccgtagattcttacaaactgttctgtgcgaaagctaccatgatagatatgcgtcgaattgattgattctatatcctgataattgattgtgtatcgcccatgtcgcacaggagaacggtaaatttgttccaatgattgtctgactgcgagttggcttccaaacctgcacttcatcattattttagggtctgactctattactccctccgtttcgttttagttgtcgctggatagtgtaaaattaaactatccagcgacaactaaaaagaaatggagggagtatgattttgca

SEQ ID NO: 200964 - DNA, 3183 bp, Zea Mays
gtgaaggtgtatatgtttaaacccccgtcctcagtcacgccgcacctaacccttcgtcagtttcagtttggcacctccgaagcttccgtccgaatctctgctgcctccttcctcggccaggcttgcgggcgatggcggcggagcagaccgccgagcagttccggggccaggcgcggctgccccacttcgcgtccccgcggcgctacgacctgcgcctcacgcccgacctccccgcctgcgtcttcactggctcggtggcggtttccatcggcgtggccgcgcccacccgcttcctcgtactcaacgcagccgagctcgacgtcgcgaccgggggcgtcagcttcgcgcctcagggctccgaccaggtgctacaacctttggaggttaccaacgtgccagaagatgagatcctgattattcgcttcaatgaggtgctttctatcggggagggaactttgacgattgcattcaaggggactttgaatgataagatgcatggattctacagaagtgtgtatgagcttaatggagagaagaaaaacatggctgtaacacagtttgaaccagctgatgcaaggcgctgcttcccttgttgggatgagcctgctttcaaggctgttttcaaaattactctagaagttccttctgagacgattgctctgtcaaatatgccagtaattgaagagaaggtcaatggccctaccaaaatagtctacttccaagaatctcggataatgtctacatacttagtggctgttattgttggcaatttttgactatgtggaagatttcaccacagatggtactagggtccgtgtttacacacaagtcggtaagagtgcgcaggggaggtttgctctagaggttgccttgaagacattggtcctgtttaaggagtattttgctgtgccataccccctccccaaaatggacatggttgctattccagattttgcagctggagccatggagaactatggcttggttacataccgtgaaacagcattgctatttgatgagatgcactctgcagctgccaataagcaacgggttgcagttgttgtagctcatgaattagctcatcaatggtttggaaatcttgtcacaatggaatggtggacacatctgtggcttaatgagggctttgcgacttgggtgtcttacttagctgcagatcagttctttcctgaatggaatgtttggactcagtttctagaggaatctacagtaggtttcaagttggatgctcttgcaggttcacatccaattgaggtggacataaatcatgttgatgaaatagatgagatatttgatgctataagctataggaaaggagcttctgtcattcgtatgctgcaaaactatcttggggctgaggtctttcagaattctttggctgcatacatcaaaagatttgcgtattcaaatgcaaagactgaggacttatgggctgcccttgaagaggggtctggtgaaccagttagaacattaatgcattcatggaccaaacagcaaggttatcctgtcattaatgtgaaactcaaggatggaaagttccaactggagcagacacaatttctttcaagtggatctacaggagttgggcaatgggttgttcccatcacactatgttgttgttcctactcgcgccaagcgaagttcctttttcatgggaaacaagaagattttgatttgtcagcgtccgggtttacggactgccaaaagaaagatggcttctggattaaacttaatgtcaaccagactagcttctatagggtgagctatgatgaggaacttgcagcccgacttcgatatgcaattgaaaccaacaaactgggtgcagcagacagatatggcgtacttgatgatgcctatgccctctgtatggctggcaaacaaaagctagtctccttgctgcatttgatttctgtgtacaaggatgagactgagtatactgtgcttgcacacataatcacgacaagtctgcacattgccgagatgatggttattgctgctccagaggagttggttcatctgaagaagttcctaattgatttcctggagccatttgcgctgaaacttggctgggatgctaagagtgacgagggccatctgaacgctttgttaagaggtacactcttaaccgctcttgcagaacttggccatgaggctaccataaatgaagctgttcgtcgatttaatgtctttctggaagacagagagacaccactcctccctcccgatgttcgaaaggcagcatatgttgctttgatgcagacagtgagcaaatcaaacaaaactggctatgaatcactactgaggatatatagggaaaccgatctaagccaggagaaagttcgtgtgttaggttctttggcatcatcccctgaccatgatgttgtccgtgaagtattgaatttcatattgtcacctgaggtgaggaatcaggacgcaatatttttgctaagaggggtgagttcaggggcacacgaggtagcatggcaatggctgaaggaaaactgggattacatattgggagcctactctggaactctgctcacctatttcgtcaacataactgtctcgccactggccaccgatgaacatggtgatgaggcggaggagtttttcaagagcagaaccaaggcgaacatcgcgaggactgtgaggcagagcatcgagagggtgaggatcaatgcccaatgggtcaagaacatcaaggccgaggctgacctcggcaatgttctcaagaagctggcttacaagcactgatcagagacggtccactttcatttctgtgttaatcctagtaccgagatgtaactttgttctctggaataagtggattaataaagggcactttcgtttgtgtgtcgtcctgagctgccttgtccgtagattcttacaaactgttctgtgcgaaagctaccatgatagatatgcgtcgaattgattgattctatatcctgataattgattgtgtatcgcccatgtcgcacaggagaacggtaaatttgttccaatgattgtctgactgcgagttggcttccaaacctgcacttcatcattattttagggtctgactctattactccctccgtttcgttttagttgtcgctggatagtgtaaaattaaactatccagcgacaactaaaaagaaatggagggagtatgattttgca

SEQ ID NO: 200965 - DNA, 3274 bp, Zea Mays
acccccgtcctcagtcacgccgcacctaacccttcgtcagtttcagtttggcacctccgaagcttccgtccgaatctctgctgcctccttcctcggccaggcttgcgggcgatggcggcggagcagaccgccgagcagttccggggccaggcgcggctgccccacttcgcgtccccgcggcgctacgacctgcgcctcacgcccgacctccccgcctgcgtcttcactggctcggtggcggtttccatcggcgtggccgcgcccacccgcttcctcgtactcaacgcagccgagctcgacgtcgcgaccgggggcgtcagcttcgcgcctcagggctccgaccaggtgcttgcccttgcctcgcttccgcccgtcggtgtgcgcgggtgtcggggtgtgtttgatctgatcgtatgcacacggtttgatacttacagatgcatatggtacttacaggtgctacaacctttggaggttaccaacgtgccagaagatgagatcctgattattcgcttcaatgaggtgctttctatcggggagggaactttgacgattgcattcaaggggactttgaatgataagatgcatggattctacagaagtgtgtatgagcttaatggagagaagaaaaacatggctgtaacacagtttgaaccagctgatgcaaggcgctgcttcccttgttgggatgagcctgctttcaaggctgttttcaaaattactctagaagttccttctgagacgattgctctgtcaaatatgccagtaattgaagagaaggtcaatggccctaccaaaatagtctacttccaagaatctcggataatgtctacatacttagtggctgttattgttggcaatttttgactatgtggaagatttcaccacagatggtactagggtccgtgtttacacacaagtcggtaagagtgcgcaggggaggtttgctctagaggttgccttgaagacattggtcctgtttaaggagtattttgctgtgccataccccctccccaaaatggacatggttgctattccagattttgcagctggagccatggagaactatggcttggttacataccgtgaaacagcattgctatttgatgagatgcactctgcagctgccaataagcaacgggttgcagttgttgtagctcatgaattagctcatcaatggtttggaaatcttgtcacaatggaatggtggacacatctgtggcttaatgagggctttgcgacttgggtgtcttacttagctgcagatcagttctttcctgaatggaatgtttggactcagtttctagaggaatctacagtaggtttcaagttggatgctcttgcaggttcacatccaattgaggtggacataaatcatgttgatgaaatagatgagatatttgatgctataagctataggaaaggagcttctgtcattcgtatgctgcaaaactatcttggggctgaggtctttcagaattctttggctgcatacatcaaaagatttgcgtattcaaatgcaaagactgaggacttatgggctgcccttgaagaggggtctggtgaaccagttagaacattaatgcattcatggaccaaacagcaaggttatcctgtcattaatgtgaaactcaaggatggaaagttccaactggagcagacacaatttctttcaagtggatctacaggagttgggcaatgggttgttcccatcacactatgttgttgttcctactcgcgccaagcgaagttcctttttcatgggaaacaagaagattttgatttgtcagcgtccgggtttacggactgccaaaagaaagatggcttctggattaaacttaatgtcaaccagactagcttctatagggtgagctatgatgaggaacttgcagcccgacttcgatatgcaattgaaaccaacaaactgggtgcagcagacagatatggcgtacttgatgatgcctatgccctctgtatggctggcaaacaaaagctagtctccttgctgcatttgatttctgtgtacaaggatgagactgagtatactgtgcttgcacacataatcacgacaagtctgcacattgccgagatgatggttattgctgctccagaggagttggttcatctgaagaagttcctaattgatttcctggagccatttgcgctgaaacttggctgggatgctaagagtgacgagggccatctgaacgctttgttaagaggtacactcttaaccgctcttgcagaacttggccatgaggctaccataaatgaagctgttcgtcgatttaatgtctttctggaagacagagagacaccactcctccctcccgatgttcgaaaggcagcatatgttgctttgatgcagacagtgagcaaatcaaacaaaactggctatgaatcactactgaggatatatagggaaaccgatctaagccaggagaaagttcgtgtgttaggttctttggcatcatcccctgaccatgatgttgtccgtgaagtattgaatttcatattgtcacctgaggtgaggaatcaggacgcaatatttttgctaagaggggtgagttcaggggcacacgaggtagcatggcaatggctgaaggaaaactgggattacatattgggagcctactctggaactctgctcacctatttcgtcaacataactgtctcgccactggccaccgatgaacatggtgatgaggcggaggagtttttcaagagcagaaccaaggcgaacatcgcgaggactgtgaggcagagcatcgagagggtgaggatcaatgcccaatgggtcaagaacatcaaggccgaggctgacctcggcaatgttctcaagaagctggcttacaagcactgatcagagacggtccactttcatttctgtgttaatcctagtaccgagatgtaactttgttctctggaataagtggattaataaagggcactttcgtttgtgtgtcgtcctgagctgccttgtccgtagattcttacaaactgttctgtgcgaaagctaccatgatagatatgcgtcgaattgattgattctatatcctgataattgattgtgtatcgcccatgtcgcacaggagaacggtaaatttgttccaatgattgtctgactgcgagttggcttccaaacctgcacttcatcattattttagggtctgactctattactccctccgtttcgttttagttgtcgctggatagtgtaaaattaaactatccagcgacaactaaaaagaaatggagggagtatgattttgca

SEQ ID NO: 200966 - DNA, 2970 bp, Zea Mays
acccccgtcctcagtcacgccgcacctaacccttcgtcagtttcagtttggcacctccgaagcttccgtccgaatctctgctgcctccttcctcggccaggcttgcgggcgatggcggcggagcagaccgccgagcagttccggggccaggcgcggctgccccacttcgcgtccccgcggcgctacgacctgcgcctcacgcccgacctccccgcctgcgtcttcactggctcggtggcggtttccatcggcgtggccgcgcccacccgcttcctcgtactcaacgcagccgagctcgacgtcgcgaccgggggcgtcagcttcgcgcctcagggctccgaccaggtgctacaacctttggaggttaccaacgtgccagaagatgagatcctgattattcgcttcaatgaggtgctttctatcggggagggaactttgacgattgcattcaaggggactttgaatgataagatgcatggattctacagaagtgtgtatgagcttaatggagagaagaaaaacatggctgtaacacagtttgaaccagctgatgcaaggcgctgcttcccttgttgggatgagcctgctttcaaggctgttttcaaaattactctagaagttccttctgagacgattgctctgtcaaatatgccagtaattgaagagaaggtactagggtattttgctgtgccataccccctccccaaaatggacatggttgctattccagattttgcagctggagccatggagaactatggcttggttacataccgtgaaacagcattgctatttgatgagatgcactctgcagctgccaataagcaacgggttgcagttgttgtagctcatgaattagctcatcaatggtttggaaatcttgtcacaatggaatggtggacacatctgtggcttaatgagggctttgcgacttgggtgtcttacttagctgcagatcagttctttcctgaatggaatgtttggactcagtttctagaggaatctacagtaggtttcaagttggatgctcttgcaggttcacatccaattgaggtggacataaatcatgttgatgaaatagatgagatatttgatgctataagctataggaaaggagcttctgtcattcgtatgctgcaaaactatcttggggctgaggtctttcagaattctttggctgcatacatcaaaagatttgcgtattcaaatgcaaagactgaggacttatgggctgcccttgaagaggggtctggtgaaccagttagaacattaatgcattcatggaccaaacagcaaggttatcctgtcattaatgtgaaactcaaggatggaaagttccaactggagcagacacaatttctttcaagtggatctacaggagttgggcaatgggttgttcccatcacactatgttgttgttcctactcgcgccaagcgaagttcctttttcatgggaaacaagaagattttgatttgtcagcgtccgggtttacggactgccaaaagaaagatggcttctggattaaacttaatgtcaaccagactagcttctatagggtgagctatgatgaggaacttgcagcccgacttcgatatgcaattgaaaccaacaaactgggtgcagcagacagatatggcgtacttgatgatgcctatgccctctgtatggctggcaaacaaaagctagtctccttgctgcatttgatttctgtgtacaaggatgagactgagtatactgtgcttgcacacataatcacgacaagtctgcacattgccgagatgatggttattgctgctccagaggagttggttcatctgaagaagttcctaattgatttcctggagccatttgcgctgaaacttggctgggatgctaagagtgacgagggccatctgaacgctttgttaagaggtacactcttaaccgctcttgcagaacttggccatgaggctaccataaatgaagctgttcgtcgatttaatgtctttctggaagacagagagacaccactcctccctcccgatgttcgaaaggcagcatatgttgctttgatgcagacagtgagcaaatcaaacaaaactggctatgaatcactactgaggatatatagggaaaccgatctaagccaggagaaagttcgtgtgttaggttctttggcatcatcccctgaccatgatgttgtccgtgaagtattgaatttcatattgtcacctgaggtgaggaatcaggacgcaatatttttgctaagaggggtgagttcaggggcacacgaggtagcatggcaatggctgaagtttcaggaaaactgggattacatattgggagcctactctggaactctgctcacctatttcgtcaacataactgtctcgccactggccaccgatgaacatggtgatgaggcggaggagtttttcaagagcagaaccaaggcgaacatcgcgaggactgtgaggcagagcatcgagagggtgaggatcaatgcccaatgggtcaagaacatcaaggccgaggctgacctcggcaatgttctcaagaagctggcttacaagcactgatcagagacggtccactttcatttctgtgttaatcctagtaccgagatgtaactttgttctctggaataagtggattaataaagggcactttcgtttgtgtgtcgtcctgagctgccttgtccgtagattcttacaaactgttctgtgcgaaagctaccatgatagatatgcgtcgaattgattgattctatatcctgataattgattgtgtatcgcccatgtcgcacaggagaacggtaaatttgttccaatgattgtctgactgcgagttggcttccaaacctgcacttcatcattattttagggtctgactctattactccctccgtttcgttttagttgtcgctggatagtgtaaaattaaactatccagcgacaactaaaaagaaatggagggagtatgattttgca

SEQ ID NO: 200967 - DNA, 3041 bp, Zea Mays
acccccgtcctcagtcacgccgcacctaacccttcgtcagtttcagtttggcacctccgaagcttccgtccgaatctctgctgcctccttcctcggccaggcttgcgggcgatggcggcggagcagaccgccgagcagttccggggccaggcgcggctgccccacttcgcgtccccgcggcgctacgacctgcgcctcacgcccgacctccccgcctgcgtcttcactggctcggtggcggtttccatcggcgtggccgcgcccacccgcttcctcgtactcaacgcagccgagctcgacgtcgcgaccgggggcgtcagcttcgcgcctcagggctccgaccaggtgctacaacctttggaggttaccaacgtgccagaagatgagatcctgattattcgcttcaatgaggtgctttctatcggggagggaactttgacgattgcattcaaggggactttgaatgataagatgcatggattctacagaagtgtgtatgagcttaatggagagaagaaaaacatggctgtaacacagtttgaaccagctgatgcaaggcgctgcttcccttgttgggatgagcctgctttcaaggctgttttcaaaattactctagaagttccttctgagacgattgctctgtcaaatatgccagtaattgaagagaaggtactagggtccgtgtttacacacaagtcggtaagagtgcgcaggggaggtttgctctagaggttgccttgaagacattggtcctgtttaaggagtattttgctgtgccataccccctccccaaaatggacatggttgctattccagattttgcagctggagccatggagaactatggcttggttacataccgtgaaacagcattgctatttgatgagatgcactctgcagctgccaataagcaacgggttgcagttgttgtagctcatgaattagctcatcaatggtttggaaatcttgtcacaatggaatggtggacacatctgtggcttaatgagggctttgcgacttgggtgtcttacttagctgcagatcagttctttcctgaatggaatgtttggactcagtttctagaggaatctacagtaggtttcaagttggatgctcttgcaggttcacatccaattgaggtggacataaatcatgttgatgaaatagatgagatatttgatgctataagctataggaaaggagcttctgtcattcgtatgctgcaaaactatcttggggctgaggtctttcagaattctttggctgcatacatcaaaagatttgcgtattcaaatgcaaagactgaggacttatgggctgcccttgaagaggggtctggtgaaccagttagaacattaatgcattcatggaccaaacagcaaggttatcctgtcattaatgtgaaactcaaggatggaaagttccaactggagcagacacaatttctttcaagtggatctacaggagttgggcaatgggttgttcccatcacactatgttgttgttcctactcgcgccaagcgaagttcctttttcatgggaaacaagaagattttgatttgtcagcgtccgggtttacggactgccaaaagaaagatggcttctggattaaacttaatgtcaaccagactagcttctatagggtgagctatgatgaggaacttgcagcccgacttcgatatgcaattgaaaccaacaaactgggtgcagcagacagatatggcgtacttgatgatgcctatgccctctgtatggctggcaaacaaaagctagtctccttgctgcatttgatttctgtgtacaaggatgagactgagtatactgtgcttgcacacataatcacgacaagtctgcacattgccgagatgatggttattgctgctccagaggagttggttcatctgaagaagttcctaattgatttcctggagccatttgcgctgaaacttggctgggatgctaagagtgacgagggccatctgaacgctttgttaagaggtacactcttaaccgctcttgcagaacttggccatgaggctaccataaatgaagctgttcgtcgatttaatgtctttctggaagacagagagacaccactcctccctcccgatgttcgaaaggcagcatatgttgctttgatgcagacagtgagcaaatcaaacaaaactggctatgaatcactactgaggatatatagggaaaccgatctaagccaggagaaagttcgttctttggcatcatcccctgaccatgatgttgtccgtgaagtattgaatttcatattgtcacctgaggtgaggaatcaggacgcaatatttttgctaagaggggtgagttcaggggcacacgaggtagcatggcaatggctgaaggaaaactgggattacatattgggagcctactctggaactctgctcacctatttcgtcaacataactgtctcgccactggccaccgatgaacatggtgatgaggcggaggagtttttcaagagcagaaccaaggcgaacatcgcgaggactgtgaggcagagcatcgagagggtgaggatcaatgcccaatgggtcaagaacatcaaggccgaggctgacctcggcaatgttctcaagaagctggcttacaagcactgatcagagacggtccactttcatttctgtgttaatcctagtaccgagatgtaactttgttctctggaataagtggattaataaagggcactttcgtttgtgtgtcgtcctgagctgccttgtccgtagattcttacaaactgttctgtgcgaaagctaccatgatagatatgcgtcgaattgattgattctatatcctgataattgattgtgtatcgcccatgtcgcacaggagaacggtaaatttgttccaatgattgtctgactgcgagttggcttccaaacctgcacttcatcattattttagggtctgactctattactccctccgtttcgttttagttgtcgctggatagtgtaaaattaaactatccagcgacaactaaaaagaaatggagggagtatgattttgca

SEQ ID NO: 200968 - DNA, 3169 bp, Zea Mays
acccccgtcctcagtcacgccgcacctaacccttcgtcagtttcagtttggcacctccgaagcttccgtccgaatctctgctgcctccttcctcggccaggcttgcgggcgatggcggcggagcagaccgccgagcagttccggggccaggcgcggctgccccacttcgcgtccccgcggcgctacgacctgcgcctcacgcccgacctccccgcctgcgtcttcactggctcggtggcggtttccatcggcgtggccgcgcccacccgcttcctcgtactcaacgcagccgagctcgacgtcgcgaccgggggcgtcagcttcgcgcctcagggctccgaccaggtgctacaacctttggaggttaccaacgtgccagaagatgagatcctgattattcgcttcaatgaggtgctttctatcggggagggaactttgacgattgcattcaaggggactttgaatgataagatgcatggattctacagaagtgtgtatgagcttaatggagagaagaaaaacatggctgtaacacagtttgaaccagctgatgcaaggcgctgcttcccttgttgggatgagcctgctttcaaggctgttttcaaaattactctagaagttccttctgagacgattgctctgtcaaatatgccagtaattgaagagaaggtcaatggccctaccaaaatagtctacttccaagaatctcggataatgtctacatacttagtggctgttattgttggcaatttttgactatgtggaagatttcaccacagatggtactagggtccgtgtttacacacaagtcggtaagagtgcgcaggggaggtttgctctagaggttgccttgaagacattggtcctgtttaaggagtattttgctgtgccataccccctccccaaaatggacatggttgctattccagattttgcagctggagccatggagaactatggcttggttacataccgtgaaacagcattgctatttgatgagatgcactctgcagctgccaataagcaacgggttgcagttgttgtagctcatgaattagctcatcaatggtttggaaatcttgtcacaatggaatggtggacacatctgtggcttaatgagggctttgcgacttgggtgtcttacttagctgcagatcagttctttcctgaatggaatgtttggactcagtttctagaggaatctacagtaggtttcaagttggatgctcttgcaggttcacatccaattgaggtggacataaatcatgttgatgaaatagatgagatatttgatgctataagctataggaaaggagcttctgtcattcgtatgctgcaaaactatcttggggctgaggtctttcagaattctttggctgcatacatcaaaagatttgcgtattcaaatgcaaagactgaggacttatgggctgcccttgaagaggggtctggtgaaccagttagaacattaatgcattcatggaccaaacagcaaggttatcctgtcattaatgtgaaactcaaggatggaaagttccaactggagcagacacaatttctttcaagtggatctacaggagttgggcaatgggttgttcccatcacactatgttgttgttcctactcgcgccaagcgaagttcctttttcatgggaaacaagaagattttgatttgtcagcgtccgggtttacggactgccaaaagaaagatggcttctggattaaacttaatgtcaaccagactagcttctatagggtgagctatgatgaggaacttgcagcccgacttcgatatgcaattgaaaccaacaaactgggtgcagcagacagatatggcgtacttgatgatgcctatgccctctgtatggctggcaaacaaaagctagtctccttgctgcatttgatttctgtgtacaaggatgagactgagtatactgtgcttgcacacataatcacgacaagtctgcacattgccgagatgatggttattgctgctccagaggagttggttcatctgaagaagttcctaattgatttcctggagccatttgcgctgaaacttggctgggatgctaagagtgacgagggccatctgaacgctttgttaagaggtacactcttaaccgctcttgcagaacttggccatgaggctaccataaatgaagctgttcgtcgatttaatgtctttctggaagacagagagacaccactcctccctcccgatgttcgaaaggcagcatatgttgctttgatgcagacagtgagcaaatcaaacaaaactggctatgaatcactactgaggatatatagggaaaccgatctaagccaggagaaagttcgtgtgttaggttctttggcatcatcccctgaccatgatgttgtccgtgaagtattgaatttcatattgtcacctgaggtgaggaatcaggacgcaatatttttgctaagaggggtgagttcaggggcacacgaggtagcatggcaatggctgaagtttcaggaaaactgggattacatattgggagcctactctggaactctgctcacctatttcgtcaacataactgtctcgccactggccaccgatgaacatggtgatgaggcggaggagtttttcaagagcagaaccaaggcgaacatcgcgaggactgtgaggcagagcatcgagagggtgaggatcaatgcccaatgggtcaagaacatcaaggccgaggctgacctcggcaatgttctcaagaagctggcttacaagcactgatcagagacggtccactttcatttctgtgttaatcctagtaccgagatgtaactttgttctctggaataagtggattaataaagggcactttcgtttgtgtgtcgtcctgagctgccttgtccgtagattcttacaaactgttctgtgcgaaagctaccatgatagatatgcgtcgaattgattgattctatatcctgataattgattgtgtatcgcccatgtcgcacaggagaacggtaaatttgttccaatgattgtctgactgcgagttggcttccaaacctgcacttcatcattattttagggtctgactctattactccctccgtttcgttttagttgtcgctggatagtgtaaaattaaactatccagcgacaactaaaaagaaatggagggagtatgattttgca

SEQ ID NO: 200969 - DNA, 3188 bp, Zea Mays
acccccgtcctcagtcacgccgcacctaacccttcgtcagtttcagtttggcacctccgaagcttccgtccgaatctctgctgcctccttcctcggccaggcttgcgggcgatggcggcggagcagaccgccgagcagttccggggccaggcgcggctgccccacttcgcgtccccgcggcgctacgacctgcgcctcacgcccgacctccccgcctgcgtcttcactggctcggtggcggtttccatcggcgtggccgcgcccacccgcttcctcgtactcaacgcagccgagctcgacgtcgcgaccgggggcgtcagcttcgcgcctcagggctccgaccaggtgcttgcccttgcctcgcttccgcccgtcggtgtgcgcgggtgtcggggtgtgtttgatctgatcgtatgcacacggtttgatacttacagatgcatatggtacttacaggtgctacaacctttggaggttaccaacgtgccagaagatgagatcctgattattcgcttcaatgaggtgctttctatcggggagggaactttgacgattgcattcaaggggactttgaatgataagatgcatggattctacagaagtgtgtatgagcttaatggagagaagaaaaacatggctgtaacacagtttgaaccagctgatgcaaggcgctgcttcccttgttgggatgagcctgctttcaaggctgttttcaaaattactctagaagttccttctgagacgattgctctgtcaaatatgccagtaattgaagagaaggtcaatggccctaccaaaatagtctacttccaagaatctcggataatgtctacatacttagtggctgttattgttggcaatttttgactatgtggaagatttcaccacagatggtactagggtattttgctgtgccataccccctccccaaaatggacatggttgctattccagattttgcagctggagccatggagaactatggcttggttacataccgtgaaacagcattgctatttgatgagatgcactctgcagctgccaataagcaacgggttgcagttgttgtagctcatgaattagctcatcaatggtttggaaatcttgtcacaatggaatggtggacacatctgtggcttaatgagggctttgcgacttgggtgtcttacttagctgcagatcagttctttcctgaatggaatgtttggactcagtttctagaggaatctacagtaggtttcaagttggatgctcttgcaggttcacatccaattgaggtggacataaatcatgttgatgaaatagatgagatatttgatgctataagctataggaaaggagcttctgtcattcgtatgctgcaaaactatcttggggctgaggtctttcagaattctttggctgcatacatcaaaagatttgcgtattcaaatgcaaagactgaggacttatgggctgcccttgaagaggggtctggtgaaccagttagaacattaatgcattcatggaccaaacagcaaggttatcctgtcattaatgtgaaactcaaggatggaaagttccaactggagcagacacaatttctttcaagtggatctacaggagttgggcaatgggttgttcccatcacactatgttgttgttcctactcgcgccaagcgaagttcctttttcatgggaaacaagaagattttgatttgtcagcgtccgggtttacggactgccaaaagaaagatggcttctggattaaacttaatgtcaaccagactagcttctatagggtgagctatgatgaggaacttgcagcccgacttcgatatgcaattgaaaccaacaaactgggtgcagcagacagatatggcgtacttgatgatgcctatgccctctgtatggctggcaaacaaaagctagtctccttgctgcatttgatttctgtgtacaaggatgagactgagtatactgtgcttgcacacataatcacgacaagtctgcacattgccgagatgatggttattgctgctccagaggagttggttcatctgaagaagttcctaattgatttcctggagccatttgcgctgaaacttggctgggatgctaagagtgacgagggccatctgaacgctttgttaagaggtacactcttaaccgctcttgcagaacttggccatgaggctaccataaatgaagctgttcgtcgatttaatgtctttctggaagacagagagacaccactcctccctcccgatgttcgaaaggcagcatatgttgctttgatgcagacagtgagcaaatcaaacaaaactggctatgaatcactactgaggatatatagggaaaccgatctaagccaggagaaagttcgtgtgttaggttctttggcatcatcccctgaccatgatgttgtccgtgaagtattgaatttcatattgtcacctgaggtgaggaatcaggacgcaatatttttgctaagaggggtgagttcaggggcacacgaggtagcatggcaatggctgaaggaaaactgggattacatattgggagcctactctggaactctgctcacctatttcgtcaacataactgtctcgccactggccaccgatgaacatggtgatgaggcggaggagtttttcaagagcagaaccaaggcgaacatcgcgaggactgtgaggcagagcatcgagagggtgaggatcaatgcccaatgggtcaagaacatcaaggccgaggctgacctcggcaatgttctcaagaagctggcttacaagcactgatcagagacggtccactttcatttctgtgttaatcctagtaccgagatgtaactttgttctctggaataagtggattaataaagggcactttcgtttgtgtgtcgtcctgagctgccttgtccgtagattcttacaaactgttctgtgcgaaagctaccatgatagatatgcgtcgaattgattgattctatatcctgataattgattgtgtatcgcccatgtcgcacaggagaacggtaaatttgttccaatgattgtctgactgcgagttggcttccaaacctgcacttcatcattattttagggtctgactctattactccctccgtttcgttttagttgtcgctggatagtgtaaaattaaactatccagcgacaactaaaaagaaatggagggagtatgattttgca

SEQ ID NO: 200970 - DNA, 2961 bp, Zea Mays
acccccgtcctcagtcacgccgcacctaacccttcgtcagtttcagtttggcacctccgaagcttccgtccgaatctctgctgcctccttcctcggccaggcttgcgggcgatggcggcggagcagaccgccgagcagttccggggccaggcgcggctgccccacttcgcgtccccgcggcgctacgacctgcgcctcacgcccgacctccccgcctgcgtcttcactggctcggtggcggtttccatcggcgtggccgcgcccacccgcttcctcgtactcaacgcagccgagctcgacgtcgcgaccgggggcgtcagcttcgcgcctcagggctccgaccaggtgctacaacctttggaggttaccaacgtgccagaagatgagatcctgattattcgcttcaatgaggtgctttctatcggggagggaactttgacgattgcattcaaggggactttgaatgataagatgcatggattctacagaagtgtgtatgagcttaatggagagaagaaaaacatggctgtaacacagtttgaaccagctgatgcaaggcgctgcttcccttgttgggatgagcctgctttcaaggctgttttcaaaattactctagaagttccttctgagacgattgctctgtcaaatatgccagtaattgaagagaaggtactagggtattttgctgtgccataccccctccccaaaatggacatggttgctattccagattttgcagctggagccatggagaactatggcttggttacataccgtgaaacagcattgctatttgatgagatgcactctgcagctgccaataagcaacgggttgcagttgttgtagctcatgaattagctcatcaatggtttggaaatcttgtcacaatggaatggtggacacatctgtggcttaatgagggctttgcgacttgggtgtcttacttagctgcagatcagttctttcctgaatggaatgtttggactcagtttctagaggaatctacagtaggtttcaagttggatgctcttgcaggttcacatccaattgaggtggacataaatcatgttgatgaaatagatgagatatttgatgctataagctataggaaaggagcttctgtcattcgtatgctgcaaaactatcttggggctgaggtctttcagaattctttggctgcatacatcaaaagatttgcgtattcaaatgcaaagactgaggacttatgggctgcccttgaagaggggtctggtgaaccagttagaacattaatgcattcatggaccaaacagcaaggttatcctgtcattaatgtgaaactcaaggatggaaagttccaactggagcagacacaatttctttcaagtggatctacaggagttgggcaatgggttgttcccatcacactatgttgttgttcctactcgcgccaagcgaagttcctttttcatgggaaacaagaagattttgatttgtcagcgtccgggtttacggactgccaaaagaaagatggcttctggattaaacttaatgtcaaccagactagcttctatagggtgagctatgatgaggaacttgcagcccgacttcgatatgcaattgaaaccaacaaactgggtgcagcagacagatatggcgtacttgatgatgcctatgccctctgtatggctggcaaacaaaagctagtctccttgctgcatttgatttctgtgtacaaggatgagactgagtatactgtgcttgcacacataatcacgacaagtctgcacattgccgagatgatggttattgctgctccagaggagttggttcatctgaagaagttcctaattgatttcctggagccatttgcgctgaaacttggctgggatgctaagagtgacgagggccatctgaacgctttgttaagaggtacactcttaaccgctcttgcagaacttggccatgaggctaccataaatgaagctgttcgtcgatttaatgtctttctggaagacagagagacaccactcctccctcccgatgttcgaaaggcagcatatgttgctttgatgcagacagtgagcaaatcaaacaaaactggctatgaatcactactgaggatatatagggaaaccgatctaagccaggagaaagttcgttctttggcatcatcccctgaccatgatgttgtccgtgaagtattgaatttcatattgtcacctgaggtgaggaatcaggacgcaatatttttgctaagaggggtgagttcaggggcacacgaggtagcatggcaatggctgaagtttcaggaaaactgggattacatattgggagcctactctggaactctgctcacctatttcgtcaacataactgtctcgccactggccaccgatgaacatggtgatgaggcggaggagtttttcaagagcagaaccaaggcgaacatcgcgaggactgtgaggcagagcatcgagagggtgaggatcaatgcccaatgggtcaagaacatcaaggccgaggctgacctcggcaatgttctcaagaagctggcttacaagcactgatcagagacggtccactttcatttctgtgttaatcctagtaccgagatgtaactttgttctctggaataagtggattaataaagggcactttcgtttgtgtgtcgtcctgagctgccttgtccgtagattcttacaaactgttctgtgcgaaagctaccatgatagatatgcgtcgaattgattgattctatatcctgataattgattgtgtatcgcccatgtcgcacaggagaacggtaaatttgttccaatgattgtctgactgcgagttggcttccaaacctgcacttcatcattattttagggtctgactctattactccctccgtttcgttttagttgtcgctggatagtgtaaaattaaactatccagcgacaactaaaaagaaatggagggagtatgattttgca

SEQ ID NO: 200971 - DNA, 3066 bp, Zea Mays
acccccgtcctcagtcacgccgcacctaacccttcgtcagtttcagtttggcacctccgaagcttccgtccgaatctctgctgcctccttcctcggccaggcttgcgggcgatggcggcggagcagaccgccgagcagttccggggccaggcgcggctgccccacttcgcgtccccgcggcgctacgacctgcgcctcacgcccgacctccccgcctgcgtcttcactggctcggtggcggtttccatcggcgtggccgcgcccacccgcttcctcgtactcaacgcagccgagctcgacgtcgcgaccgggggcgtcagcttcgcgcctcagggctccgaccaggtgcttgcccttgcctcgcttccgcccgtcggtgtgcgcgggtgtcggggtgtgtttgatctgatcgtatgcacacggtttgatacttacagatgcatatggtacttacaggtgctacaacctttggaggttaccaacgtgccagaagatgagatcctgattattcgcttcaatgaggtgctttctatcggggagggaactttgacgattgcattcaaggggactttgaatgataagatgcatggattctacagaagtgtgtatgagcttaatggagagaagaaaaacatggctgtaacacagtttgaaccagctgatgcaaggcgctgcttcccttgttgggatgagcctgctttcaaggctgttttcaaaattactctagaagttccttctgagacgattgctctgtcaaatatgccagtaattgaagagaaggtactagggtattttgctgtgccataccccctccccaaaatggacatggttgctattccagattttgcagctggagccatggagaactatggcttggttacataccgtgaaacagcattgctatttgatgagatgcactctgcagctgccaataagcaacgggttgcagttgttgtagctcatgaattagctcatcaatggtttggaaatcttgtcacaatggaatggtggacacatctgtggcttaatgagggctttgcgacttgggtgtcttacttagctgcagatcagttctttcctgaatggaatgtttggactcagtttctagaggaatctacagtaggtttcaagttggatgctcttgcaggttcacatccaattgaggtggacataaatcatgttgatgaaatagatgagatatttgatgctataagctataggaaaggagcttctgtcattcgtatgctgcaaaactatcttggggctgaggtctttcagaattctttggctgcatacatcaaaagatttgcgtattcaaatgcaaagactgaggacttatgggctgcccttgaagaggggtctggtgaaccagttagaacattaatgcattcatggaccaaacagcaaggttatcctgtcattaatgtgaaactcaaggatggaaagttccaactggagcagacacaatttctttcaagtggatctacaggagttgggcaatgggttgttcccatcacactatgttgttgttcctactcgcgccaagcgaagttcctttttcatgggaaacaagaagattttgatttgtcagcgtccgggtttacggactgccaaaagaaagatggcttctggattaaacttaatgtcaaccagactagcttctatagggtgagctatgatgaggaacttgcagcccgacttcgatatgcaattgaaaccaacaaactgggtgcagcagacagatatggcgtacttgatgatgcctatgccctctgtatggctggcaaacaaaagctagtctccttgctgcatttgatttctgtgtacaaggatgagactgagtatactgtgcttgcacacataatcacgacaagtctgcacattgccgagatgatggttattgctgctccagaggagttggttcatctgaagaagttcctaattgatttcctggagccatttgcgctgaaacttggctgggatgctaagagtgacgagggccatctgaacgctttgttaagaggtacactcttaaccgctcttgcagaacttggccatgaggctaccataaatgaagctgttcgtcgatttaatgtctttctggaagacagagagacaccactcctccctcccgatgttcgaaaggcagcatatgttgctttgatgcagacagtgagcaaatcaaacaaaactggctatgaatcactactgaggatatatagggaaaccgatctaagccaggagaaagttcgttctttggcatcatcccctgaccatgatgttgtccgtgaagtattgaatttcatattgtcacctgaggtgaggaatcaggacgcaatatttttgctaagaggggtgagttcaggggcacacgaggtagcatggcaatggctgaaggaaaactgggattacatattgggagcctactctggaactctgctcacctatttcgtcaacataactgtctcgccactggccaccgatgaacatggtgatgaggcggaggagtttttcaagagcagaaccaaggcgaacatcgcgaggactgtgaggcagagcatcgagagggtgaggatcaatgcccaatgggtcaagaacatcaaggccgaggctgacctcggcaatgttctcaagaagctggcttacaagcactgatcagagacggtccactttcatttctgtgttaatcctagtaccgagatgtaactttgttctctggaataagtggattaataaagggcactttcgtttgtgtgtcgtcctgagctgccttgtccgtagattcttacaaactgttctgtgcgaaagctaccatgatagatatgcgtcgaattgattgattctatatcctgataattgattgtgtatcgcccatgtcgcacaggagaacggtaaatttgttccaatgattgtctgactgcgagttggcttccaaacctgcacttcatcattattttagggtctgactctattactccctccgtttcgttttagttgtcgctggatagtgtaaaattaaactatccagcgacaactaaaaagaaatggagggagtatgattttgca

SEQ ID NO: 200972 - DNA, 3457 bp, Zea Mays
ccggtatataggactcccgcaaggcgccccagcactcccgtaaacgcgtgtcgcgcccgtcgccaagcaaacaccacgacgcgcgcgccgtgctctctggcgagccaagagccagtgcattttgctcgcaccccgatcgcggccgggacagcgcgctcgccgtaggtgcatgcgtgcgtgtgcgacctcgcttcctgcccctgaggcctcgcctgcagctagctccaaagcagcaggcgcaccgcgcacccccggtgcggcgcgagcgcatgcatgagcgtccgcgcaatgtctctctgccgccccgcgttccgagcagagtttccccgctaatatccagcgagacggcctgttcctgagcagctgattcgtcgtttgggttgcccactgccggggccatggatcagcagcggaggagcagcatcaggttgtacgggtccaacgcctcgtcccggtcggggtccttcgacttcgaacacgaccaggacaaggaacgcgctgaccagcccagcgacggcgaccgccgggaggtcgtcgtgaagatcgacgccgagccgcactcgccggtctccctccacgcggccggaggcatgtccgggcacagctccgcggtcagcacgccgcgggccggcggcgcggtgagcatgctcgcggcgtctgcgtccggctcgagcgcgtcgacctccagcgctgggggcgatgcgccccgctccggcgagtcgttcagtttcaagaaccgcacgccgcagtcttcggccggcggcggggagtccagcgaagatccgccgagccgcctcattggcagcttcctccggaagcaggcggccgctggcggcgagctgtccatcgaccccgacttcgaggtggacgagatgagaaggccgccacgcgcgccgacatctgtcaacgcctccagggagctgcgcgtctcgttccaggatccccggaaacggttctccccgtccacgtcgtcggcgtcctcctcctcctacgacgccagccacaaccggaaccagagcaccatcgacttggacactgccgaggtgctacgctgcacgtcgacgtccaccggttcctccctgctggcgcgcagcaagacgcgatctcggctaatggatcccccgccaccgtcgacgtcgagcgcccccgccagcgaggtggatccccgaaagtcatttgtctccaaggggctgccgcccaagtccggccagctccggtcgggtcttatcggcaagtcggggctcattggcaaatcagggcccatcggcaagtcaggtgccttcgaggatgaggacgacgacccgttcatggacgagggcatgacctcggacttcaagcgcgacaccatggactgccttctcatcatggagtgggtgagcctggtggtcatcgtgggcgcgctcatctgcagcgttaccatacccagcctgtccataaagaagctctcggggctccacctctggaagtgggagctcctcgtgttcgtgctcatctgcggccgcctcgtgtccggctgggtcatccgcatcgccgtcttcttcgtcgagcgcaacttccttctgcgaaagaaggtgctctacttcgtgtacggcgtgcggcgggccgtgcggaacgtgctctggctgggtgtcgcgctcgtgtcctggcacctcctgttcgacaaggccgccaagcgggagacgcacacgctggtgctgccctacgtcaccaaggtgctgtgctgcctcctcgtggccaccgtgatccgcctcatcaagacgttgctgctcaaggtgctcgcctcgtccttccacgtctccacctacttcgacaggatccaggaagcgctcttcaaccagtacgtcatcgagaccctctccggcccgccgctagtggacgagagccggatgatggctgaggtgcagaggctccagagcgcgggggcgtccatccccagtgagctcgaagcgacagcgatgccgggcaagtccgggcccactgcccaagagtgggcgcctcacgacggccacaaaacagagcgccatctggatgacggcatctcgattgaccagctccacaagctcagccagaagaacatctctgcgtggagcatgaagaggctgatgaagattgttcggtacggggcgctgacaacgatggacgagcagctcaagcatgcaacgggcgaggacgagctggccacggagatacacagcgagtacgaggccaaggttgctgccaagaggatcttccagaacgtcgccaagcctggatccaagcacatatacctgtcagacttgatgcgtttcatgagacaggaagaagctctgaaggcgatggatcttttcgaaggagcgcaggagcacaacagggaaacatgaaacaaaatcccgtggcgtccaatcgctgtcgtctggatactgtaggtaaacgcgttcagagagcgcaaagctctcgccctgacgctcaacgacaccaagaccgcagtgaacaagctgcaccagatggccaacgtcgtggtcgcgctcatcgttctcgcgctctggctcctcatcctggggatcgcgacgtccaagttcttcgtcctgctcagctcgcagctgctcgtggcggtgttcatgttcgggaacactctcaggaccatcttcgaggcgatcgtgttcctgttcgtgatgcatcctttcgatgtcggcgaccgatgcgaagttgatggaatgcaggtggtcgtggaggagatgaacatcatgacgacgatcttcctccgatatgacaacctcaaggtgtactatccaaacagtaagctagcccagctaccgatcatgaattactacaggagtcctgacatgggagattcggtggacttcactgttcatgtcgcaacgccggtggagaaactgtccctcatgaaggagagactgatgcattaccttgacaacaagaaggagcactggtaccctggctccatggtggtcctgcgcgacgtggacgacacgaacaagctgaaggcctccatctggtgtcgccagacgatcaacttccacgacatggggatgaggttcgagcggagagagctgctgctccaggagatgatcaaggtcctgagagacctcgagatcgagtaccggatgctgccgctcgacatcaacgtccggaacgcgcctgccatccagtcctcaaggatgccgtcgacatggacgtttagttattgagatgagatgagatttgtgctgctagaggtagtagttcctgagtgagttgagctgtgacagcgttctgacgagaggcggcaacaggttttgctgtcgctgcagccatcacttgagctttttcctgtagttattgtgttgttggtccaagtactccatagttatctttagtccatctcagatatctttagttcatctcagttatattacctgatgcttgtcattctattacagatggtattgaataattgatttcatcacttggtaaataa

SEQ ID NO: 200973 - DNA, 2268 bp, Zea Mays
gcgcccgtcgccaagcaaacaccacgacgcgcgcgccgtgctctctggcgagccaagagccagtgcattttgctcgcaccccgatcgcggccgggacagcgcgctcgccgtaggtgcatgcgtgcgtgtgcgacctcgcttcctgcccctgaggcctcgcctgcagctagctccaaagcagcaggcgcaccgcgcacccccggtgcggcgcgagcgcatgcatgagcgtccgcgcaatgtctctctgccgccccgcgttccgagcagagtttccccgctaatatccagcgagacggcctgttcctgagcagctgattcgtcgtttgggttgcccactgccggggccatggatcagcagcggaggagcagcatcaggttgtacgggtccaacgcctcgtcccggtcggggtccttcgacttcgaacacgaccaggacaaggaacgcgctgaccagcccagcgacggcgaccgccgggaggtcgtcgtgaagatcgacgccgagccgcactcgccggtctccctccacgcggccggaggcatgtccgggcacagctccgcggtcagcacgccgcgggccggcggcgcggtgagcatgctcgcggcgtctgcgtccggctcgagcgcgtcgacctccagcgctgggggcgatgcgccccgctccggcgagtcgttcagtttcaagaaccgcacgccgcagtcttcggccggcggcggggagtccagcgaagatccgccgagccgcctcattggcagcttcctccggaagcaggcggccgctggcggcgagctgtccatcgaccccgacttcgaggtggacgagatgagaaggccgccacgcgcgccgacatctgtcaacgcctccagggagctgcgcgtctcgttccaggatccccggaaacggttctccccgtccacgtcgtcggcgtcctcctcctcctacgacgccagccacaaccggaaccagagcaccatcgacttggacactgccgaggtgctacgctgcacgtcgacgtccaccggttcctccctgctggcgcgcagcaagacgcgatctcggctaatggatcccccgccaccgtcgacgtcgagcgcccccgccagcgaggtggatccccgaaagtcatttgtctccaaggggctgccgcccaagtccggccagctccggtcgggtcttatcggcaagtcggggctcattggcaaatcagggcccatcggcaagtcaggtgccttcgaggatgaggacgacgacccgttcatggacgagggcatgacctcggacttcaagcgcgacaccatggactgccttctcatcatggagtgggtgagcctggtggtcatcgtgggcgcgctcatctgcagcgttaccatacccagcctgtccataaagaagctctcggggctccacctctggaagtgggagctcctcgtgttcgtgctcatctgcggccgcctcgtgtccggctgggtcatccgcatcgccgtcttcttcgtcgagcgcaacttccttctgcgaaagaaggtgctctacttcgtgtacggcgtgcggcgggccgtgcggaacgtgctctggctgggtgtcgcgctcgtgtcctggcacctcctgttcgacaaggccgccaagcgggagacgcacacgctggtgctgccctacgtcaccaaggtgctgtgctgcctcctcgtggccaccgtgatccgcctcatcaagacgttgctgctcaaggtgctcgcctcgtccttccacgtctccacctacttcgacaggatccaggaagcgctcttcaaccagtacgtcatcgagaccctctccggcccgccgctagtggacgagagccggatgatggctgaggtgcagaggctccagagcgcgggggcgtccatccccagtgagctcgaagcgacagcgatgccgggcaagtccgggcccactgcccaagagtgggcgcctcacgacggccacgtccaggcgggaaggaggaggggccagcaagcagctgcataggcagaaaacagagcgccatctggatgacggcatctcgattgaccagctccacaagctcagccagaagaacatctctgcgtggagcatgaagaggctgatgaagattgttcggtacggggcgctgacaacgatggacgagcagctcaagcatgcaacgggcgaggacgagctggccacggagatacacagcgagtacgaggccaaggttgctgccaagaggatcttccagaacgtcgccaagcctggatccaattatggattctctgaac

SEQ ID NO: 200974 - DNA, 3439 bp, Zea Mays
tttttttgtccgtagaaagacgggtttttttttgtccagacccgtccgactgctctgttcttatcccccgcctggtaaaggcggcgcctttgtccatcggagccgacgccatccggtgggctgttcctgttccttggattgtgtaacatgttagaggtttgtttggttccgtaaaaagactgcagatttgggatggcagttaccagtggttgtgctcgtggatcgtatgcttgagtcagaactgtatcttgcagtgttgtggttgggttcagtttcaaatgtcagcgatttacctgttgtggtggtgtttatatatatgcgcaactcttgtgttctggtggtgttcatgcataatctcctgggtttagcagtaaagtactctactctcatcgtgtctaagttactttactgttgctgtatactgtgcttgcgcaaaggttgcaccgtttacctgtccatatcctgacttcaagtgtttctgtataattgactgcattgatcttactaacatgactgcgaggttgcaccatttcttctagctatgctaccatgtgccatgtccagcaatatcatttgctttttttttcctacgcacagttgatagaattaccgcacccacctgatcttatactaacatgactgtttagtgtttcaactaaaacaatggttttgctttggacaacctaatggtttcaactaaaacaatgactgttccctgatttctgggacggacaacctaatggattttttttatatataatggaaaaaaccatgttccagccttttgcatcaaggatgcatatggcttcatagtacaatcaacataaacaatccaaaacatcacatactcaacccaactaaaataaaaacatcataacacagtttctcatgaacataaaaaaaacactaataagcctcaattctagcatcgctgcatctccagccatcaccaccacttccattgcacgacaaacatccatccttgatatctcggtgtaaatcatctttttgcagcaacctccaaaatggatgattggatgcttccctcacccagcccaagaacactgatgccaagcttcttcagtgaagagttcatctccactccgttctccaacatcttcgctgacgatagaggcagcaaaccccaggatgaaaacgaggacagtaacacctgcattggttccggtgctcacgaaacctctcaagatgtgaaatgccatcgtccacagatcgaatcgaacatttttggcgtgaatcagaaaccgacctctcctggaggtcttgcggagaggatagctgcaagagccggttttggtgtcctgaaaattgacatatcccgtgtcggttcatctggtgcggcgattcggtctcccgtgacaattccatctggtgtgagcccaagggaacttcttgagtcgccggttttccttccaaatgccatttcgcaaccttctcctaccactggtaaattgccattcctgatgcctaataattttaaatcaacaatgctgtgtggccccgagaagtctgaagaccacttacacgaagattctgcgttttccttccagccctttttgaggtctaaaccaccaacattatggactgcaaagaaggggccaagtgttgttcacgaaaccgggtccttatcaaaggatagccaggaggagctaaaccttcatgctaacccagcagctgcgaccgagcatgaaaccgaggaaagtctagttattagacctaaggcatgtgattccatgttcgacaatggtcatccttcttcccctgacgaaggaccagaacagagcgaggaaaaccaaaaccgggaagattgttcagctccggtcactgcccccggcgaggatggatacaactggagaaaatatggacaaaagcaggtgaagaacagtgagcatccaaggagctactacaaatgcactcacccaagttgccctgtcaagaaaaaggtggagcgttctgtagaaggtcatgtaacggagatagtttacagaggttcgcatactcacccactgccgctgcccagccgccggtcgagcgtccctcccacgcagctcgagtgtggttcacaatctgatggtctggagaacttgagctccaagcctgggcctgcctatcactcagcagcttcacaatcacagggaattgctccagatggccagttccaagatgtgcatagggaagctcttgaaacaaaactgtctggctctcttactacaactgagattgctgacaggcccgttatggatgtctcatcaacactctcctccaatgagaatggtgatagggcagttcctccaaccaatggcaggaacgaagatgagaccgaatctaaaagaaggaaaatggaggcatctgccgctactaacactaccaccaacactggcattgacatggcggctatggcatccagggcttcccgtgagccccggattgtcgtgcaaacgacgagtgaggtcgacatccttgacgatggctaccgctggcgcaagtatggccagaaagttgtgaaaggcaacccgaacccaaggagctactacaagtgcacctacgcgggctgctcggtgcgcaagcatgtcgagagggcctcgaacgatctcaagtccgtgatcacgacgtacgaggggaagcacaaccacgaggttccagctgccaggaacagcggcaacgggcatccgagctctggctccacaccagcaccaccacaggggagcggcggccttcaccggaggctggagccgccacaggtcagcatccctcggttgagcgctgctgctgccgccgccgccgccgccgctgcctacggctcgctctcgcttcgtttcccaccacagctcagcgcagctcccgggggtttctccttcggaatgctccgtcccactggcatggcaccgtctctgggcggcttcttgccagcgcagatgccaggccgtgggttgccgatgcagggctgcgcgggcctggtgctgccgagaggcgaggcgaaggtggtgagcccagagcagcagtccggattgccggtggcgaacgggaatgccgcggcaacctaccagcagcagcagcagcagctcatggccaggtgggctcagggtcatcagatgtgaatactcactccagcaggcacaagagatgaagagatagggtttgtttttttctttttcctttttttttgttgcttgtgtacataaacaatgtcattgtttgtggtttcttctaccgtagctcctttgtttgcttttgagtacagatgattctgataatagtgaggagggagaggggaagggatgaacttggctgctgtgtttcactgaactattcagactagtaataactaataagcttcaacatctgctctttcgcagtgctgtaaccattcaaagacagagactatcccatagatcggtcagtattatttttctggtcgttt

SEQ ID NO: 200975 - DNA, 2080 bp, Zea Mays
ttgtgcatctgacacaggatggtgttaaaaaaatattatccctgcaccagttcgagtttggagaagacgaacttccaccgtcttgggaccctatatcctctccttttaggtacttgttatattctaaatgttctttattacaccatgttctatttttgttggtgtttattttctgtcatgaattttgttttagttagcaatggatgtggcactaagagatcaccttagacagaggagagatgatgatgatgatgacatgatgttgttttttctccctatgctacatatattgggttctagttcaaacatagtaacggaaaagaagcgaaggcatacatcaaagttaagtggcgaagaacatgttcaggagttgctccaaggtcatttgaagaactgtcgggtagcgttcaggatggagcctgaaattttcaaatccttggcaagttatcttagaagggaggggttggtccgtgatacaaggattaaggtcgaggaaaagttagcattcttcttatacatgctcagccataatgcctcatttgaagatctaatagaagaatttgggcacagtggtgatacatatcatcgtcacatcaagcatttctttgacctagttgttcctacactctccaagcaattcctgaagccaccaaatcctaatcatgtccatcaaaaaattgaaaggaatcctaggttttatccctacttcaagaattgcattggtgcaatcgatggcactcatgtgcctatatcgatatcacctgacaaagccgctccatttaggaataggaagggcactcttactcaaaatgtaatggtagcgtgtgattttgatctcaatgtaactttcatatccactaggtgggaggggtccgcgacggatgctagagttcttagggctgcaatgaacaatggctttcaagtacctctggggaaattttatttagtagatggcggttatgccaacacaccatctttccttgccccatatcgcggagttaggtatcatttgaaggaatatggggcaggtcgtcgaagaccacaaaactacaaggagatctttaatcatcgccatgcagtgttgaggaatcatattgaaagggccttgggagttataaagaaacgcttccccatacttaaggttgccacgtttcacaaaatagaaaaccaagtgaagataccggtagcagctgccgtgttgcacaacattattcggtctctcaaaggagatgaacaatggttagaagatcaggcagaaaatgttcaaggcaatgttgttgatattccagatggagatcaaagcaatgatcaaggcagtgaacaaggcaacaatctcagagacacaattgcacaacaaatgtggattgattatcaacaatgcaattagtgatgcattataatatgttttattgttattgggattgcaataagttcttaggaaatgtagtttgtactagttatgatgttttaatgttattcgaatatgctttcagttatgctttaaaaattattgttgttcacaattatgctttcatgttctaattatgctcatgttataagttaccatgcttggaagggggtctccaagattaaacatgcttgcaagggggtctcctagatttaacatgctcttatctaaaggtgcacaaaagaaaaaatctcctatagctactgcttcaaagacacatggaggctctccaaaagatctgctatctttcacttatgtccaatctttcacttgtgccggtgaatggtgatgatgcattgctgcttattgctgacggccgcctgctactgcttgctacttgtaccacgacaacaacgattgctgcttgttgttggccatgtgtgcgaggcctggtcatgcataaacaatggtgcatgtcatgaactctttaactgtagggcatttcagtgcattggatggattacttgtcctgtaatgaaacctataataatggtgcttctatgcgactgctgcaagacatcacttgtctgctatttcttgtgtaaactgaggataattatatgctgttgataaaactatatgcatgaatagaagcctgacgattcctggcct

SEQ ID NO: 200976 - DNA, 1969 bp, Zea Mays
ggattcgtccacacccaggcacataaaagccgcctctcgccgccgactgcaaaccctcgtttttctctctcctgcgctgcgccgtccttcacctccgccgccgaatccgagactctgatctcgggttcaccgcagcgcacagagcacccctgactcccggcccgatccgcgctctcctctccgacgcttcaggaatggcacccgagggttctcagtttgatgctaagcactatgattctaaaatgcaggagctgctgagcactggtgagactgaggagttcttcacttcatatgatgaagtttttgaaagttttgatgacatgggccttcaagagaatcttctgagaggcatttatgcatatggttttgagaaaccatctgcaattcagcagagaggaattgttcccttctgcaaggggcttgatgtcattcagcaagcacaatctggtacaggaaagacagcaaccttctgttctgggatcttgcagcagcttgactatggtctggttgaatgccaggccctggttcttgctcccacccgtgagcttgcacagcaaattgagaaagttatgcgcgcacttggtgactaccttggtgttaaagtccatgcatgcgttggaggaacatctgttcgtgaggaccaaaggattctcgccagtggtgtgcatgttgttgttggtacacctggtcgtgtgtttgacatgctgcgtagacagtccctccgccctgataacatcaagatgtttgttcttgacgaagctgatgaaatgctttctcgtggtttcaaggatcagatttatgacatcttccagcttctgccatccaagattcaggttggagtcttctctgctaccatgccacctgaggcccttgagattacccgcaagttcatgaacaaaccagtgagaattcttgtgaagagagatgagctgacccttgagggtatcaagcagttctatgtgaatgtggacaaggaagactggaagctggacacactgtgtgacctgtatgagaccctggccattacccagagtgtcatctttgtcaacacccgccgcaaggtggactggctcactgacaagatgaggagcagggaccacaccgtttctgccactcatggtgacatggaccagaacactagagacatcatcatgagggagttccggtctggctcctcccgtgtgctcatcaccactgacctgcttgctcgtggtattgatgttcagcaggtgtccctggtcatcaactatgatcttcccacccagccagagaactacctgcatcgtattggtcgtagtggtcgttttggtaggaagggtgttgccatcaactttgtgacccgcgacgacgaacgtatgctgtttgacattcagaagttctacaacgtgttgattgaggagctgcctgccaatgttgctgaccttctgtgatcaatttcaagaaaaaacaaaacaaaaaagggtggtgaggaacctggtaaggcttggttttgtcgaaataccgtgggagagggggtgataaggacggtggggtttctatgttgaagtcgtggtcatggacaatttgtgattttttctcctttatgccatgttttggaatttttgtagctgcctaggccttgtggtaatgtgctgctgtgggggttcattatctttctctttattagtattttgtttaaaactatgtatgaccgaatggtggtatttatttgtgtcatccttgactcttattctgctgcaaccagatgtatcgtgccatgtctgcaccactggtctttgctatcctgagtaaaacctgtttactctgtcgagcttgtcgctgatacaccgatcctagctgttttgagtaaaacctgtttactctgttgagcttgtcacctggtgatgcaaggtgcttattgactggtaatgtattttgaagtcgttatactatctgaaaccccttcctgagcatttgaggtgagtttgtt

SEQ ID NO: 200977 - DNA, 2575 bp, Zea Mays
gtcagccacgttctgatttcgaagaggggcaaaaaagtccaagcagatgatcttttctctgttgatgtatcgaatagctcttcaatggcattttgtctgtaaacagcgtgtgagaatggcgaactagcgaagaccttgtacataatggcatttgggcgaaacccaagtttcataatggcatgattccaaatttctcctctccgcgacgggcgcccatggccatggcagacgaaacccttgcgccctcgtcgtcgtcggcaaagccctaaactttagtccacctccatttcggaaccttagccgggcgttcctgcgccgctgccatgggctgcagtcgccatgtccgttttgtctcctccggcgtcaagctaccgtccgcgtccgcgccatccccgttcccggcgcccgctcccgcgctcctctctgcggcgctcccgttcgcgcacatcggccgcgccatcgacgccgccgcgcgccgcctgggcgcatgcctgccccgcgtcccggttgcacgggccgacacggctccgcccccgccgcggaggcacgggaaggacggcggaggggccgaggagcgggtgctgatcagcgaggttgcggtgcggggaaaggacggggagccactggagcggcccgagctggaggccgaggccgcggcggcgctgcgcgcgtgccgccccaatgccgcgctcaccgtgcgggaggtgcaggaggacgtgcaccgcatcgtcgagagcggactcttccgatcgtgtggagccgaaccaagacttccatgggctggtatgcgagggtgccaacttgctaccgtccaagttcctggaagatgcattttgtgttcgccatggaaaaattattaacattaggcatctggatcaagtgatcaagtccgtcaatggatggtatcaggagcgtggcctaactgggttggtctcatatgctgagatactttctggagggattctgaggctggaggtttcagaagctgaggttaataacattagcattcgctttctagacaggaagactggtgaaccaacacttggaaaaacacagccggaaaccatccttcggcagcttaccaccaggaaagggcaggcttacaatagggcacaagtgaaaagggatgtagaaacaatacttactatgggaataatggaggatgttacgataattccacaaccagttggagattctagtaaagtggaccttgtcatgaatcttgttgaacgcccttcgggtggtttctctgctggtggcggaatttcaagtgggataacaaatggacccctttctggacttattggcagctttgcgtattcacatcggaatgtttttgggaggaacaagaaattaaatctctctttggaaagggggcaaatcgattcaatatttagattgaactttactgacccttggattgatggtgacaacaagagaacctccagaactgttatggttcagaactctaggactcctggaacacttgtccatggtggtgatcatcctgaccatgggcctataacaattggacgtgttactgctggcttggaatatagtcgaccattcagacccaagtggagtgggacacttggcttaatttttcagcatgctggcgctcgtgatgataaagggaatcccgccatcagggatttctataacagccaattaactgccagtggacatgattatgatgatacattgctagctaaatttgaaagtatctacacagattctggggaccatagctctgcaatgtttgttttcagcgttgagcaaggtctccctgttcttcctgagtggctaagcttcaacagagtgacaacacgtttgaggcagggctatgaaattggtcctgctaggcttcttctaagtgcctctggaggtcacgtggagggaaattttccacctcatgaagcatttgcaattggtgggacaaatagtgtaaggggatacgaagaaggtgctgttggctctgggcgttcttatgctgtaggtagtggtgaagtgtcatgccgcatgtttgggccactggaaggcgtggtctttggcgactatggtagcgatcttggttctggtcctaaagttcctggtgacccagccggagctcgtggaaagccaggtagtggctatggctacggtgttggcgtccgcgtggactcccctctgggacctctgcggcttgagtacgccttcaatgataggcaagcaaggagatttcactttggtgttggctacagaaattgacatgtatattgattacattcagattcagccttgttcttcttagcattttgggctggtagaagatagtgccatgccttccaatttttggcgtttatcaaagcaaattttgtttagatcagatttctttttttctgtaacatatagtttccttctccacttctgtcgagtgttctccagctagagaaattagatggccccctgtaacgccctgaatttggggtaagattttttcttcttttctctcaccaaattcgggtgttactctcttttctctttccccgtttgctccttctccccaatttcaaactagtatagcgacaggtgtccg

SEQ ID NO: 200978 - DNA, 1685 bp, Zea Mays
caatgggaaagcagacatgcctagtgagcgcggatgttaacatacaaaataggaacgaaggtctcatatgctgagatactttctggagggattctgaggctggaggtttcagaagctgaggttaataacattagcattcgctttctagacaggaagactggtgaaccaacacttggaaaaacacagccggaaaccatccttcggcagcttaccaccaggaaagggcaggcttacaatagggcacaagtgaaaagggatgtagaaacaatacttactatgggaataatggaggatgttacgataattccacaaccagttggagattctagtaaagtggaccttgtcatgaatcttgttgaacgcccttcgggtggtttctctgctggtggcggaatttcaagtgggataacaaatggacccctttctggacttattggcagctttgcgtattcacatcggaatgtttttgggaggaacaagaaattaaatctctctttggaaagggggcaaatcgattcaatatttagattgaactttactgacccttggattgatggtgacaacaagagaacctccagaactgttatggttcagaactctaggactcctggaacacttgtccatggtggtgatcatcctgaccatgggcctataacaattggacgtgttactgctggcttggaatatagtcgaccattcagacccaagtggagtgggacacttggcttaatttttcagcatgctggcgctcgtgatgataaagggaatcccgccatcagggatttctataacagccaattaactgccagtggacatgattatgatgatacattgctagctaaatttgaaagtatctacacagattctggggaccatagctctgcaatgtttgttttcagcgttgagcaaggtctccctgttcttcctgagtggctaagcttcaacagagtgacaacacgtttgaggcagggctatgaaattggtcctgctaggcttcttctaagtgcctctggaggtcacgtggagggaaattttccacctcatgaagcatttgcaattggtgggacaaatagtgtaaggggatacgaagaaggtgctgttggctctgggcgttcttatgctgtaggtagtgtttgggccactggaaggcgtggtctttggcgactatggtagcgatcttggttctggtcctaaagttcctggtgacccagccggagctcgtggaaagccaggtagtggctatggctacggtgttggcgtccgcgtggactcccctctgggacctctgcggcttgagtacgccttcaatgataggcaagcaaggagatttcactttggtgttggctacagaaattgacatgtatattgattacattcagattcagccttgttcttcttagcattttgggctggtagaagatagtgccatgccttccaatttttggcgtttatcaaagcaaattttgtttagatcagatttctttttttctgtaacatatagtttccttctccacttctgtcgagtgttctccagctagagaaattagatggccccctgtaacgccctgaatttggggtaagattttttcttcttttctctcaccaaattcgggtgttactctcttttctctttccccgtttgctccttctccccaatttcaaactagtatagcgacaggtgtccg

SEQ ID NO: 200979 - DNA, 2823 bp, Zea Mays
gatgttaacatacaaaataggaacgaaggtctcatatgctgagatactttctggagggattctgaggctggaggtttcagaagctgaggttaataacattagcattcgctttctagacaggaagactggtgaaccaacacttggaaaaacacagccggaaaccatccttcggcagcttaccaccaggaaagggcaggtcagagcgcattttcaggagtacctttctcaatctgtctatgttttatatacctcaggaggactattgatgatatgctaaaatgcaaatagcatctttcagtcatgttcttctagatgtcgcatgaaatgctaacccttccaacttcacatttttttggatttcatgttctgttttgcattattcaagcactgaaatttctatgcaaaggctaataccagaatcaccagcattgataacaatataggcgtatcagtttggttggcgacttccgacttggagcccacataaccaagtccctcttttcttttattatgattgtgtatattctgtcattttcacagtaatatttggactcagactgggtgctttggacttaacattatgaaaataagcactgcagcattctgaaccaaaataatattatcaaccatctaaaaactatcacgtcgcaatagtatataaattttaacgttttatccatgtcctgttgtcttatgctctaacattaatattgcctgttaaaacttcaaattagtcgtgtctatttaaaattaagcaggcttacaatagggcacaagtgaaaagggatgtagaaacaatacttactatgggaataatggaggatgttacgataattccacaaccagttggagattctagtaaagtggaccttgtcatgaatcttgttgaacgcccttcgggtggtttctctgctggtggcggaatttcaagtgggataacaaatggacccctttctggacttattggcagctttgcgtattcacatcggaatgtttttgggaggaacaagaaattaaatctctctttggaaagggggcaaatcgattcaatatttagattgaactttactgacccttggattgatggtgacaacaagagaacctccagaactgttatggttcagaactctaggactcctggaacacttgtccatggtggtgatcatcctgaccatgggcctataacaattggacgtgttactgctggcttggaatatagtcgaccattcagacccaagtggagtgggacacttggcttaatttttcagcatgctggcgctcgtgatgataaagggaatcccgccatcagggatttctataacagccaattaactgccagtggacatgattatgatgatacattgctagctaaatttgaaagtatctacacagattctggggaccatagctctgcaatgtttgttttcagcgttgagcaaggtctccctgttcttcctgagtggctaagcttcaacagagtgacaacacgtttgaggcagggctatgaaattggtcctgctaggcttcttctaagtgcctctggaggtcacgtggagggaaattttccacctcatgaagcatttgcaattggtgggacaaatagtgtaaggggatacgaagaaggtgctgttggctctgggcgttcttatgctgtaggtagtggtgaagtgtcatgccgcatggtaaacttctttctcctcccaaccttactggcattttgtagttgtcaaatgggctccacgtggaagtatgccaaaatccagacacaattgtatggtaatttacctcagaatgctgtattggcaacaagggtatacatatctacataattcattataactggtactatcttagtatgatttgcaatttaagtaaaatttctttctcagatttagtttaatatatagctaactcagaaaggaaataaacaggtgggcatcctgtcacactgttcaagactcgaatacagattagatatggagcattttgtgcgtgtgtgtgcgtgcacccacactttttttatctgtatgcatgtatggaaccttctactgataggcgcctgacccagaagtaggaccccaaattaaaacacaatagagcagaccagtgctggaggcttccacatgagtgggatggggtcagtcttggaatgtgaatatctagcaatgaatattttagcaaaagcaagatgaatattcaacgtggggtggggtcagtcttggaatgtgaggctgccatttgattacttaatgttcttgttctgaatgcagtttgggccactggaaggcgtggtctttggcgactatggtagcgatcttggttctggtcctaaagttcctggtgacccagccggagctcgtggaaagccaggtagtggctatggctacggtgttggcgtccgcgtggactcccctctgggacctctgcggcttgagtacgccttcaatgataggcaagcaaggagatttcactttggtgttggctacagaaattgacatgtatattgattacattcagattcagccttgttcttcttagcattttgggctggtagaagatagtgccatgccttccaatttttggcgtttatcaaagcaaattttgtttagatcagatttctttttttctgtaacatatagtttccttctccacttctgtcgagtgttctccagctagagaaattagatggccccctgtaacgccctgaatttggggtaagattttttcttcttttctctcaccaaattcgggtgttactctcttttctctttccccgtttgctccttctccccaatttcaaactagtatagcgacaggtgtccg

SEQ ID NO: 200980 - DNA, 2186 bp, Zea Mays
tgggttctggtgtccccattagttgatgtcatcatgctgagcattttgtggtagagacgatcatctctttgggttccagcatataactcatgcccataaaatttgcactagaaaatatgtcgacacaagcctctaaccggtcatacagatatccagacagaacccaactgccgtaccacaatggcaatccaatgcatgttgggggcaatggtaattactgtgtgcaacaaaatcacgatgatgttaactacatttcctctgatgatggatcacagagcagtagttctagagttcaagattttcaagcacagttttgcaccctagattcgtcttcggccaattgtgtttatcctgcacatagttctacctcttctcagagcataagtggaagccctctgtctcagcaggagagccactctgatcatgcatatggttcctctccaagtgcatcgtgcatcactcaggttcccacctggacacttaaggatctagaaaatgtgatgcttggacccgattctgacataggtagccctgacagttcctttctgcttgacactgccttgcatggaaataactggagagaacttttgggaattcaaactggggatttgaggcaggtaattgtagcatgtggtaaggctgttgacgagaatgctgtctatatggatgcattgatgtctgagttaagggagatggtttctgtctctggtgaaccgatgcaacgtctgggagcttacatgttggaaggcctcattgcgaggctttctttcactggacatgccttgtataaatctctgaagtgcaaagagcctgtggctacgagttctgagctcttgtcctatatgcatcttctttatgagatctgtccattcttcaagttcggttacatgtctgccaatggtgccatagctgaagcggttaagggggaagacattattcacatcatcgattttcaaatcgctcagggtagtcagtggatgactatgatacaggcccttgcttcaaggcctgggaggcgaccatacctaaggatcactggcatagatgactcgaattctgctcatgcccgaggtggtggactggatatggttggacagaggttgcacagaatggcccagtcatgtggtctgcccttcgagttcaatgctgtgccagcagctagtcatgaggttgtgtttgaagatctttgtctaagatctggggaggccatcgttgtcaattttgcttatcagctgcatcatactcctgatgagagcgtgggcatagaaaaccatcgtgatagaatactgagaatggtcaagagcctctctcctaaggtggtaactcttgtagagcaggaggcaaacacaaacacagcacctttctttcttagatacatggagactcttgattattacacagcgatgtttgaggcaatagatgttgcttgccccagggatgataagaagcgcattagcacagagcaacactgtgttgcaagggatattgtcaatttaattgcttgtgaaggtgcggaaaggatagagagacatgagccttttggaaagtggagggcaagacttgtaatggctggttttagaccatacccgttaagtccagtggtgaacagaaccatcaaaacactgcttgacagttaccacagccattacaggcttgaggagagagatggcatcctttatcttggctggaagaacagaaagctggtcgtatcttctgcctggtgctgatatttccaacttcttctaagaagcattgttaagattctttcgtggcttggggttcaggcgttcagcacatgaatccaaggtggaacctaaacttcagtatgaagactgcacaatcaaaaaaacaagctggttgcttccttactatttgttgcccagccttgaaactctcccacgctcactatcatcgctgatgtacttaccatgactcagttccatccttatatataggtgcaaacaatggtcttaatattgtatattggtagaatctggtggtattagcttccaaatctggattgctgaatcgtttgtgttactacatttagccaggatttgacagtagacacaaggagtgctgtaagatcctgtatgtacaacgtgcttcagttggtgtattgtacgtacttgggtgctatggctggtttggttatcacagtgctgagtgctgcactgttcggcgtt

SEQ ID NO: 200981 - DNA, 2395 bp, Zea Mays
gccctcgtcattttccccgcagcgacgacgattcagtgaggcacccctctcctggcctcttctcgccttctccgtttccgcgaacccagctgcctcgtagccccaccacaccgccgagcacgcggtctcccgcgccgccttccacccaagcgaagctacccctactcgacccagaattatcttctaccagcgctagtccgctccgcctctctactggctgccgtggagtggggatccgtccggacttccttctttcgctgttgatgtcatcatgctgagcattttgtggtagagacgatcatctctttgggttccagcatataactcatgcccataaaatttgcactagaaaatatgtcgacacaagcctctaaccggtcatacagatatccagacagaacccaactgccgtaccacaatggcaatccaatgcatgttgggggcaatggtaattactgtgtgcaacaaaatcacgatgatgttaactacatttcctctgatgatggatcacagagcagtagttctagagttcaagattttcaagcacagttttgcaccctagattcgtcttcggccaattgtgtttatcctgcacatagttctacctcttctcagagcataagtggaagccctctgtctcagcaggagagccactctgatcatgcatatggttcctctccaagtgcatcgtgcatcactcaggttcccacctggacacttaaggatctagaaaatgtgatgcttggacccgattctgacataggtagccctgacagttcctttctgcttgacactgccttgcatggaaataactggagagaacttttgggaattcaaactggggatttgaggcaggtaattgtagcatgtggtaaggctgttgacgagaatgctgtctatatggatgcattgatgtctgagttaagggagatggtttctgtctctggtgaaccgatgcaacgtctgggagctttctttcactggacatgccttgtataaatctctgaagtgcaaagagcctgtggctacgagttctgagctcttgtcctatatgcatcttctttatgagatctgtccattcttcaagttcggttacatgtctgccaatggtgccatagctgaagcggttaagggggaagacattattcacatcatcgattttcaaatcgctcagggtagtcagtggatgactatgatacaggcccttgcttcaaggcctgggaggcgaccatacctaaggatcactggcatagatgactcgaattctgctcatgcccgaggtggtggactggatatggttggacagaggttgcacagaatggcccagtcatgtggtctgcccttcgagttcaatgctgtgccagcagctagtcatgaggttgtgtttgaagatctttgtctaagatctggggaggccatcgttgtcaattttgcttatcagctgcatcatactcctgatgagagcgtgggcatagaaaaccatcgtgatagaatactgagaatggtcaagagcctctctcctaaggtggtaactcttgtagagcaggaggcaaacacaaacacagcacctttctttcttagatacatggagactcttgattattacacagcgatgtttgaggcaatagatgttgcttgccccagggatgataagaagcgcattagcacagagcaacactgtgttgcaagggatattgtcaatttaattgcttgtgaaggtgcggaaaggatagagagacatgagccttttggaaagtggagggcaagacttgtaatggctggttttagaccatacccgttaagtccagtggtgaacagaaccatcaaaacactgcttgacagttaccacagccattacaggcttgaggagagagatggcatcctttatcttggctggaagaacagaaagctggtcgtatcttctgcctggtgctgatatttccaacttcttctaagaagcattgttaagattctttcgtggcttggggttcaggcgttcagcacatgaatccaaggtggaacctaaacttcagtatgaagactgcacaatcaaaaaaacaagctggttgcttccttactatttgttgcccagccttgaaactctcccacgctcactatcatcgctgatgtacttaccatgactcagttccatccttatatataggtgcaaacaatggtcttaatattgtatattggtagaatctggtggtattagcttccaaatctggattgctgaatcgtttgtgttactacatttagccaggatttgacagtagacacaaggagtgctgtaagatcctgtatgtacaacgtgcttcagttggtgtattgtacgtacttgggtgctatggctggtttggttatcacagtgctgagtgctgcactgttcggcgtt

SEQ ID NO: 200982 - DNA, 2105 bp, Zea Mays
ccgattccacacagggccggcagtagtgcacagtgcagccgctgctgctctgccctctacggctacgagtgcgaggagccgaggacacctttccctttcccttccacctcccctcccctccgtctctcgtccccattaatatctagccgcctctccccccgtctcttctccaaaactgtgagcgagaggcagggagtgcgctcgacggccgccgccattagtgatttagtgttgagagagggagagaatctaaagtgaccggacgctgtccttccttgctgatcggcgacacggtccatccctccctcgctcgctagggttccttttcgtccatggatcagagcttcgggaatctcggggccggagctgggagcagcagcgggggctccaactccaaggcggcggcagccgccgtgtcctcctcgtctttcctgcagctgccgctgtcgacggcgtcccccgcgtactacggcgcgccgctcgcgctcctgcaccacgccgccgcggccccgtcgtcgtcgcagcagcaccagcagcagcagcaccaccaccactacgccaggcacggcgccgagatgtcggcagcggaggccgaggccatcaaggccaagatcgtggcgcacccgcagtactcggcgctcctcgccgcctacctcgactgccagaaagtacttcgcttgagctaccccgaccccggctggcgtgacctgccgtcggaaaaaccgcatctttttttatatcttgattcgtgaagcgagatttgcttaatttgatgcgtaaatctatccacgcctgtcgcgtcctcacgctcaccctcacagtcacaggacagcacggtggctatgaaatgatgcgcgcgctgtgtctgtgtgattgcaggtgggcgcgccgccggacgtgctggagaggctgacggccatggcggcaaagctggacgcgcgcccgccgggccgccacgagccgcgcgacccggagctggaccagttcatggaggcgtactgtaacatgctcgtcaagtaccgggaggagctcacccggccgatcgacgaggccatggagttcctcaagcgggtggaggcgcagctcgactgcatctccggcggcggcggctcctcctcagcgcgcctctcgctcgccgatggtaaatcagaaggtgttggctcttctgaagatgacatggacccgaatggtcgcgagaacgatccgccggagattgacccacgagcggaggacaaggagctcaagtaccagctgctgaagaagtacagtggctacctgagcagcctcaggcaggagttttccaagaagaagaagaaagggaagctcccaaaggaggccaggcagaaactcctccactggtgggagctgcactacaagtggccgtacccttcagagacggagaagattgcgctcgcagaatcaacgggcctagaccagaagcagatcaacaactggttcatcaaccagaggaaacggcactggaagccatcggaggacatgcctttcgtgatgatggaaggcttccacccgcagaacgccgctgctctgtacatggacgggccgttcatggccgacggcatgtatcgcctcggttcatgaactacacacttccatggacgactgtgggggcctatccaatcgtcggaccgtgggagtatatttcagtgttgcggtgcaaggacattgttgtggaatttttgttgctgattgccaaggggtgggtcggtcgatgtagcgtctatgcatggcttgtagttctcctgtaatgttgttgttaatttccgcttggcggcttgtaatctaggtgtatctctggaacttgaatcctgggtgattaatccggcaagcagctgcctgtttgtatgattgtatggttcgggttggtggaacatgatgcatgctaaggcgtggcctgtctggatcaaaaaaaaagaagatgtcttttgtaccagtggaatgattggaacttcagattgctgaacatttccgatctacattcacttgtttgtttgaagctctgaagatccagaaagtcgacagcgtttatgcatgttgtagtgctgccgtttcattcgtggatctggtgtagtggtaccatctttgtt

SEQ ID NO: 200983 - DNA, 1007 bp, Zea Mays
tttagcttagttattgcacctgtttctgaatcgtgaaatgatggtaaatcagaaggtgttggctcttctgaagatgacatggacccgaatggtcgcgagaacgatccgccggagattgacccacgagcggaggacaaggagctcaagtaccagctgctgaagaagtacagtggctacctgagcagcctcaggcaggagttttccaagaagaagaagaaagggaagctcccaaaggaggccaggcagaaactcctccactggtgggagctgcactacaagtggccgtacccttcagagacggagaagattgcgctcgcagaatcaacgggcctagaccagaagcagatcaacaactggttcatcaaccagaggaaacggcactggaagccatcggaggacatgcctttcgtgatgatggaaggcttccacccgcagaacgccgctgctctgtacatggacgggccgttcatggccgacggcatgtatcgcctcggttcatgaactacacacttccatggacgactgtgggggcctatccaatcgtcggaccgtgggagtatatttcagtgttgcggtgcaaggacattgttgtggaatttttgttgctgattgccaaggggtgggtcggtcgatgtagcgtctatgcatggcttgtagttctcctgtaatgttgttgttaatttccgcttggcggcttgtaatctaggtgtatctctggaacttgaatcctgggtgattaatccggcaagcagctgcctgtttgtatgattgtatggttcgggttggtggaacatgatgcatgctaaggcgtggcctgtctggatcaaaaaaaaagaagatgtcttttgtaccagtggaatgattggaacttcagattgctgaacatttccgatctacattcacttgtttgtttgaagctctgaagatccagaaagtcgacagcgtttatgcatgttgtagtgctgccgtttcattcgtggatctggtgtagtggtaccatctttgtt

SEQ ID NO: 200984 - DNA, 2282 bp, Zea Mays
atctctttctctttctctctctctctctcctgaaatctctctctcgctgacctgagagttatccaaatactctggtatggcgagatccccctcctcgggttcccactcaactgctgtatcgtagtagtcgactacttccctgcaatccgttggtcagctcacaatagcagatgagtccattggaggagttcgactagtctccaccgctgctgcgagattccgccagattataaaacttctgcccgagcaaagcggccgaccaagttaccacagagcaagtcagcgaggcgaaataggcgaccaagtcccaaccgagtaagaaagggagacgaaactgccgaccaagtctctaggcccacaagagccaggcggagggcgagggcgagggcaaggacgagatgatgtcgcaggaccagatggactcgccggtggacaacgatgtcagcagcagccgcaggtcgcctcgcaggggcgtcggggcgcccctgaagaaagggccctggacggacgcggaggacgccatcctgatagactacgttaagaagcacggcgtgggcaactggaacgcggtgcggaagaacaccgagctattgcgctgcggcaagagctgccgcctcaggtgggcgaaccacctcaggcccaacctcaagaaggaggccttcaccccggaggaggagcgcctcatcatccagctccacgccaagctggggaacaagtggtcgaggatggctattcatttgccagggcgtactgacaacgaaataaaaaactactggaacacacgaaaaaagagatgtgaacgagctagccttcctatctatcctgctggtgtacgtaatcaatcttcaaatgaagaccagcaattgtctggtgatttgaacggtggcgagaacatgtccaatgatcttctatccggaaacagcctttgtctaccagattttaacaatgacagtttccgtgcgaaactgaaggctttaccaccacagctgccagctgtttcaataagcaatttgctcggccaaagctttgcatcaaaaggttgtagcttcatggatcaggtagaccaagcagggatgctgaaacaatctggcagtgcgcttcctacattgagcgatgccattgacgatgtgatttcctcggttgatcaattttcaaatgactctgagaagctcatgcagactttaggttttggttatctcaatgaagccaacgctaccagcaagagtattgcgccttttggggttgcacttactggcagccatgcccctttaaatggtattttctctgcatctaggctcacaaatggtccttcgaagatggagcccccttcagtccaaaatagcaggctcaagtatactgtggatcctgcaatgcagcctactgagttagtagatccttacatgcagtctctatcagcgaccccttcagtgaaatcagagtgtgcatcgccgagaaacagtggtcttttcgaagagctgcttcatgaacctcatgcactaagatctgggaagagccaacaaccatcggtccgaagttcaagttcttctgctggcacaccttatgggactatggttagctcagaatttgatatgggtcaggaatattgggaagaacagcccggttctctcctcagcgaatatgctcacttcagtgggaattatttggctgaatgcgctcctcctgttagcgctgcatcaactgatatctttccgctccccaagatttctcctgcagaaagcccttcaatgggctctggcgagcaggcgttagagcctaaacatgagtcagcagcttcacgtacgtcatcttggaaacttgaggcatgatgcattattctctgggaacacagcccattcatccagtttcaacgataccatagcaatgctcatcggcgatgtacctgttcttggtgatggaattgtgctcgattcttcctcatgggacaacatgccacatgcttttcaaatggcggaattcaaatgagttccatataatttctttgtgatgctgaagggcttcttcctgcttagatccttgtgatcttcatgcggatagtccttttgtctaattaagtgcatggaagataacctggatattatttttaattttttgctttgtattagagaaccgtttttgccatccctgacagcatttctgttggaaacgtgtcatgacttttgtttgaacaatttaaatatcggttatagataatgtgatgtgtgccatcccttgatgcaattgcatgtggtagcaaattgttgaagtatacgctgtcattgctg

SEQ ID NO: 200985 - DNA, 2245 bp, Zea Mays
atctctttctctttctctctctctctctcctgaaatctctctctcgctgacctgagagttatccaaatactctggtatggcgagatccccctcctcgggttcccactcaactgctgtatcgtagtagtcgactacttccctgcaatccgttggtcagctcacaatagcagatgagtccattggaggagttcgactagtctccaccgctgctgcgagattccgccaggttccgcgcataccctgacggcaagccatgtaccgggtgaagagccaggcggagggcgagggcgagggcaaggacgagatgatgtcgcaggaccagatggactcgccggtggacaacgatgtcagcagcagccgcaggtcgcctcgcaggggcgtcggggcgcccctgaagaaagggccctggacggacgcggaggacgccatcctgatagactacgttaagaagcacggcgtgggcaactggaacgcggtgcggaagaacaccgagctattgcgctgcggcaagagctgccgcctcaggtgggcgaaccacctcaggcccaacctcaagaaggaggccttcaccccggaggaggagcgcctcatcatccagctccacgccaagctggggaacaagtggtcgaggatggctattcatttgccagggcgtactgacaacgaaataaaaaactactggaacacacgaaaaaagagatgtgaacgagctagccttcctatctatcctgctggtgtacgtaatcaatcttcaaatgaagaccagcaattgtctggtgatttgaacggtggcgagaacatgtccaatgatcttctatccggaaacagcctttgtctaccagattttaacaatgacagtttccgtgcgaaactgaaggctttaccaccacagctgccagctgtttcaataagcaatttgctcggccaaagctttgcatcaaaaggttgtagcttcatggatcaggtagaccaagcagggatgctgaaacaatctggcagtgcgcttcctacattgagcgatgccattgacgatgtgatttcctcggttgatcaattttcaaatgactctgagaagctcatgcagactttaggttttggttatctcaatgaagccaacgctaccagcaagagtattgcgccttttggggttgcacttactggcagccatgcccctttaaatggtattttctctgcatctaggctcacaaatggtccttcgaagatggagcccccttcagtccaaaatagcaggctcaagtatactgtggatcctgcaatgcagcctactgagttagtagatccttacatgcagtctctatcagcgaccccttcagtgaaatcagagtgtgcatcgccgagaaacagtggtcttttcgaagagctgcttcatgaacctcatgcactaagatctgggaagagccaacaaccatcggtccgaagttcaagttcttctgctggcacaccttatgggactatggttagctcagaatttgatatgggtcaggaatattgggaagaacagcccggttctctcctcagcgaatatgctcacttcagtgggaattatttggctgaatgcgctcctcctgttagcgctgcatcaactgatatctttccgctccccaagatttctcctgcagaaagcccttcaatgggctctggcgagcaggcgttagagcctaaacatgagtcagcagcttcacgtacgtcatcttggaaacttgaggcatgatgcattattctctgggaacacagcccattcatccagtttcaacgataccatagcaatgctcatcggcgatgtacctgttcttggtgatggaattgtgctcgattcttcctcatgggacaacatgccacatgcttttcaaatggcggaattcaaatgagttccatataatttctttgtgatgctgaagggcttcttcctgcttgttttggggtcaatatcagggaacgccccactgattgtgacgctgcattcctgacagagatccttgtgatcttcatgcggatagtccttttgtctaattaagtgcatggaagataacctggatattatttttaattttttgctttgtattagagaaccgtttttgccatccctgacagcatttctgttggaaacgtgtcatgacttttgtttgaacaatttaaatatcggttatagataatgtgatgtgtgccatcccttgatgcaattgcatgtggtagcaaattgttgaagtatacgctgtcattgctg

SEQ ID NO: 200986 - DNA, 1092 bp, Zea Mays
aaaagcccacatagcctctccctctctctgtcgcacgccaccacccagaggccagagcgcaaaacccacgaccccacctcgcatcctccccgtcgccgtcgccgtcgcaatcgcaacccacgccgtcgcacgccacctctccctcggctccgacgatgtcggcgccatccgacgccgcggcggcatccgcagctcccgcgcccgcgccgacgactgccgccgcctcctctagcggcgggttcaccttcaagctccacccgctggtcattgtgaacgtctccgaccaccacacccgcgtcaaggcccaggccgcctgctctgcggacagctcctccccctcgtccgggccgggggccgggcagccgccgagggtgttcgggtgcgtgatcggggtgcagcgcgggcggaccgtggagatcttcaacagcttcgagctcgtgctcgacccagtctccggcaccctcgaccgcgccttcctcgagaagaagcaggagctctataagaaggtgttccctgacttctacgtgctcggttggtactccactggaagcgatgtgcacgacaccgacatgcaaatccacaaagccttgatggatgttaacgaaagccctgtttatcttctattaaatcctactatcaacctctcccagaaggatctccctgtgactatttatgagagtgagttgcatgtcatcgatgggtgtcctcagcttatctttgtcagatcaaattatacaattgagactgtagaggctgagaggatatctgtggaccatgttgcccatctcaaaccatctgatggtggttcagcagcaactcagttggctgctcatcttacaggaatacacagtgccatcaagatgctcaatagcagggtccgtgttatccatcagtatcttgttgccatgcaaaaaggtgacattccaatggacaattcgctgcttaggcaagtctcaagccttgtaagaaggctaccggctacggaatcacagaaattccaagatgactttttaatggaatacaacgacactctcctcatgacttacctggcaatgttcactaactgttcaagcgcgaggtcatgtgtcacct

SEQ ID NO: 200987 - DNA, 1425 bp, Zea Mays
gtcactttgacatcctagttatcgtaccgctctttaaattcagggttcagagcaagaaaggatatatttatgaatttgtgaagcttgctgatgatgtattaataaatttaaattttttctttcttctctatatgacacgttgccttttttatgtaaatggaaatgctcttttttttcatccagcaacacctaaggtttattcacagagttgcatgtcatcgatgggtgtcctcagcttatctttgtcagatcaaattatacaattgagactgtagaggctgagaggatatctgtggaccatgttgcccatctcaaaccatctgatggtggttcagcagcaactcagttggctgctcatcttacaggaatacacagtgccatcaagatgctcaatagcagggtccgtgttatccatcagtatcttgttgccatgcaaaaaggtgacattccaatggacaattcgctgcttaggcaagtctcaagccttgtaagaaggctaccggctacggaatcacagaaattccaagatgactttttaatggaatacaacgacactctcctcatgacttacctggcaatgttcactaactgttcaagcacaatgaatgagttggtcgagaaaatcaacacaagctatgagagaccgactaccaggagaggaggccgaggtgctttcatgtagctcacctgccatgatcctgctgctgctttcatctgtgaggatttttcgggagtagcttatgtccctggtcatttttttgcatgcaatctatcatgcgcaatcggctatacggcagctcttgagtcacttcaaactttctaggcaaaactgatgatttgctggaattgtatcagatcccacctgtgctgaagttgatatgtaaagttcctcacccagttattctatttgactctaaggctagtttggaaacttcaatcctcttcgggattagggtgtattaaaggctagtttgggaatctccttttcttaagagaaattagtttattttctcttgagaaaataagaatcattcggaaaaatgtagttcccaaactagccttaaacgtggaaattagttcatttctctttaaatccccttcaatcctggaatggatttgagtttttaaactggtgtagtttggagactcaaatccccttcgggatcttcgggattgaaggggatttgaagagaaataaactaatttccccctcctctggctagtttagaaactctaatcccctccgggattagaggggattgagggagaaattagtttacttctcttcaaatcgctttcaatcccaaaaggaatttgagttttcaaactagccctaaaagggatattaatgctggtttcgtcacattcacggtcaacaaaacttaaatcatttgttacgctgcttgatgtaacgctatgatcaat

SEQ ID NO: 200988 - DNA, 1358 bp, Zea Mays
atatgtccttattgtaggcgtgcacacccgtgttctgcctctcgacgcctgtctgcccgcgccccccgcttgtgatgcccatctcgtctccccgctgtggcagccgccttcgcgtccgccgcgagatccctccgcgcacgggcgcgtcccccacaaaccgcgctccgtgaaatccgcactcccctcgccgcctccccagcccgcagcctctcctcaacctccctccccaaggagctggcggcggcgcgactgcgtcgggagaggacgcagaggacgccgcgcgggggctgcggcaggagctcgactccgagcaggcctccccggagatggcagccagatccggctattgagccccctaaccgagcggatccaagatagttttttttgtctccagttgctctacacagcaagtctatgaggaaggagcaaaagaagttgctctttcagttgtcagcggaattaatttaactcaagcatacttgcctatggcaaacaagcagtggacttacacaatgatcgaaatgacagactgttcgtgctatcggtttggaaagaacatgtggaaagctaatctcggatcttgcttccttcagacccaaaggaccttgaacagcaaaatctaaggtttcaacattgcagacacacaagagtccagcatgcgccaacgctcctgcagttgatgcttcttccagtagtttgtgacagattgctcaaagaaaagcaagacagctcgccaatcctagaagtggaaaaaaacaacatagaataattagccagctacagggagtaaaccattaagagaagaaacatcgtaatgccatgtttccaaatgggcacaaagaaacttcaagcacctctagacggaagctgtctgcactgaagatcaggacacgaatatcgcgagctttatcaaggctcgccttgtgcggaaggtgtatttctgtgagatctccaagatgaagcattagggggtcaatcgccccagattttacatgtagctaacttagtagggcacccataatccataatttattctctgtagttgtagcagcgacctagaggtgttattctgtagcacattgtgtaacatgtaggagagagataaacacatatccccattctttctactgaaacaccagaaatagttgctcttgctccataattcattaatgtgaacttctgaagccatgccaaggtcttatattgatcctctgttgtcatattgataaaaatagggtatgtaaaaccttttctcataacagtttaacacatattttatatataagttatcgtaatattacatgtttccgttgcaacgcacgggcactcacctagtgtcataataagtattggatgtt

SEQ ID NO: 200989 - DNA, 2045 bp, Zea Mays
atatgtccttattgtaggcgtgcacacccgtgttctgcctctcgacgcctgtctgcccgcgccccccgcttgtgatgcccatctcgtctccccgctgtggcagccgccttcgcgtccgccgcgagatccctccgcgcacgggcgcgtcccccacaaaccgcgctccgtgaaatccgcactcccctcgccgcctccccagcccgcagcctctcctcaacctccctccccaaggagctggcggcggcgcgactgcgtcgggagaggacgcagaggacgccgcgcgggggctgcggcaggagctcgactccgagcaggcctccccggagatggcagccagatccggctattgagccccctaaccgagcggatccaagatagttttttttgtctccagttgctctacacagcaagtctatgaggaaggagcaaaagaagttgctctttcagttgtcagcggaattaatttaactcaagcatacttgcctatggcaaacaagcagtggacttacacaatgatcgaaatgacagagtatactgttcgtgctatcggtttggaaagaacatgtggaaagctaatctcggatcttgcttccttcaggtacagacaacccttgtttttataggagttgtcagagaattgttttcgtgattaaacatgtgtgtttgtttagtggctggtattgttatcatatacccttgtttttagttctatacatattccttaagcatgagcaaattgggggcatttttagtgaagcaattactggtatgtacatgcaattactggtatgtacatggttaatcaaataatttgcatcatggatgttgttttagtgattaatcactcagaaccgatttcctgatgaactggatacactgtttagtgccagctattatttaagcacaagaagtagtcatatacccttgtttttatgtctgtacataccacctggaaatttacacatggggccattttttagtgaagcaattactaaacctgtatagttctggtggctgctataatttttcctgattaatcagagaattgttttagtgattaaccatgtgtgtttagtggctggtattgttgtcatataccttgtttttaggtctgtacatactacctgagcatgaccacatcagccttatgtttgaacaatttcacacatttacatttgtgaatgtgttgaccgtaagcatcatctttatttaaatcagaaacttggttttacaatgatgtctcattgaagttcttgcttttccttgtttgcaaatctgaaatacccttgtatgttctggcggaaagaagacccaaaggaccttgaacagcaaaatctaaggtttcaacattgcagacacacaagagtccagcatgcgccaacgctcctgcagattgctcaaagaaaagcaagacagctcgccaatcctagaagtggaaaaaaacaacatagaataattagccagctacagggagtaaaccattaagagaagaaacatcgtaatgccatgtttccaaatgggcacaaagaaacttcaagcacctctagacggaagctgtctgcactgaagatcaggacacgaatatcgcgagctttatcaaggctcgccttgtgcggaaggtgtatttctgtgagatctccaagatgaagcattagggggtcaatcgccccagattttacatgtagctaacttagtagggcacccataatccataatttattctctgtagttgtagcagcgacctagaggtgttattctgtagcacattgtgtaacatgtaggagagagataaacacatatccccattctttctactgaaacaccagaaatagttgctcttgctccataattcattaatgtgaacttctgaagccatgccaaggtcttatattgatcctctgttgtcatattgataaaaatagggtatgtaaaaccttttctcataacagtttaacacatattttatatataagttatcgtaatattacatgtttccgttgcaacgcacgggcactcacctagtgtcataataagtattggatgtt

SEQ ID NO: 200990 - DNA, 1978 bp, Zea Mays
atatgtccttattgtaggcgtgcacacccgtgttctgcctctcgacgcctgtctgcccgcgccccccgcttgtgatgcccatctcgtctccccgctgtggcagccgccttcgcgtccgccgcgagatccctccgcgcacgggcgcgtcccccacaaaccgcgctccgtgaaatccgcactcccctcgccgcctccccagcccgcagcctctcctcaacctccctccccaaggagctggcggcggcgcgactgcgtcgggagaggacgcagaggacgccgcgcgggggctgcggcaggagctcgactccgagcaggcctccccggagatggcagccagatccggctattgagccccctaaccgagcggatccaagcaagcatacttgcctatggcaaacaagcagtggacttacacaatgatcgaaatgacagagtatactgttcgtgctatcggtttggaaagaacatgtggaaagctaatctcggatcttgcttccttcaggtacagacaacccttgtttttataggagttgtcagagaattgttttcgtgattaaacatgtgtgtttgtttagtggctggtattgttatcatatacccttgtttttagttctatacatattccttaagcatgagcaaattgggggcatttttagtgaagcaattactggtatgtacatgcaattactggtatgtacatggttaatcaaataatttgcatcatggatgttgttttagtgattaatcactcagaaccgatttcctgatgaactggatacactgtttagtgccagctattatttaagcacaagaagtagtcatatacccttgtttttatgtctgtacataccacctggaaatttacacatggggccattttttagtgaagcaattactaaacctgtatagttctggtggctgctataatttttcctgattaatcagagaattgttttagtgattaaccatgtgtgtttagtggctggtattgttgtcatataccttgtttttaggtctgtacatactacctgagcatgaccacatcagccttatgtttgaacaatttcacacatttacatttgtgaatgtgttgaccgtaagcatcatctttatttaaatcagaaacttggttttacaatgatgtctcattgaagttcttgcttttccttgtttgcaaatctgaaatacccttgtatgttctggcggaaagaagacccaaaggaccttgaacagcaaaatctaaggtttcaacattgcagacacacaagagtccagcatgcgccaacgctcctgcagttgatgcttcttccagtagtttgtgacagattgctcaaagaaaagcaagacagctcgccaatcctagaagtggaaaaaaacaacatagaataattagccagctacagggagtaaaccattaagagaagaaacatcgtaatgccatgtttccaaatgggcacaaagaaacttcaagcacctctagacggaagctgtctgcactgaagatcaggacacgaatatcgcgagctttatcaaggctcgccttgtgcggaaggtgtatttctgtgagatctccaagatgaagcattagggggtcaatcgccccagattttacatgtagctaacttagtagggcacccataatccataatttattctctgtagttgtagcagcgacctagaggtgttattctgtagcacattgtgtaacatgtaggagagagataaacacatatccccattctttctactgaaacaccagaaatagttgctcttgctccataattcattaatgtgaacttctgaagccatgccaaggtcttatattgatcctctgttgtcatattgataaaaatagggtatgtaaaaccttttctcataacagtttaacacatattttatatataagttatcgtaatattacatgtttccgttgcaacgcacgggcactcacctagtgtcataataagtattggatgtt

SEQ ID NO: 200991 - DNA, 1610 bp, Zea Mays
atatgtccttattgtaggcgtgcacacccgtgttctgcctctcgacgcctgtctgcccgcgccccccgcttgtgatgcccatctcgtctccccgctgtggcagccgccttcgcgtccgccgcgagatccctccgcgcacgggcgcgtcccccacaaaccgcgctccgtgaaatccgcactcccctcgccgcctccccagcccgcagcctctcctcaacctccctccccaaggagctggcggcggcgcgactgcgtcgggagaggacgcagaggacgccgcgcgggggctgcggcaggagctcgactccgagcaggcctccccggagatggcagccagatccggctattgagccccctaaccgagcggatccaagatagttttttttgtctccagttgctctacacagcaagtctatgaggaaggagcaaaagaagttgctctttcagttgtcagcggaattaatttaactcaagcatacttgcctatggcaaacaagcagtggacttacacaatgatcgaaatgacagagtatactgttcgtgctatcggtttggaaagaacatgtggaaagctaatctcggatcttgcttccttcagaagacccaaaggaccttgaacagcaaaatctaaggtttcaacattgcagacacacaagagtccagcatgcgccaacgctcctgcaggttagtccgagatggcccttcattttcctgtttcaatagataaaaaaactgaggtcgcattaaaaaactgaagtctattcaacaaatcaccaaccatgatttttctgaggcacatgggtacaatcagcacaaactccatttgccaagaaaaggttataatgcattcacaccaataaatgttcgtttcacaagacataagcaaagaacattgaggtcgcattatctaaccttttggtgattgcagttgatgcttcttccagtagtttgtgacagattgctcaaagaaaagcaagacagctcgccaatcctagaagtggaaaaaaacaacatagaataattagccagctacagggagtaaaccattaagagaagaaacatcgtaatgccatgtttccaaatgggcacaaagaaacttcaagcacctctagacggaagctgtctgcactgaagatcaggacacgaatatcgcgagctttatcaaggctcgccttgtgcggaaggtgtatttctgtgagatctccaagatgaagcattagggggtcaatcgccccagattttacatgtagctaacttagtagggcacccataatccataatttattctctgtagttgtagcagcgacctagaggtgttattctgtagcacattgtgtaacatgtaggagagagataaacacatatccccattctttctactgaaacaccagaaatagttgctcttgctccataattcattaatgtgaacttctgaagccatgccaaggtcttatattgatcctctgttgtcatattgataaaaatagggtatgtaaaaccttttctcataacagtttaacacatattttatatataagttatcgtaatattacatgtttccgttgcaacgcacgggcactcacctagtgtcataataagtattggatgtt

SEQ ID NO: 200992 - DNA, 1267 bp, Zea Mays
atatgtccttattgtaggcgtgcacacccgtgttctgcctctcgacgcctgtctgcccgcgccccccgcttgtgatgcccatctcgtctccccgctgtggcagccgccttcgcgtccgccgcgagatccctccgcgcacgggcgcgtcccccacaaaccgcgctccgtgaaatccgcactcccctcgccgcctccccagcccgcagcctctcctcaacctccctccccaaggagctggcggcggcgcgactgcgtcgggagaggacgcagaggacgccgcgcgggggctgcggcaggagctcgactccgagcaggcctccccggagatggcagccagatccggctattgagccccctaaccgagcggatccaagcaagcatacttgcctatggcaaacaagcagtggacttacacaatgatcgaaatgacagagtatactgttcgtgctatcggtttggaaagaacatgtggaaagctaatctcggatcttgcttccttcagacccaaaggaccttgaacagcaaaatctaaggtttcaacattgcagacacacaagagtccagcatgcgccaacgctcctgcagttgatgcttcttccagtagtttgtgacagattgctcaaagaaaagcaagacagctcgccaatcctagaagtggaaaaaaacaacatagaataattagccagctacagggagtaaaccattaagagaagaaacatcgtaatgccatgtttccaaatgggcacaaagaaacttcaagcacctctagacggaagctgtctgcactgaagatcaggacacgaatatcgcgagctttatcaaggctcgccttgtgcggaaggtgtatttctgtgagatctccaagatgaagcattagggggtcaatcgccccagattttacatgtagctaacttagtagggcacccataatccataatttattctctgtagttgtagcagcgacctagaggtgttattctgtagcacattgtgtaacatgtaggagagagataaacacatatccccattctttctactgaaacaccagaaatagttgctcttgctccataattcattaatgtgaacttctgaagccatgccaaggtcttatattgatcctctgttgtcatattgataaaaatagggtatgtaaaaccttttctcataacagtttaacacatattttatatataagttatcgtaatattacatgtttccgttgcaacgcacgggcactcacctagtgtcataataagtattggatgtt

SEQ ID NO: 200993 - DNA, 2217 bp, Zea Mays
atatgtccttattgtaggcgtgcacacccgtgttctgcctctcgacgcctgtctgcccgcgccccccgcttgtgatgcccatctcgtctccccgctgtggcagccgccttcgcgtccgccgcgagatccctccgcgcacgggcgcgtcccccacaaaccgcgctccgtgaaatccgcactcccctcgccgcctccccagcccgcagcctctcctcaacctccctccccaaggagctggcggcggcgcgactgcgtcgggagaggacgcagaggacgccgcgcgggggctgcggcaggagctcgactccgagcaggcctccccggagatggcagccagatccggctattgagccccctaaccgagcggatccaagcaagcatacttgcctatggcaaacaagcagtggacttacacaatgatcgaaatgacagactgttcgtgctatcggtttggaaagaacatgtggaaagctaatctcggatcttgcttccttcaggtacagacaacccttgtttttataggagttgtcagagaattgttttcgtgattaaacatgtgtgtttgtttagtggctggtattgttatcatatacccttgtttttagttctatacatattccttaagcatgagcaaattgggggcatttttagtgaagcaattactggtatgtacatgcaattactggtatgtacatggttaatcaaataatttgcatcatggatgttgttttagtgattaatcactcagaaccgatttcctgatgaactggatacactgtttagtgccagctattatttaagcacaagaagtagtcatatacccttgtttttatgtctgtacataccacctggaaatttacacatggggccattttttagtgaagcaattactaaacctgtatagttctggtggctgctataatttttcctgattaatcagagaattgttttagtgattaaccatgtgtgtttagtggctggtattgttgtcatataccttgtttttaggtctgtacatactacctgagcatgaccacatcagccttatgtttgaacaatttcacacatttacatttgtgaatgtgttgaccgtaagcatcatctttatttaaatcagaaacttggttttacaatgatgtctcattgaagttcttgcttttccttgtttgcaaatctgaaatacccttgtatgttctggcggaaagaagacccaaaggaccttgaacagcaaaatctaaggtttcaacattgcagacacacaagagtccagcatgcgccaacgctcctgcaggttagtccgagatggcccttcattttcctgtttcaatagataaaaaaactgaggtcgcattaaaaaactgaagtctattcaacaaatcaccaaccatgatttttctgaggcacatgggtacaatcagcacaaactccatttgccaagaaaaggttataatgcattcacaccaataaatgttcgtttcacaagacataagcaaagaacattgaggtcgcattatctaaccttttggtgattgcagttgatgcttcttccagtagtttgtgacagattgctcaaagaaaagcaagacagctcgccaatcctagaagtggaaaaaaacaacatagaataattagccagctacagggagtaaaccattaagagaagaaacatcgtaatgccatgtttccaaatgggcacaaagaaacttcaagcacctctagacggaagctgtctgcactgaagatcaggacacgaatatcgcgagctttatcaaggctcgccttgtgcggaaggtgtatttctgtgagatctccaagatgaagcattagggggtcaatcgccccagattttacatgtagctaacttagtagggcacccataatccataatttattctctgtagttgtagcagcgacctagaggtgttattctgtagcacattgtgtaacatgtaggagagagataaacacatatccccattctttctactgaaacaccagaaatagttgctcttgctccataattcattaatgtgaacttctgaagccatgccaaggtcttatattgatcctctgttgtcatattgataaaaatagggtatgtaaaaccttttctcataacagtttaacacatattttatatataagttatcgtaatattacatgtttccgttgcaacgcacgggcactcacctagtgtcataataagtattggatgtt

SEQ ID NO: 200994 - DNA, 1587 bp, Zea Mays
atatgtccttattgtaggcgtgcacacccgtgttctgcctctcgacgcctgtctgcccgcgccccccgcttgtgatgcccatctcgtctccccgctgtggcagccgccttcgcgtccgccgcgagatccctccgcgcacgggcgcgtcccccacaaaccgcgctccgtgaaatccgcactcccctcgccgcctccccagcccgcagcctctcctcaacctccctccccaaggagctggcggcggcgcgactgcgtcgggagaggacgcagaggacgccgcgcgggggctgcggcaggagctcgactccgagcaggcctccccggagatggcagccagatccggctattgagccccctaaccgagcggatccaagttgctctacacagcaagtctatgaggaaggagcaaaagaagttgctctttcagttgtcagcggaattaatttaactcaagcatacttgcctatggcaaacaagcagtggacttacacaatgatcgaaatgacagagtatactgttcgtgctatcggtttggaaagaacatgtggaaagctaatctcggatcttgcttccttcagacccaaaggaccttgaacagcaaaatctaaggtttcaacattgcagacacacaagagtccagcatgcgccaacgctcctgcaggttagtccgagatggcccttcattttcctgtttcaatagataaaaaaactgaggtcgcattaaaaaactgaagtctattcaacaaatcaccaaccatgatttttctgaggcacatgggtacaatcagcacaaactccatttgccaagaaaaggttataatgcattcacaccaataaatgttcgtttcacaagacataagcaaagaacattgaggtcgcattatctaaccttttggtgattgcagttgatgcttcttccagtagtttgtgacagattgctcaaagaaaagcaagacagctcgccaatcctagaagtggaaaaaaacaacatagaataattagccagctacagggagtaaaccattaagagaagaaacatcgtaatgccatgtttccaaatgggcacaaagaaacttcaagcacctctagacggaagctgtctgcactgaagatcaggacacgaatatcgcgagctttatcaaggctcgccttgtgcggaaggtgtatttctgtgagatctccaagatgaagcattagggggtcaatcgccccagattttacatgtagctaacttagtagggcacccataatccataatttattctctgtagttgtagcagcgacctagaggtgttattctgtagcacattgtgtaacatgtaggagagagataaacacatatccccattctttctactgaaacaccagaaatagttgctcttgctccataattcattaatgtgaacttctgaagccatgccaaggtcttatattgatcctctgttgtcatattgataaaaatagggtatgtaaaaccttttctcataacagtttaacacatattttatatataagttatcgtaatattacatgtttccgttgcaacgcacgggcactcacctagtgtcataataagtattggatgtt

SEQ ID NO: 200995 - DNA, 2158 bp, Zea Mays
atatgtccttattgtaggcgtgcacacccgtgttctgcctctcgacgcctgtctgcccgcgccccccgcttgtgatgcccatctcgtctccccgctgtggcagccgccttcgcgtccgccgcgagatccctccgcgcacgggcgcgtcccccacaaaccgcgctccgtgaaatccgcactcccctcgccgcctccccagcccgcagcctctcctcaacctccctccccaaggagctggcggcggcgcgactgcgtcgggagaggacgcagaggacgccgcgcgggggctgcggcaggagctcgactccgagcaggcctccccggagatggcagccagatccggctattgagccccctaaccgagcggatccaagctgttcgtgctatcggtttggaaagaacatgtggaaagctaatctcggatcttgcttccttcaggtacagacaacccttgtttttataggagttgtcagagaattgttttcgtgattaaacatgtgtgtttgtttagtggctggtattgttatcatatacccttgtttttagttctatacatattccttaagcatgagcaaattgggggcatttttagtgaagcaattactggtatgtacatgcaattactggtatgtacatggttaatcaaataatttgcatcatggatgttgttttagtgattaatcactcagaaccgatttcctgatgaactggatacactgtttagtgccagctattatttaagcacaagaagtagtcatatacccttgtttttatgtctgtacataccacctggaaatttacacatggggccattttttagtgaagcaattactaaacctgtatagttctggtggctgctataatttttcctgattaatcagagaattgttttagtgattaaccatgtgtgtttagtggctggtattgttgtcatataccttgtttttaggtctgtacatactacctgagcatgaccacatcagccttatgtttgaacaatttcacacatttacatttgtgaatgtgttgaccgtaagcatcatctttatttaaatcagaaacttggttttacaatgatgtctcattgaagttcttgcttttccttgtttgcaaatctgaaatacccttgtatgttctggcggaaagaagacccaaaggaccttgaacagcaaaatctaaggtttcaacattgcagacacacaagagtccagcatgcgccaacgctcctgcaggttagtccgagatggcccttcattttcctgtttcaatagataaaaaaactgaggtcgcattaaaaaactgaagtctattcaacaaatcaccaaccatgatttttctgaggcacatgggtacaatcagcacaaactccatttgccaagaaaaggttataatgcattcacaccaataaatgttcgtttcacaagacataagcaaagaacattgaggtcgcattatctaaccttttggtgattgcagttgatgcttcttccagtagtttgtgacagattgctcaaagaaaagcaagacagctcgccaatcctagaagtggaaaaaaacaacatagaataattagccagctacagggagtaaaccattaagagaagaaacatcgtaatgccatgtttccaaatgggcacaaagaaacttcaagcacctctagacggaagctgtctgcactgaagatcaggacacgaatatcgcgagctttatcaaggctcgccttgtgcggaaggtgtatttctgtgagatctccaagatgaagcattagggggtcaatcgccccagattttacatgtagctaacttagtagggcacccataatccataatttattctctgtagttgtagcagcgacctagaggtgttattctgtagcacattgtgtaacatgtaggagagagataaacacatatccccattctttctactgaaacaccagaaatagttgctcttgctccataattcattaatgtgaacttctgaagccatgccaaggtcttatattgatcctctgttgtcatattgataaaaatagggtatgtaaaaccttttctcataacagtttaacacatattttatatataagttatcgtaatattacatgtttccgttgcaacgcacgggcactcacctagtgtcataataagtattggatgtt

SEQ ID NO: 200996 - DNA, 2050 bp, Zea Mays
atatgtccttattgtaggcgtgcacacccgtgttctgcctctcgacgcctgtctgcccgcgccccccgcttgtgatgcccatctcgtctccccgctgtggcagccgccttcgcgtccgccgcgagatccctccgcgcacgggcgcgtcccccacaaaccgcgctccgtgaaatccgcactcccctcgccgcctccccagcccgcagcctctcctcaacctccctccccaaggagctggcggcggcgcgactgcgtcgggagaggacgcagaggacgccgcgcgggggctgcggcaggagctcgactccgagcaggcctccccggagatggcagccagatccggctattgagccccctaaccgagcggatccaagatagttttttttgtctccagttgctctacacagcaagtctatgaggaaggagcaaaagaagttgctctttcagttgtcagcggaattaatttaactcaagcatacttgcctatggcaaacaagcagtggacttacacaatgatcgaaatgacagactgttcgtgctatcggtttggaaagaacatgtggaaagctaatctcggatcttgcttccttcaggtacagacaacccttgtttttataggagttgtcagagaattgttttcgtgattaaacatgtgtgtttgtttagtggctggtattgttatcatatacccttgtttttagttctatacatattccttaagcatgagcaaattgggggcatttttagtgaagcaattactggtatgtacatgcaattactggtatgtacatggttaatcaaataatttgcatcatggatgttgttttagtgattaatcactcagaaccgatttcctgatgaactggatacactgtttagtgccagctattatttaagcacaagaagtagtcatatacccttgtttttatgtctgtacataccacctggaaatttacacatggggccattttttagtgaagcaattactaaacctgtatagttctggtggctgctataatttttcctgattaatcagagaattgttttagtgattaaccatgtgtgtttagtggctggtattgttgtcatataccttgtttttaggtctgtacatactacctgagcatgaccacatcagccttatgtttgaacaatttcacacatttacatttgtgaatgtgttgaccgtaagcatcatctttatttaaatcagaaacttggttttacaatgatgtctcattgaagttcttgcttttccttgtttgcaaatctgaaatacccttgtatgttctggcggaaagaagacccaaaggaccttgaacagcaaaatctaaggtttcaacattgcagacacacaagagtccagcatgcgccaacgctcctgcagtttgtgacagattgctcaaagaaaagcaagacagctcgccaatcctagaagtggaaaaaaacaacatagaataattagccagctacagggagtaaaccattaagagaagaaacatcgtaatgccatgtttccaaatgggcacaaagaaacttcaagcacctctagacggaagctgtctgcactgaagatcaggacacgaatatcgcgagctttatcaaggctcgccttgtgcggaaggtgtatttctgtgagatctccaagatgaagcattagggggtcaatcgccccagattttacatgtagctaacttagtagggcacccataatccataatttattctctgtagttgtagcagcgacctagaggtgttattctgtagcacattgtgtaacatgtaggagagagataaacacatatccccattctttctactgaaacaccagaaatagttgctcttgctccataattcattaatgtgaacttctgaagccatgccaaggtcttatattgatcctctgttgtcatattgataaaaatagggtatgtaaaaccttttctcataacagtttaacacatattttatatataagttatcgtaatattacatgtttccgttgcaacgcacgggcactcacctagtgtcataataagtattggatgtt

SEQ ID NO: 200997 - DNA, 1361 bp, Zea Mays
atatgtccttattgtaggcgtgcacacccgtgttctgcctctcgacgcctgtctgcccgcgccccccgcttgtgatgcccatctcgtctccccgctgtggcagccgccttcgcgtccgccgcgagatccctccgcgcacgggcgcgtcccccacaaaccgcgctccgtgaaatccgcactcccctcgccgcctccccagcccgcagcctctcctcaacctccctccccaaggagctggcggcggcgcgactgcgtcgggagaggacgcagaggacgccgcgcgggggctgcggcaggagctcgactccgagcaggcctccccggagatggcagccagatccggctattgagccccctaaccgagcggatccaagatagttttttttgtctccagttgctctacacagcaagtctatgaggaaggagcaaaagaagttgctctttcagttgtcagcggaattaatttaactcaagcatacttgcctatggcaaacaagcagtggacttacacaatgatcgaaatgacagactgttcgtgctatcggtttggaaagaacatgtggaaagctaatctcggatcttgcttccttcagaagacccaaaggaccttgaacagcaaaatctaaggtttcaacattgcagacacacaagagtccagcatgcgccaacgctcctgcagttgatgcttcttccagtagtttgtgacagattgctcaaagaaaagcaagacagctcgccaatcctagaagtggaaaaaaacaacatagaataattagccagctacagggagtaaaccattaagagaagaaacatcgtaatgccatgtttccaaatgggcacaaagaaacttcaagcacctctagacggaagctgtctgcactgaagatcaggacacgaatatcgcgagctttatcaaggctcgccttgtgcggaaggtgtatttctgtgagatctccaagatgaagcattagggggtcaatcgccccagattttacatgtagctaacttagtagggcacccataatccataatttattctctgtagttgtagcagcgacctagaggtgttattctgtagcacattgtgtaacatgtaggagagagataaacacatatccccattctttctactgaaacaccagaaatagttgctcttgctccataattcattaatgtgaacttctgaagccatgccaaggtcttatattgatcctctgttgtcatattgataaaaatagggtatgtaaaaccttttctcataacagtttaacacatattttatatataagttatcgtaatattacatgtttccgttgcaacgcacgggcactcacctagtgtcataataagtattggatgtt

SEQ ID NO: 200998 - DNA, 3870 bp, Zea Mays
atatgtccttattgtaggcgtgcacacccgtgttctgcctctcgacgcctgtctgcccgcgccccccgcttgtgatgcccatctcgtctccccgctgtggcagccgccttcgcgtccgccgcgagatccctccgcgcacgggcgcgtcccccacaaaccgcgctccgtgaaatccgcactcccctcgccgcctccccagcccgcagcctctcctcaacctccctccccaaggagctggcggcggcgcgactgcgtcgggagaggacgcagaggacgccgcgcgggggctgcggcaggagctcgactccgagcaggcctccccggagatggcagccagatccggctattgagccccctaaccgagcggatccaaggtactacacggccttgccctcacccttttgcttgctttgtcgtcctctcctcttcctcttgcgggcgcgatttgtggtgggtaccgcggcagggttgtggcgcgcgctgcggacaagggagccgtctccgtgcttatcgcgcgcaacgcggacggcggcatcgagagaggagtcgttcttctcggtggccccggcgatccgctcacccccgggtgggccgccatcagcggtgcggagcgatcgaagttcgacgataaggcagtcaagcagcggttttcgagtatcccctccatgccggtccaccgatgagcggtttctgagtgcagtctgcccggtccaccgatgagagggagactcgtctatcaccctcatcatcattattgagcactgtctggtactctggtcaaaatggtcagtttggacttgactgagttctatcgttgccctgtgaggataaccggttcacaaaggcaataattagcaaggtttgtgctgattgcatgcatgaagccgatgaattagcttcagtatgaggcagacgatttgagtcccacagtgtctttgattcctaaatcacccagctggctagctccttggtggtgcgcactgcagaccgataaccgattgccaggacacaagccagccagctggccagttgaagatttggaggtttcacctgctcaaagaaatgccctgcgcaacctgccagtttgctgtgtcgaccgttggtggcagctgcatcgacgacatcacatagacgagctgactgtcaagcactgggttgatcaggacgaccctggccctgccattcttgtttagagttttgcttgccaagttgatagtgattttttcagttcgattagtgtaggtgctggctggaggcacacgcagacacgctggtagcttattgactgaaagtgccagtcctagataattttggggaaaaaggctccacgctggtagcttattggctggaggcacacgcagacacgctgatatctaagaaactcgttcatacaatccaatatatctaaacattttatcttattcactagaatcctttaatacacggcttatttatatggattatatgggtggaaccatatattatacttagggaaccgtgctatagacgttccttcatttttaaccgtgtttggattattaacttgcttctacagataagatgtgaaggctcatattagttttcacttttcagttgcctgacacagataggtaagtcgtggtgtaccatgattagttttcagttgcctttataggtgtgcacggatcagttctcagttttctcgtatggaggattgacaaaccgtgatctataaggattagtttttttaaaaaggaaagcgagtaacacacaactagattttatttcgtgggaatcgtacaggaatcgctacgtactccagtaataagtacgctgaatggatagaaaatgtttatgtttttttagaattatagattttatctttccttgaaacgtatctcaagaggattgacgtcaagaggattgatgtgcttgtttcttgtacccatcagatagttttttttgtctccagttgctctacacagcaagtctatgaggaaggagcaaaagaagttgctctttcagttgtcagcggaattaatttaactcaagcatacttgcctatggcaaacaagcagtggacttacacaatgatcgaaatgacagactgttcgtgctatcggtttggaaagaacatgtggaaagctaatctcggatcttgcttccttcaggtacagacaacccttgtttttataggagttgtcagagaattgttttcgtgattaaacatgtgtgtttgtttagtggctggtattgttatcatatacccttgtttttagttctatacatattccttaagcatgagcaaattgggggcatttttagtgaagcaattactggtatgtacatgcaattactggtatgtacatggttaatcaaataatttgcatcatggatgttgttttagtgattaatcactcagaaccgatttcctgatgaactggatacactgtttagtgccagctattatttaagcacaagaagtagtcatatacccttgtttttatgtctgtacataccacctggaaatttacacatggggccattttttagtgaagcaattactaaacctgtatagttctggtggctgctataatttttcctgattaatcagagaattgttttagtgattaaccatgtgtgtttagtggctggtattgttgtcatataccttgtttttaggtctgtacatactacctgagcatgaccacatcagccttatgtttgaacaatttcacacatttacatttgtgaatgtgttgaccgtaagcatcatctttatttaaatcagaaacttggttttacaatgatgtctcattgaagttcttgcttttccttgtttgcaaatctgaaatacccttgtatgttctggcggaaagaagacccaaaggaccttgaacagcaaaatctaaggtttcaacattgcagacacacaagagtccagcatgcgccaacgctcctgcaggttagtccgagatggcccttcattttcctgtttcaatagataaaaaaactgaggtcgcattaaaaaactgaagtctattcaacaaatcaccaaccatgatttttctgaggcacatgggtacaatcagcacaaactccatttgccaagaaaaggttataatgcattcacaccaataaatgttcgtttcacaagacataagcaaagaacattgaggtcgcattatctaaccttttggtgattgcagttgatgcttcttccagtagtttgtgacagattgctcaaagaaaagcaagacagctcgccaatcctagaagtggaaaaaaacaacatagaataattagccagctacagggagtaaaccattaagagaagaaacatcgtaatgccatgtttccaaatgggcacaaagaaacttcaagcacctctagacggaagctgtctgcactgaagatcaggacacgaatatcgcgagctttatcaaggctcgccttgtgcggaaggtgtatttctgtgagatctccaagatgaagcattagggggtcaatcgccccagattttacatgtagctaacttagtagggcacccataatccataatttattctctgtagttgtagcagcgacctagaggtgttattctgtagcacattgtgtaacatgtaggagagagataaacacatatccccattctttctactgaaacaccagaaatagttgctcttgctccataattcattaatgtgaacttctgaagccatgccaaggtcttatattgatcctctgttgtcatattgataaaaatagggtatgtaaaaccttttctcataacagtttaacacatattttatatataagttatcgtaatattacatgtttccgttgcaacgcacgggcactcacctagtgtcataataagtattggatgtt

SEQ ID NO: 200999 - DNA, 1343 bp, Zea Mays
atatgtccttattgtaggcgtgcacacccgtgttctgcctctcgacgcctgtctgcccgcgccccccgcttgtgatgcccatctcgtctccccgctgtggcagccgccttcgcgtccgccgcgagatccctccgcgcacgggcgcgtcccccacaaaccgcgctccgtgaaatccgcactcccctcgccgcctccccagcccgcagcctctcctcaacctccctccccaaggagctggcggcggcgcgactgcgtcgggagaggacgcagaggacgccgcgcgggggctgcggcaggagctcgactccgagcaggcctccccggagatggcagccagatccggctattgagccccctaaccgagcggatccaagttgctctacacagcaagtctatgaggaaggagcaaaagaagttgctctttcagttgtcagcggaattaatttaactcaagcatacttgcctatggcaaacaagcagtggacttacacaatgatcgaaatgacagagtatactgttcgtgctatcggtttggaaagaacatgtggaaagctaatctcggatcttgcttccttcagacccaaaggaccttgaacagcaaaatctaaggtttcaacattgcagacacacaagagtccagcatgcgccaacgctcctgcagttgatgcttcttccagtagtttgtgacagattgctcaaagaaaagcaagacagctcgccaatcctagaagtggaaaaaaacaacatagaataattagccagctacagggagtaaaccattaagagaagaaacatcgtaatgccatgtttccaaatgggcacaaagaaacttcaagcacctctagacggaagctgtctgcactgaagatcaggacacgaatatcgcgagctttatcaaggctcgccttgtgcggaaggtgtatttctgtgagatctccaagatgaagcattagggggtcaatcgccccagattttacatgtagctaacttagtagggcacccataatccataatttattctctgtagttgtagcagcgacctagaggtgttattctgtagcacattgtgtaacatgtaggagagagataaacacatatccccattctttctactgaaacaccagaaatagttgctcttgctccataattcattaatgtgaacttctgaagccatgccaaggtcttatattgatcctctgttgtcatattgataaaaatagggtatgtaaaaccttttctcataacagtttaacacatattttatatataagttatcgtaatattacatgtttccgttgcaacgcacgggcactcacctagtgtcataataagtattggatgtt

SEQ ID NO: 201000 - DNA, 2074 bp, Zea Mays
atatgtccttattgtaggcgtgcacacccgtgttctgcctctcgacgcctgtctgcccgcgccccccgcttgtgatgcccatctcgtctccccgctgtggcagccgccttcgcgtccgccgcgagatccctccgcgcacgggcgcgtcccccacaaaccgcgctccgtgaaatccgcactcccctcgccgcctccccagcccgcagcctctcctcaacctccctccccaaggagctggcggcggcgcgactgcgtcgggagaggacgcagaggacgccgcgcgggggctgcggcaggagctcgactccgagcaggcctccccggagatggcagccagatccggctattgagccccctaaccgagcggatccaagatagttttttttgtctccagttgctctacacagcaagtctatgaggaaggagcaaaagaagttgctctttcagttgtcagcggaattaatttaactcaagcatacttgcctatggcaaacaagcagtggacttacacaatgatcgaaatgacagagtatactgttcgtgctatcggtttggaaagaacatgtggaaagctaatctcggatcttgcttccttcaggtacagacaacccttgtttttataggagttgtcagagaattgttttcgtgattaaacatgtgtgtttgtttagtggctggtattgttatcatatacccttgtttttagttctatacatattccttaagcatgagcaaattgggggcatttttagtgaagcaattactggtatgtacatgcaattactggtatgtacatggttaatcaaataatttgcatcatggatgttgttttagtgattaatcactcagaaccgatttcctgatgaactggatacactgtttagtgccagctattatttaagcacaagaagtagtcatatacccttgtttttatgtctgtacataccacctggaaatttacacatggggccattttttagtgaagcaattactaaacctgtatagttctggtggctgctataatttttcctgattaatcagagaattgttttagtgattaaccatgtgtgtttagtggctggtattgttgtcatataccttgtttttaggtctgtacatactacctgagcatgaccacatcagccttatgtttgaacaatttcacacatttacatttgtgaatgtgttgaccgtaagcatcatctttatttaaatcagaaacttggttttacaatgatgtctcattgaagttcttgcttttccttgtttgcaaatctgaaatacccttgtatgttctggcggaaagaagacccaaaggaccttgaacagcaaaatctaaggtttcaacattgcagacacacaagagtccagcatgcgccaacgctcctgcagttgatgcttcttccagtagtttgtgacagattgctcaaagaaaagcaagacagctcgccaatcctagaagtggaaaaaaacaacatagaataattagccagctacagggagtaaaccattaagagaagaaacatcgtaatgccatgtttccaaatgggcacaaagaaacttcaagcacctctagacggaagctgtctgcactgaagatcaggacacgaatatcgcgagctttatcaaggctcgccttgtgcggaaggtgtatttctgtgagatctccaagatgaagcattagggggtcaatcgccccagattttacatgtagctaacttagtagggcacccataatccataatttattctctgtagttgtagcagcgacctagaggtgttattctgtagcacattgtgtaacatgtaggagagagataaacacatatccccattctttctactgaaacaccagaaatagttgctcttgctccataattcattaatgtgaacttctgaagccatgccaaggtcttatattgatcctctgttgtcatattgataaaaatagggtatgtaaaaccttttctcataacagtttaacacatattttatatataagttatcgtaatattacatgtttccgttgcaacgcacgggcactcacctagtgtcataataagtattggatgtt

SEQ ID NO: 201001 - DNA, 1639 bp, Zea Mays
ttttaaagtgttgatcttttatctctactactctatatgtccttattgtaggcgtgcacacccgtgttctgcctctcgacgcctgtctgcccgcgccccccgcttgtgatgcccatctcgtctccccgctgtggcagccgccttcgcgtccgccgcgagatccctccgcgcacgggcgcgtcccccacaaaccgcgctccgtgaaatccgcactcccctcgccgcctccccagcccgcagcctctcctcaacctccctccccaaggagctggcggcggcgcgactgcgtcgggagaggacgcagaggacgccgcgcgggggctgcggcaggagctcgactccgagcaggcctccccggagatggcagccagatccggctattgagccccctaaccgagcggatccaagatagttttttttgtctccagttgctctacacagcaagtctatgaggaaggagcaaaagaagttgctctttcagttgtcagcggaattaatttaactcaagcatacttgcctatggcaaacaagcagtggacttacacaatgatcgaaatgacagactgttcgtgctatcggtttggaaagaacatgtggaaagctaatctcggatcttgcttccttcagaagacccaaaggaccttgaacagcaaaatctaaggtttcaacattgcagacacacaagagtccagcatgcgccaacgctcctgcaggttagtccgagatggcccttcattttcctgtttcaatagataaaaaaactgaggtcgcattaaaaaactgaagtctattcaacaaatcaccaaccatgatttttctgaggcacatgggtacaatcagcacaaactccatttgccaagaaaaggttataatgcattcacaccaataaatgttcgtttcacaagacataagcaaagaacattgaggtcgcattatctaaccttttggtgattgcagttgatgcttcttccagtagtttgtgacagattgctcaaagaaaagcaagacagctcgccaatcctagaagtggaaaaaaacaacatagaataattagccagctacagggagtaaaccattaagagaagaaacatcgtaatgccatgtttccaaatgggcacaaagaaacttcaagcacctctagacggaagctgtctgcactgaagatcaggacacgaatatcgcgagctttatcaaggctcgccttgtgcggaaggtgtatttctgtgagatctccaagatgaagcattagggggtcaatcgccccagattttacatgtagctaacttagtagggcacccataatccataatttattctctgtagttgtagcagcgacctagaggtgttattctgtagcacattgtgtaacatgtaggagagagataaacacatatccccattctttctactgaaacaccagaaatagttgctcttgctccataattcattaatgtgaacttctgaagccatgccaaggtcttatattgatcctctgttgtcatattgataaaaatagggtatgtaaaaccttttctcataacagtttaacacatattttatatataagttatcgtaatattacatgtttccgttgcaacgcacgggcactcacctagtgtcataataagtattggatgtt

SEQ ID NO: 201002 - DNA, 2434 bp, Zea Mays
aaaattgatttatttgtaaaaatatcagaaacacaaattgattcatctattttctagagtctagtacataaacaaaacttttttttaaagtgttgatcttttatctctactactctatatgtccttattgtaggcgtgcacacccgtgttctgcctctcgacgcctgtctgcccgcgccccccgcttgtgatgcccatctcgtctccccgctgtggcagccgccttcgcgtccgccgcgagatccctccgcgcacgggcgcgtcccccacaaaccgcgctccgtgaaatccgcactcccctcgccgcctccccagcccgcagcctctcctcaacctccctccccaaggagctggcggcggcgcgactgcgtcgggagaggacgcagaggacgccgcgcgggggctgcggcaggagctcgactccgagcaggcctccccggagatggcagccagatccggctattgagccccctaaccgagcggatccaagatagttttttttgtctccagttgctctacacagcaagtctatgaggaaggagcaaaagaagttgctctttcagttgtcagcggaattaatttaactcaagcatacttgcctatggcaaacaagcagtggacttacacaatgatcgaaatgacagagtatactgttcgtgctatcggtttggaaagaacatgtggaaagctaatctcggatcttgcttccttcaggtacagacaacccttgtttttataggagttgtcagagaattgttttcgtgattaaacatgtgtgtttgtttagtggctggtattgttatcatatacccttgtttttagttctatacatattccttaagcatgagcaaattgggggcatttttagtgaagcaattactggtatgtacatgcaattactggtatgtacatggttaatcaaataatttgcatcatggatgttgttttagtgattaatcactcagaaccgatttcctgatgaactggatacactgtttagtgccagctattatttaagcacaagaagtagtcatatacccttgtttttatgtctgtacataccacctggaaatttacacatggggccattttttagtgaagcaattactaaacctgtatagttctggtggctgctataatttttcctgattaatcagagaattgttttagtgattaaccatgtgtgtttagtggctggtattgttgtcatataccttgtttttaggtctgtacatactacctgagcatgaccacatcagccttatgtttgaacaatttcacacatttacatttgtgaatgtgttgaccgtaagcatcatctttatttaaatcagaaacttggttttacaatgatgtctcattgaagttcttgcttttccttgtttgcaaatctgaaatacccttgtatgttctggcggaaagaagacccaaaggaccttgaacagcaaaatctaaggtttcaacattgcagacacacaagagtccagcatgcgccaacgctcctgcaggttagtccgagatggcccttcattttcctgtttcaatagataaaaaaactgaggtcgcattaaaaaactgaagtctattcaacaaatcaccaaccatgatttttctgaggcacatgggtacaatcagcacaaactccatttgccaagaaaaggttataatgcattcacaccaataaatgttcgtttcacaagacataagcaaagaacattgaggtcgcattatctaaccttttggtgattgcagttgatgcttcttccagtagtttgtgacagattgctcaaagaaaagcaagacagctcgccaatcctagaagtggaaaaaaacaacatagaataattagccagctacagggagtaaaccattaagagaagaaacatcgtaatgccatgtttccaaatgggcacaaagaaacttcaagcacctctagacggaagctgtctgcactgaagatcaggacacgaatatcgcgagctttatcaaggctcgccttgtgcggaaggtgtatttctgtgagatctccaagatgaagcattagggggtcaatcgccccagattttacatgtagctaacttagtagggcacccataatccataatttattctctgtagttgtagcagcgacctagaggtgttattctgtagcacattgtgtaacatgtaggagagagataaacacatatccccattctttctactgaaacaccagaaatagttgctcttgctccataattcattaatgtgaacttctgaagccatgccaaggtcttatattgatcctctgttgtcatattgataaaaatagggtatgtaaaaccttttctcataacagtttaacacatattttatatataagttatcgtaatattacatgtttccgttgcaacgcacgggcactcacctagtgtcataataagtattggatgtt

SEQ ID NO: 201003 - DNA, 1517 bp, Zea Mays
gagagagagagggcggcggggagacgcgggtggcgtgcaccggcgagggcgcctggttcgtggaggccaacgccgcgtgctcgctcgaggaggcccgccacctcgaccaccccatgctcatccccaaggagcagctgctgccggagccctcgccggacgtcaacccgctggacatgccgctcatgatgcaggtgacggagttctcgtgcggcggcttcgtggtggggctcatctccgtgcacacgatcgcggacggcctgggcgcggggcagttcatcaacacggtggcggcgtacgcgcggggcgccacgtccgccacgcccaaacccgtgtgggcgcgcgacgtgatcccggacccgcccaagatgccggcgccgccgccgcgcctggacctgctggacctgcgctacttcacggcggacctgagcccggaccacatcggcaaggtgaaggcgcggtacctggagtcgacggggcagcgctgctcggcgttcgacgtgtgcgtggcgcgcacgtggcaggcccgcgtgcgcgcgctgcggctccccgacccggccgcgcccgtgcacgtctgcttcttcgccaacacccgccacctgcttccggcggcggccacggccgggttctacggcaactgcttctacacggtgaaggcgacgcgggcgagcggggaggtggcggcggccgacgtggtggacgtggtgcgcgccatccgcgacgccaaggcgaggctgggcgccgacttcgcgcgctgggcggcgggcggcttcgaccgcgacccctacgagctcaccttcacctacgactcgctcttcgtctccgactggacgcgcctcggcttcctcgaggcggactacggctggggcaccccgacacacgtcctgcccttctcctaccacccgttcatggccgtcgccgtcatcggcgccccgcctaagcccaagcccggcgcccgcatcatgaccatgtgcgtccaggagcagcacctgcccgagttccaggagcagatgatgagccagcaggccgcctaggctagctccttcctgatcatcccatcaccatgttcatctatatcgtcatcgtcatcatgcatgcgcgtgcacgtttggaatatttgttaatcaatcaataacggtgaggtgaggttgctattatatgaagtagtagtaacacctcaacaacaacaacccaatgcaatgggaactcgcgtgtaatttgctccttcttcttcaaatataattccgcctcaattgtatgtatgtattacgtctgtctgtctgtaaaaactaaagctttttgtttctttacatacacggcgcctgtagcaagcaattcacagacgaccatgaacgaaaggaagctccttgatttgacactgagtagacaggcagagagagagagagaaagagtagttggcaggatttgactcatgatcgtgtctgccgagctaacgaaacggagagcacgatactaaaatggacgctagtaacgaagatagctagcctataaaatatata

SEQ ID NO: 201004 - DNA, 2990 bp, Zea Mays
ctcgctagccacggccagtcaaccaccgcgagctccatctccatggacgcctgctctctcgtccactgccatctgccacggccactgcagctcccgctccttgcgcctccaactcccagccggcaccggccccgcgtcgccagcgccttggtctgctgctgctgccccgccgccgcggcagaccaccaccaggaacggccctgggagtggtacgaccgcgccatccagtcccacgcggggtccgacctggcgcgctccctaggacttctcgccgacatgcaagcgtccggggggcgccctagcggcagcgcgtacgcgcgcctcatccgcgcgctgtcccgcgcagggcgcgcgctggaggccgaggcgctcctcctcgagatgcgccgcctcggcccgcgcccggaagccgcgcactacaacgcgctccttgagggcctgctcgccgccgcgcacctccgcctcgccgacctcctcctcctccagatggccgacgacggcgtcgcgaggaaccggcgcacctacacgctcttgctaggcgcgtacgcgcgcgccggccggctcgaggactcgtggtgggtgctcggtgagatgaggcgctggggcattcgcctcgacaccgccgggtatagcatgctcgtgcggctgtaccgggacaatggcatgtggaagaaggccaccgacctcgtcatggagatgcaggaggttggggtggaactggatgttaagatctacagcggcctgatcgatacgttcggcaagtatggacagctagcggacgcacgcaggatgtttgataaaatgcgcgccgaaggcgtcaggccagacatatcgacttggaatgctttgattcaatggcattgtcgggttgggaacatgaaacgcgctctgcggttcttcacatccatgcaggaggaagggatgtacccggacccaaagatatttgttatgatcatcagccggttgggggaacaagggaagtgggatgagattaagaagttgtttgatggcatgaacaatcgaggtttcaaggagagtggcgcagtgtacgcaatattggttgacatttacgggcagtatggccattttcgtgatgcacaggactgtatagctgctcttagagctgagaatacacagcttttgcctcgtgtattttgtgtcattgcaaacgcttatgctcaacagggactgtgtgaacaaactgtaaatgtacttcagttgatggaggaagaaggatttgagccaaaccttgttatgctgaattcgttaatcaatgcttttggcactgctggaaggcatttggaggcactagctgtatttcagcatatcaaggatagtggtatgagcccagatgttgtgacatacactacacttatgaagacattcatgagagcaaagaaatttgaaaaggtatctgaagtatacagagaaatggaacgtgctggatgtgctccagatagaaaggctagagaaatgttacatgatgcaactgtagttctagaacaaagaggatgtatctattgaattcggaatcattgctgttgtaattggtccattgtcaatgcatatgatcatgtactggttttcttcaaggttgaaacactatgcatgcgaagatttggatggttatggcatcaagccaataactctttccaaggctcctgaatgtctatatgttgatcagaagagtgaaaaaggataaccgagtatagttttcacccttgtacttagtcatggttatggtcaaagcaagactatcaggcataaacataaggatgaatcagaaaatatacataggccatgaacagcgagaagcatatagacactccgaaaatgaagcacatcaacttggtggaatttccttacaggtttctttctttccaagtcatatattatgaattttgtgtgagtgtgacaaggaattgctgaaaacatttggtgttgatcattgattgttatgtaaatgtatccaagtagctacatggtagcttatgcaatcaattgccaagtggtagagtgtaaacaatacaactacattttcactatttataatgtcagttgtaaatacttcaaattcaaagtagcgcaacacaattatgattcagtcctaataaacagactgtaaatacttgatggcttgatgtactattaaaattagaatagccaagtgtaaatatttgattttgttctggttactgaattaactttggcacccatttccacactgttattattgagtttatttattgtgggcttcatcgcttataatttatatacagaatgaaataaaacacatggtcaaaccttttcatcagaattgtaggctctccgttcctatattatcactgatggactccttacatacttgatcagatcatagattttgcttgatgctaacaataacataaaattaagagacaaaaaaaggagcagcgtcctctcgtgactctgctagaacgagaagcaagacaaacattttgatagatttgtggccatcaagacagtcaatggcgtgagctcatttgagctccttttgtcttgattcaaaatgctcttgttgcatgcaacattagaatttgttgtggtgggattttgcacatctagccagaatttggtaacctcatgtttcttttatcccaactgcataatagatgcaaaatctaatagctcacattcccaacaaaattaccctgtccttctcaaaagatacactaatgatgaaattacaatgtgggcaaataaaatcatcccacttactgcatgaagaatgggattacaaaactacctatctccttcctttcgagctcacccttgtcagtcattgagctgccagacacctgagaagaatcgatctcttgctttgtatttcacattctttgtaacctgaaaaggtgccagtaaaattaccagagttctttaggcctttagggacactcatcaccattggtttcttttttttctgaggcgtgacaaatgttgatccaactgga

SEQ ID NO: 201005 - DNA, 3070 bp, Zea Mays
ctagccacggccagtcaaccaccgcgagctccatctccatggacgcctgctctctcgtccactgccatctgccacggccactgcagctcccgctccttgcgcctccaactcccagccggcaccggccccgcgtcgccagcgccttggtctgctgctgctgccccgccgccgcggcagaccaccaccaggaacggccctgggagtggtacgaccgcgccatccagtcccacgcggggtccgacctggcgcgctccctaggacttctcgccgacatgcaagcgtccggggggcgccctagcggcagcgcgtacgcgcgcctcatccgcgcgctgtcccgcgcagggcgcgcgctggaggccgaggcgctcctcctcgagatgcgccgcctcggcccgcgcccggaagccgcgcactacaacgcgctccttgagggcctgctcgccgccgcgcacctccgcctcgccgacctcctcctcctccagatggccgacgacggcgtcgcgaggaaccggcgcacctacacgctcttgctaggcgcgtacgcgcgcgccggccggctcgaggactcgtggtgggtgctcggtgagatgaggcgctggggcattcgcctcgacaccgccgggtatagcatgctcgtgcggctgtaccgggacaatggcatgtggaagaaggccaccgacctcgtcatggagatgcaggaggttggggtggaactggatgttaagatctacagcggcctgatcgatacgttcggcaagtatggacagctagcggacgcacgcaggatgtttgataaaatgcgcgccgaaggcgtcaggccagacatatcgacttggaatgctttgattcaatggcattgtcgggttgggaacatgaaacgcgctctgcggttcttcacatccatgcaggaggaagggatgtacccggacccaaagatatttgttatgatcatcagccggttgggggaacaagggaagtgggatgagattaagaagttgtttgatggcatgaacaatcgaggtttcaaggagagtggcgcagtgtacgcaatattggttgacatttacgggcagtatggccattttcgtgatgcacaggactgtatagctgctcttagagctgagaatacacagcttttgcctcgtgtattttgtgtcattgcaaacgcttatgctcaacagggactgtgtgaacaaactgtaaatgtacttcagttgatggaggaagaaggatttgagccaaaccttgttatgctgaattcgttaatcaatgcttttggcactgctggaaggcatttggaggcactagctgtatttcagcatatcaaggatagtggtatgagcccagatgttgtgacatacactacacttatgaagacattcatgagagcaaagaaatttgaaaaggtatctgaagtatacagagaaatggaacgtgctggatgtgctccagatagaaaggctagagaaatgttacatgatgcaactgtagttctagaacaaagaggatgtatctattgaattcggaatcattgctgttgtaattggtccattgtcaatgcatgtaacttcagggagcccaccccctttttgcttacacatgcatgatgcagagcaaacacaggattgaatgttctgatacatgtagatgatcatgtactggttttcttcaaggttgaaacactatgcatgcgaagatttggatggttatggcatcaagccaataactctttccaaggctcctgaatgtctatatgttgatcagaagagtgaaaaaggataaccgagtatagttttcacccttgtacttagtcatggttatggtcaaagcaagactatcaggcataaacataaggatgaatcagaaaatatacataggccatgaacagcgagaagcatatagacactccgaaaatgaagcacatcaacttggtggaatttccttacaggtttctttctttccaagtcatatattatgaattttgtgtgagtgtgacaaggaattgctgaaaacatttggtgttgatcattgattgttatgtaaatgtatccaagtagctacatggtagcttatgcaatcaattgccaagtggtagagtgtaaacaatacaactacattttcactatttataatgtcagttgtaaatacttcaaattcaaagtagcgcaacacaattatgattcagtcctaataaacagactgtaaatacttgatggcttgatgtactattaaaattagaatagccaagtgtaaatatttgattttgttctggttactgaattaactttggcacccatttccacactgttattattgagtttatttattgtgggcttcatcgcttataatttatatacagaatgaaataaaacacatggtcaaaccttttcatcagaattgtaggctctccgttcctatattatcactgatggactccttacatacttgatcagatcatagattttgcttgatgctaacaataacataaaattaagagacaaaaaaaggagcagcgtcctctcgtgactctgctagaacgagaagcaagacaaacattttgatagatttgtggccatcaagacagtcaatggcgtgagctcatttgagctccttttgtcttgattcaaaatgctcttgttgcatgcaacattagaatttgttgtggtgggattttgcacatctagccagaatttggtaacctcatgtttcttttatcccaactgcataatagatgcaaaatctaatagctcacattcccaacaaaattaccctgtccttctcaaaagatacactaatgatgaaattacaatgtgggcaaataaaatcatcccacttactgcatgaagaatgggattacaaaactacctatctccttcctttcgagctcacccttgtcagtcattgagctgccagacacctgagaagaatcgatctcttgctttgtatttcacattctttgtaacctgaaaaggtgccagtaaaattaccagagttctttaggcctttagggacactcatcaccattggtttcttttttttctgaggcgtgacaaatgttgatccaactgga

SEQ ID NO: 201006 - DNA, 2956 bp, Zea Mays
cagtcaaccaccgcgagctccatctccatggacgcctgctctctcgtccactgccatctgccacggccactgcagctcccgctccttgcgcctccaactcccagccggcaccggccccgcgtcgccagcgccttggtctgctgctgctgccccgccgccgcggcagaccaccaccaggaacggccctgggagtggtacgaccgcgccatccagtcccacgcggggtccgacctggcgcgctccctaggacttctcgccgacatgcaagcgtccggggggcgccctagcggcagcgcgtacgcgcgcctcatccgcgcgctgtcccgcgcagggcgcgcgctggaggccgaggcgctcctcctcgagatgcgccgcctcggcccgcgcccggaagccgcgcactacaacgcgctccttgagggcctgctcgccgccgcgcacctccgcctcgccgacctcctcctcctccagatggccgacgacggcgtcgcgaggaaccggcgcacctacacgctcttgctaggcgcgtacgcgcgcgccggccggctcgaggactcgtggtgggtgctcggtgagatgaggcgctggggcattcgcctcgacaccgccgggtatagcatgctcgtgcggctgtaccgggacaatggcatgtggaagaaggccaccgacctcgtcatggagatgcaggaggttggggtggaactggatgttaagatctacagcggcctgatcgatacgttcggcaagtatggacagctagcggacgcacgcaggatgtttgataaaatgcgcgccgaaggcgtcaggccagacatatcgacttggaatgctttgattcaatggcattgtcgggttgggaacatgaaacgcgctctgcggttcttcacatccatgcaggaggaagggatgtacccggacccaaagatatttgttatgatcatcagccggttgggggaacaagggaagtgggatgagattaagaagttgtttgatggcatgaacaatcgaggtttcaaggagagtggcgcagtgtacgcaatattggttgacatttacgggcagtatggccattttcgtgatgcacaggactgtatagctgctcttagagctgagaatacacagcttttgcctcgtgtattttgtgtcattgcaaacgcttatgctcaacagggactgtgtgaacaaactgtaaatgtacttcagttgatggaggaagaaggatttgagccaaaccttgttatgctgaattcgttaatcaatgcttttggcactgctggaaggcatttggaggcactagctgtatttcagcatatcaaggatagtggtatgagcccagatgttgtgacatacactacacttatgaagacattcatgagagcaaagaaatttgaaaaggtatctattgaattcggaatcattgctgttgtaattggtccattgtcaatgcatgtaacttcagggagcccaccccctttttgcttacacatgcatgatgcagagcaaacacaggattgaatgttctgatacatgtagatgatcatgtactggttttcttcaaggttgaaacactatgcatgcgaagatttggatggttatggcatcaagccaataactctttccaaggctcctgaatgtctatatgttgatcagaagagtgaaaaaggataaccgagtatagttttcacccttgtacttagtcatggttatggtcaaagcaagactatcaggcataaacataaggatgaatcagaaaatatacataggccatgaacagcgagaagcatatagacactccgaaaatgaagcacatcaacttggtggaatttccttacaggtttctttctttccaagtcatatattatgaattttgtgtgagtgtgacaaggaattgctgaaaacatttggtgttgatcattgattgttatgtaaatgtatccaagtagctacatggtagcttatgcaatcaattgccaagtggtagagtgtaaacaatacaactacattttcactatttataatgtcagttgtaaatacttcaaattcaaagtagcgcaacacaattatgattcagtcctaataaacagactgtaaatacttgatggcttgatgtactattaaaattagaatagccaagtgtaaatatttgattttgttctggttactgaattaactttggcacccatttccacactgttattattgagtttatttattgtgggcttcatcgcttataatttatatacagaatgaaataaaacacatggtcaaaccttttcatcagaattgtaggctctccgttcctatattatcactgatggactccttacatacttgatcagatcatagattttgcttgatgctaacaataacataaaattaagagacaaaaaaaggagcagcgtcctctcgtgactctgctagaacgagaagcaagacaaacattttgatagatttgtggccatcaagacagtcaatggcgtgagctcatttgagctccttttgtcttgattcaaaatgctcttgttgcatgcaacattagaatttgttgtggtgggattttgcacatctagccagaatttggtaacctcatgtttcttttatcccaactgcataatagatgcaaaatctaatagctcacattcccaacaaaattaccctgtccttctcaaaagatacactaatgatgaaattacaatgtgggcaaataaaatcatcccacttactgcatgaagaatgggattacaaaactacctatctccttcctttcgagctcacccttgtcagtcattgagctgccagacacctgagaagaatcgatctcttgctttgtatttcacattctttgtaacctgaaaaggtgccagtaaaattaccagagttctttaggcctttagggacactcatcaccattggtttcttttttttctgaggcgtgacaaatgttgatccaactgga

SEQ ID NO: 201007 - DNA, 3062 bp, Zea Mays
gtcaaccaccgcgagctccatctccatggacgcctgctctctcgtccactgccatctgccacggccactgcagctcccgctccttgcgcctccaactcccagccggcaccggccccgcgtcgccagcgccttggtctgctgctgctgccccgccgccgcggcagaccaccaccaggaacggccctgggagtggtacgaccgcgccatccagtcccacgcggggtccgacctggcgcgctccctaggacttctcgccgacatgcaagcgtccggggggcgccctagcggcagcgcgtacgcgcgcctcatccgcgcgctgtcccgcgcagggcgcgcgctggaggccgaggcgctcctcctcgagatgcgccgcctcggcccgcgcccggaagccgcgcactacaacgcgctccttgagggcctgctcgccgccgcgcacctccgcctcgccgacctcctcctcctccagatggccgacgacggcgtcgcgaggaaccggcgcacctacacgctcttgctaggcgcgtacgcgcgcgccggccggctcgaggactcgtggtgggtgctcggtgagatgaggcgctggggcattcgcctcgacaccgccgggtatagcatgctcgtgcggctgtaccgggacaatggcatgtggaagaaggccaccgacctcgtcatggagatgcaggaggttggggtggaactggatgttaagatctacagcggcctgatcgatacgttcggcaagtatggacagctagcggacgcacgcaggatgtttgataaaatgcgcgccgaaggcgtcaggccagacatatcgacttggaatgctttgattcaatggcattgtcgggttgggaacatgaaacgcgctctgcggttcttcacatccatgcaggaggaagggatgtacccggacccaaagatatttgttatgatcatcagccggttgggggaacaagggaagtgggatgagattaagaagttgtttgatggcatgaacaatcgaggtttcaaggagagtggcgcagtgtacgcaatattggttgacatttacgggcagtatggccattttcgtgatgcacaggactgtatagctgctcttagagctgagaatacacagcttttgcctcgtgtattttgtgtcattgcaaacgcttatgctcaacagggactgtgtgaacaaactgtaaatgtacttcagttgatggaggaagaaggatttgagccaaaccttgttatgctgaattcgttaatcaatgcttttggcactgctggaaggcatttggaggcactagctgtatttcagcatatcaaggatagtggtatgagcccagatgttgtgacatacactacacttatgaagacattcatgagagcaaagaaatttgaaaaggtatctgaagtatacagagaaatggaacgtgctggatgtgctccagatagaaaggctagagaaatgttacatgatgcaactgtagttctagaacaaagaggatgtatctattgaattcggaatcattgctgttgtaattggtccattgtcaatgcatgtaacttcagggagcccaccccctttttgcttacacatgcatgatgcagagcaaacacaggattgaatgttctgatacatgtagatgatcatgtactggttttcttcaaggttgaaacactatgcatgcgaagatttggatggttatggcatcaagccaataactctttccaaggctcctgaatgtctatatgttgatcagaagagtgaaaaagtgcaggataaccgagtatagttttcacccttgtacttagtcatggttatggtcaaagcaagactatcaggcataaacataaggatgaatcagaaaatatacataggccatgaacagcgagaagcatatagacactccgaaaatgaagcacatcaacttggtggaatttccttacaggtttctttctttccaagtcatatattatgaattttgtgtgagtgtgacaaggaattgctgaaaacatttggtgttgatcattgattgttatgtaaatgtatccaagtagctacatggtagcttatgcaatcaattgccaagtggtagagtgtaaacaatacaactacattttcactatttataatgtcagttgtaaatacttcaaattcaaagtagcgcaacacaattatgattcagtcctaataaacagactgtaaatacttgatggcttgatgtactattaaaattagaatagccaagtgtaaatatttgattttgttctggttactgaattaactttggcacccatttccacactgttattattgagtttatttattgtgggcttcatcgcttataatttatatacagaatgaaataaaacacatggtcaaaccttttcatcagaattgtaggctctccgttcctatattatcactgatggactccttacatacttgatcagatcatagattttgcttgatgctaacaataacataaaattaagagacaaaaaaaggagcagcgtcctctcgtgactctgctagaacgagaagcaagacaaacattttgatagatttgtggccatcaagacagtcaatggcgtgagctcatttgagctccttttgtcttgattcaaaatgctcttgttgcatgcaacattagaatttgttgtggtgggattttgcacatctagccagaatttggtaacctcatgtttcttttatcccaactgcataatagatgcaaaatctaatagctcacattcccaacaaaattaccctgtccttctcaaaagatacactaatgatgaaattacaatgtgggcaaataaaatcatcccacttactgcatgaagaatgggattacaaaactacctatctccttcctttcgagctcacccttgtcagtcattgagctgccagacacctgagaagaatcgatctcttgctttgtatttcacattctttgtaacctgaaaaggtgccagtaaaattaccagagttctttaggcctttagggacactcatcaccattggtttcttttttttctgaggcgtgacaaatgttgatccaactgga

SEQ ID NO: 201008 - DNA, 3023 bp, Zea Mays
tcaaccaccgcgagctccatctccatggacgcctgctctctcgtccactgccatctgccacggccactgcagctcccgctccttgcgcctccaactcccagccggcaccggccccgcgtcgccagcgccttggtctgctgctgctgccccgccgccgcggcagaccaccaccaggaacggccctgggagtggtacgaccgcgccatccagtcccacgcggggtccgacctggcgcgctccctaggacttctcgccgacatgcaagcgtccggggggcgccctagcggcagcgcgtacgcgcgcctcatccgcgcgctgtcccgcgcagggcgcgcgctggaggccgaggcgctcctcctcgagatgcgccgcctcggcccgcgcccggaagccgcgcactacaacgcgctccttgagggcctgctcgccgccgcgcacctccgcctcgccgacctcctcctcctccagatggccgacgacggcgtcgcgaggaaccggcgcacctacacgctcttgctaggcgcgtacgcgcgcgccggccggctcgaggactcgtggtgggtgctcggtgagatgaggcgctggggcattcgcctcgacaccgccgggtatagcatgctcgtgcggctgtaccgggacaatggcatgtggaagaaggccaccgacctcgtcatggagatgcaggaggttggggtggaactggatgttaagatctacagcggcctgatcgatacgttcggcaagtatggacagctagcggacgcacgcaggatgtttgataaaatgcgcgccgaaggcgtcaggccagacatatcgacttggaatgctttgattcaatggcattgtcgggttgggaacatgaaacgcgctctgcggttcttcacatccatgcaggaggaagggatgtacccggacccaaagatatttgttatgatcatcagccggttgggggaacaagggaagtgggatgagattaagaagttgtttgatggcatgaacaatcgaggtttcaaggagagtggcgcagtgtacgcaatattggttgacatttacgggcagtatggccattttcgtgatgcacaggactgtatagctgctcttagagctgagaatacacagcttttgcctcgtgtattttgtgtcattgcaaacgcttatgctcaacagttgatggaggaagaaggatttgagccaaaccttgttatgctgaattcgttaatcaatgcttttggcactgctggaaggcatttggaggcactagctgtatttcagcatatcaaggatagtggtatgagcccagatgttgtgacatacactacacttatgaagacattcatgagagcaaagaaatttgaaaaggtatctgaagtatacagagaaatggaacgtgctggatgtgctccagatagaaaggctagagaaatgttacatgatgcaactgtagttctagaacaaagaggatgtatctattgaattcggaatcattgctgttgtaattggtccattgtcaatgcatgtaacttcagggagcccaccccctttttgcttacacatgcatgatgcagagcaaacacaggattgaatgttctgatacatgtagatgatcatgtactggttttcttcaaggttgaaacactatgcatgcgaagatttggatggttatggcatcaagccaataactctttccaaggctcctgaatgtctatatgttgatcagaagagtgaaaaaggataaccgagtatagttttcacccttgtacttagtcatggttatggtcaaagcaagactatcaggcataaacataaggatgaatcagaaaatatacataggccatgaacagcgagaagcatatagacactccgaaaatgaagcacatcaacttggtggaatttccttacaggtttctttctttccaagtcatatattatgaattttgtgtgagtgtgacaaggaattgctgaaaacatttggtgttgatcattgattgttatgtaaatgtatccaagtagctacatggtagcttatgcaatcaattgccaagtggtagagtgtaaacaatacaactacattttcactatttataatgtcagttgtaaatacttcaaattcaaagtagcgcaacacaattatgattcagtcctaataaacagactgtaaatacttgatggcttgatgtactattaaaattagaatagccaagtgtaaatatttgattttgttctggttactgaattaactttggcacccatttccacactgttattattgagtttatttattgtgggcttcatcgcttataatttatatacagaatgaaataaaacacatggtcaaaccttttcatcagaattgtaggctctccgttcctatattatcactgatggactccttacatacttgatcagatcatagattttgcttgatgctaacaataacataaaattaagagacaaaaaaaggagcagcgtcctctcgtgactctgctagaacgagaagcaagacaaacattttgatagatttgtggccatcaagacagtcaatggcgtgagctcatttgagctccttttgtcttgattcaaaatgctcttgttgcatgcaacattagaatttgttgtggtgggattttgcacatctagccagaatttggtaacctcatgtttcttttatcccaactgcataatagatgcaaaatctaatagctcacattcccaacaaaattaccctgtccttctcaaaagatacactaatgatgaaattacaatgtgggcaaataaaatcatcccacttactgcatgaagaatgggattacaaaactacctatctccttcctttcgagctcacccttgtcagtcattgagctgccagacacctgagaagaatcgatctcttgctttgtatttcacattctttgtaacctgaaaaggtgccagtaaaattaccagagttctttaggcctttagggacactcatcaccattggtttcttttttttctgaggcgtgacaaatgttgatccaactgga

SEQ ID NO: 201009 - DNA, 2491 bp, Zea Mays
ctgtgtccagggctccagcgcgctctcctcgtccctgttcttccctagccgccgcaggctgcagagcccccggcgagctgccgcccctgccacatatactcagcctccgtccctcgccggtcccaataccctgtcgtccccagacgaagccgacgagcgtgaccctcgcttgcctgaatctgacgcctccgggctcgggctatagttcaatcggtgccggcggggcaagaggaatggcgtggcggatgatgcgaaggaaggattttcacacgggccttgtgactttggcgttccgaaaggatcttgggttcaaaaagtttttctccagtggaaaaatcggaaatctgtcccaggtctacggcagtgataagcccaaatactctgctaattgcatgccctctaaccatttcactatcaggaattttaatgcaggtgtttatttgttagcatggagtcagaaaagggaggatgttgtaggtctgaaagctcccaaaaaggagaagcgagtgaagaaagaaaatagaacacaacctcctgtagaagcaccatatgttgcaccaaaaacgaagatatctatcaaacctgtaccagataaaactgttgagatttttgacgggatgactttgcttgacctttctaaacgaactggaacttggcgttaatagcagaagaatgcacactggtgaaggcaagaatgagccacgccctgctgttgtgacggtaatgggacatgttgaccatggtaaaacatcacttttggatgctctccgtcaaacatctgttgctgccaaggaagctggtggtatcactcagcatataggtgccttcgttgttgagatgtcgtcaggagcatctataacattccttgatactccaggacatgctgcatttagtgccatgcgggctaggggcgctgctgttacggatattgtagtccttgtggttgcagcagatgatggtattatgcctcagacactagaagctatgtctcatgcaaaagcagcaaatgttcctattgtagttgcaataaacaaatgtgacaaatctggagctgatcctgagagggtcagaattcaacttggttcagaaggtttacttttggaggatatgggtggggatgtgcaggttgttgaaatctctgcagttacaaaaactggtttggataaattggaagaggctttgctccttcaagctgagatgatggacctgaaagccagaatagatggccctgctcaggcttttgtggtggaggcaagggtggacaggggcaggggtccactcgcaacagctatagtcaagtatggcacattagttagtgggcaacacattgttgtgggagcagagtggggaagaattaggtctcttagagacacagcagggaatataacgcagtctgcaaaacctgcaatgcctattgaaattgaggggttaaagggccttccaatggctggggatgacgttgtagttgttgactcagaggagagggcaagaatgctaagtcatgggcggaagaagaagcaggagaaagacaggcttcgaaaaattgatgaggggatggcagaggagctagaaattaaagaagagactcctgaaagagttgaaatgaccattattgtcaaagccgatgtacaaggcagtgttcaagctgtcacagatgctttaagaagtcttaatagcgcacaggtgttcgtgaatgttgttcatgtaggtgttggcccaatcagtcagcatgacattgatctggcacaagcgtgtggagcatatatagttggtttcaacattcgcagtccacctagtcctatcactcaagcagcagcaagagccaacataaaggttttgcttcacaaggtcatctatcaccttcttgaggagatgggaaaggccattgtggagaaggcaccgggaactgctgaaacccaggtttcaggagaggctgaggttctgaacatatttgagctgaaagggcgcagcaagtcaaaaggaccggatgtcaaaattgctggctgccgtataactgatggccacttcagcaaatccggaaccatgagactgttgaggagcggagatgttgtctttgagggtccatgcgagtctctgaagcgggagaagaaggacgcagaaacagtcgaaaagggtaacgactgtgggctggtgattcaggattgcgatgatttccaggtaggggatatcatacagtgcgtggagcaggtgattaggaagcccaagttcatctcgacgcagagtggttcggttcggattgaatgctgaaatgtagtaatggttgtggctgacactactgttccatttccctattaattcagctagttgtgctttactgaccaaaggtttcgagtgtaacaagattttgttggctagcaacttgttgcaactgcaaccaaacccctttctgatatgagataattaggacaaaacaacagagttaagttgcttttttttggggtcatgttaaacaatgtatgcagtattgctc

SEQ ID NO: 201010 - DNA, 1026 bp, Zea Mays
cgcgtgcttttggctccgtcgcgcatgcgccggctcgccggccccattcgcctcgctctggcgcacccaggaggaggcggcggaggcgtacgacgtggccgcgatcaagttccgcggcctcagcgcggtcaccaacttcgacatcacgcggtacgacgtggacaagatcatggagagcagcacgctgctcccgggcgagcaggtccggcgcaggaaggaaggcgccgacgccgcggtctcggaggccgccgccgcgctggtgcaggccggcaactgcatgacggacacctggaagatccaggcggcgctgccggctgccgcgcgggccgacgagcgcggcgccggccagcagcagcgtcaggacttgctgtcgagcgaggccttctcgctgctccacgacatcgtgtccgtcgacgccgctgctggtacagggacagggggcatgtcgaacgcgtcctcgtcgctggcccccagcgtgagcaactcccgggagcagagcccggaccggggcggcgccagcctcgccatgctcttcgccaagcccgccgcggcgcccaagctggcttgcccgctgccgctggggtcctgggtgtcgccgtccgcggtgtccgccaggccgcccggcgtgtcaatcgcgcacctgccggtgttcgccgcgtggaccgacgcatgaacaaacatccgtgtcattaccagggtacggttcttttggtttgcttagagcgtgctttttagctgggtaaggttagctgcgtagcggtggtctgatcagcatatgtgagaggaactagccatgcgtgtctgctttggcctcctgcgattcctcctccagttgcgttgcgaggaggtttctttttgtaataccggggctagatagcacagcatggatctcctcctgtagccaacactaatttggagtaggatggttagtgttgatctcctaacttcaattaggaaaaatatgccaagtaagataagtttaaacctgtgcgctttgcaattcatcaatgagctgggattcagacc

SEQ ID NO: 201011 - DNA, 3183 bp, Zea Mays
tccaaaaataccaatccgccttccatgttctcgtcgctgcctccgtctgacggctcgaagctccctccagttccgatctaaacccgccgaaaccctaatccccatggctgccgccatgggcaaccccatcctgaccctccccgcaccggagggcaacggcaccgggggcggcgacgccgaccagcagctgcagcaggcgccgcctaagccgcctcctcccggcgcgaagacggaccccccggcgacggtggccacccacacgcgcaccatcggcatcatccaccctccgcccgacatccgcgtcatcatcgagaagacggctaccttcgtcgccaagaacgggcccgagttcgagcgccgcatcatctccctcaaccagggcaacgccaaattcaacttcctgcagccctcggatccctaccacgcctactaccagcaccgcgtttccgagatagccgctgcgccgcccggcgcggacggcccctcgggcgccgatactggcgcggctcccgacgaatcgccagcgtcggccccggccgacggcgccgccgccgcacccgtagatggcgctgctgcggacgcaaaggccgatcactccgcgcccttccgcgtggggccgccgcccaaggtgctggtgccacccaaggctgagctgtacacggtgcggctgcccgagggtatcacaggggaggagctggacatcatcaagctgaccgcccaatttgtggcgcggaacgggaagaacttcctgacgagcctggcgcaacgcgagagcaacaacatgcagttccacttcatccgacccacgcacagcatgttccccttctttacggccctcacagatgcgtactccagggtgctgaggccggcagagggggtgcctgcattgctaaaagagctgagggaggggtcaaaggacctgactacagtgttggagagatgcttgaaccggttagagtgggatcggtcgcaggagcaggcaaggcagcaggcagaggatgaggttgagcaggaacggatgcagatgtcaatgattgactggcatgattttgttgttgtggagaccattgaatttgcagatgatgagtatgaggggcttcctgtgccacttacactggaggagttgaagcgccagaagaggatggagaacttgggagaggaggaagcgatggatttgactgaaccttctaaggaggttgagatggaaatggatgaagaggagatgcaacttgttgaggaaggaatgcgggcagcacggcttgaggagaatgatggagcagcacaagttagcttgccgggtgatgacgaggcacctatgaggattgtcaagaactacaagaggcctgaggagaggattccggcagagagagacccaactaagtttgttgtctcgccaataactggggaactcattccgatcagcgagatggaggaacacatgcgcatctcactcattgaccctaagtacaaggagcagaaagagaggatgttagccaagatcaaggagactacccttgcacctgatgatgaaatatcacggaacattgttggccttgctcgcactcgccctgatatttttggaaccactgaggaggaggtgtctaacgccgtcaaggcagaaattgagaagaaaaaggatgaacagccaaagcaggttatttgggatggtcattctggtagcattggacgcactgctactcatgcattatctcagcctcagggtggtgaggaacagtttgatgctacgaatgttgatgggaggcctgttcctggtccagctccacttgtccgacctggcatgccgttgcctcgacctcctcagccacttcctcttgttaatgttcctcgttttatcgctccaccagcaccatactctgttccacccccaggttctcatatgcctggagttccacacatgatgcctcacatgcatctgcctccacagcagatacctggccagccgccgatggttaggatgccaggtcaaatggttcatatgccaaccagcattcctccgcctcctggccaaactcagtttatgcctggtccaccacgcacatttgctatgcccccatcatcgcacatgccacccatgatcaatcccattggaatccctcagcctccagcaccgcctctgcctccacagcctcctgctgaagagcaaccacctccacccgatgaaccagaacctaagaggcagagaacagatgatgcttctctcatcccagcagagcagtaccttgttcagcatccgggtcctgctagcatctctgtatctgtacccaaccttgatgaagggaacttgcgaggccaaattttgcagattcctgtccaatcactgtcagacacagttggtagtctgaaggagcaaattgctggagagttgcaactccctgctaataagcagaagttgagtgtgaggactagtttcctcaaagacaaccttactcttgcttactacaatgtgggtcctggagtggtgatcaatctaacactgagggagcgtggtgggagaaagaaatgagtcttttggttctcagttggcagtttaatgcttacaactataattcagcagctatcatggagaaccagttcgtatctttcatattattttcttttgtatgctatatgcaatcatttgtgttatgtgaacatcgtactttcctctatattatgatacagttaaatcttgtgagtggttctgcctagtatgttacttgaggttgctaaatgctaatggatactttcttggccacttaatgttaaatcgtatggcttctctaacttcttttgtttggtctttgcgagatgccttctatataaagagttcggatttctgttttctattcaatgttatgttttttcttgtcttatgggtgtacatgttacatgtagattcttctgtacaatgtcgatgacagtactatttgtttggtggttattttgaaagggcatccattgcgtcacagctgaagtaggagttttttttgtatacgctgaaatatctgaagtcattggcatacgtacctgtttttttggtatggtgctgcatgcaactttccagtatacggactgttaattcattcccatggcattatgttcctttatccttacttttgttggtattgtggtagcagtgcacaggagctaaagtaccaaagctaaaagtgcctaaaatattac

SEQ ID NO: 201012 - DNA, 1850 bp, Zea Mays
ggaccaatgggcctagagcccctagacaggcagtttccatgcctgctccaggcccaggcaaaacagcaccggactgcggctccaccattgccgttcctgtttcttcgaattcttctcccgttcaggcgtccatccctcttttctctcgtggcgacgaagacgaccgacgccgacgctgacgccctacgccaggtgccaggttccgtcgggtccttcgccggcgaagagcatccaccaggcgacccagtgctgttctggtgcggtttcattgcggaagttttgttgtgggattttccggtggcgaagatgatccgactacccatgtacgcggcgttcagcctgctggcgacggcttcggcggcgtactacgcgttcagcagccgggagcagttctacccggcgatggtcactcatacagaagcgggaggcgtctgttgccatcttcttctcctttgaatatacgatactagcaacatccactttatcaacatttgtgaagtacatattctatgtcagtgacatgctaatggaaggtcaatgggagagaaaggcagtttatacattttacttggagctcatcagtgaccttgtgcacttgtcattatacatgctcttcttcatagctatcttcttgaactatggtgtcccgctgcacttgattcgtgagctatatgagaccttccgcagcttcagaattcgcattgcagattacatacgttacagaaagatcacttccaacatgaatgaacgctttccagaagctacatcagaagagctcgatgcgagtgatgctacatgtattatttgccgtgaggagatgactacagcaaagaaactgctctgtgggcatctgttccatgtgcattgtctgaggtcatggctagagcgccaacacacttgccccacgtgcagagctccaatcgttcctgcagataatggacgtgctgcatcatcacgacaacatggagcccaggctggggttcaacctggtactgccactccatcctcagaaggagcaccaggtgagaacatgagcaggcgccaagcaaaacttgaagctgctgctgcagcagcttctttatatggaagatcttttgtttatcctccagcaaacaccctaaacaggtctggttctccccagcctacatcaagtgcaccacaatctgaagccagtagctccaatcatcagtcacaaaaagaccaagaaacacagctccaaaacagcagcgatggtttagtgcctctgccttttagtgcagatggtgttgttggttcaggaacaagcacaagagatcttgaaaattcactgcagaaggcacaagaaaactttattaagagccagattgagatgttacaaatccaactgcaaatggtgcagcgtggcgctgctgggttgagcagtagcgagaacactgagcacacagaagactgactgaatctgtaaacaggcactcctgcatcgtggagtaataatgagaatactgagcacacgcagctgaatctgtaaataggcggagatgaggatggggataaaagaaagcaatcaaagaattggctatacctgggggaaactgatgttttgcctggattttggtaggcttgttgactatgctttcctgttactgtgttagtgccttcttgccagcgttagatgtttctctacgtgtggtggtttctgtaggttgggtacatctaattgctagtttaattatacgattacacaaaattcttgtaccgagggaaaatagaaaggataattgtacaaatgacttttttgtgtgcatatccatgatatcgggattgtctgtagattttgtgtttactggagtaaaacagaaaatttggctgct

SEQ ID NO: 201013 - DNA, 1855 bp, Zea Mays
ggaccaatgggcctagagcccctagacaggcagtttccatgcctgctccaggcccaggcaaaacagcaccggactgcggctccaccattgccgttcctgtttcttcgaattcttctcccgttcaggcgtccatccctcttttctctcgtggcgacgaagacgaccgacgccgacgctgacgccctacgccaggtgccaggttccgtcgggtccttcgccggcgaagagcatccaccaggcgacccagtgctgttctggtgcggtttcattgcggaagttttgttgtgggattttccggtggcgaagatgatccgactacccatgtacgcggcgttcagcctgctggcgacggcttcggcggcgtactacgcgttcagcagccgggagcagttctacccggcgatggtgtcactcatacagaagcgggaggcgtctgttgccatcttcttctcctttgaatatacgatactagcaacatccactttatcaacatttgtgaagtacatattctatgtcagtgacatgctaatggaaggtcaatgggagagaaaggcagtttatacattttacttggagctcatcagtgaccttgtgcacttgtcattatacatgctcttcttcatagctatcttcttgaactatggtgtcccgctgcacttgattcgtgagctatatgagaccttccgcagcttcagaattcgcattgcagattacatacgttacagaaagatcacttccaacatgaatgaacgctttccagaagctacatcagaagagctcgatgcgagtgatgctacatgtattatttgccgtgaggagatgactacagcaaagaaactgctctgtgggcatctgttccatgtgcattgtctgaggtcatggctagagcgccaacacacttgccccacgtgcagagctccaatcgttcctgcagataatggacgtgctgcatcatcacgacaacatggagcccaggctggggttcaacctggtactgccactccatcctcagaaggagcaccaggtgagaacatgagcaggcgccaagcaaaacttgaagctgctgctgcagcagcttctttatatggaagatcttttgtttatcctccagcaaacaccctaaacagcaggtctggttctccccagcctacatcaagtgcaccacaatctgaagccagtagctccaatcatcagtcacaaaaagaccaagaaacacagctccaaaacagcagcgatggtttagtgcctctgccttttagtgcagatggtgttgttggttcaggaacaagcacaagagatcttgaaaattcactgcagaaggcacaagaaaactttattaagagccagattgagatgttacaaatccaactgcaaatggtgcagcgtggcgctgctgggttgagcagtagcgagaacactgagcacacagaagactgactgaatctgtaaacaggcactcctgcatcgtggagtaataatgagaatactgagcacacgcagctgaatctgtaaataggcggagatgaggatggggataaaagaaagcaatcaaagaattggctatacctgggggaaactgatgttttgcctggattttggtaggcttgttgactatgctttcctgttactgtgttagtgccttcttgccagcgttagatgtttctctacgtgtggtggtttctgtaggttgggtacatctaattgctagtttaattatacgattacacaaaattcttgtaccgagggaaaatagaaaggataattgtacaaatgacttttttgtgtgcatatccatgatatcgggattgtctgtagattttgtgtttactggagtaaaacagaaaatttggctgct

SEQ ID NO: 201014 - DNA, 2233 bp, Zea Mays
ggaccaatgggcctagagcccctagacaggcagtttccatgcctgctccaggcccaggcaaaacagcaccggactgcggctccaccattgccgttcctgtttcttcgaattcttctcccgttcaggcgtccatccctcttttctctcgtggcgacgaagacgaccgacgccgacgctgacgccctacgccaggtgccaggttccgtcgggtccttcgccggcgaagagcatccaccaggcgacccagtgctgttctggtgcggtttcattgcggaagttttgttgtgggattttccggtggcgaagatgatccgactacccatgtacgcggcgttcagcctgctggcgacggcttcggcggcgtactacgcgttcagcagccgggagcagttctacccggcgatggtgtacctctccacctccaagatctgcttcgtgctgctcctcaacacgggcctggttgccatgtgcgtcgcctggcagctcgccaggcgtctcttcctcggctccctccgggaggccgaggtcgagcgcctcaacgagcagtcctggcgggaggtcatcgagattctcttcgccgtcaccatcttccggcaggacttctcggtgtccttccttgccatggtcgctgcactgcttcttgttaaggcactgcactggctcgcgcagaagagggtcgagtacatcgagaccacaccctccgtgcccttgctctcgcacatcaggattgtatccttcatggttttcctgctcacggtcgattgcctcttcctgtcaaactcactcaggtcactcatacagaagcgggaggcgtctgttgccatcttcttctcctttgaatatacgatactagcaacatccactttatcaacatttgtgaagtacatattctatgtcagtgacatgctaatggaaggtcaatgggagagaaaggcagtttatacattttacttggagctcatcagtgaccttgtgcacttgtcattatacatgctcttcttcatagctatcttcttgaactatggtgtcccgctgcacttgattcgtgagctatatgagaccttccgcagcttcagaattcgcattgcagattacatacgttacagaaagatcacttccaacatgaatgaacgctttccagaagctacatcagaagagctcgatgcgagtgatgctacatgtattatttgccgtgaggagatgactacagcaaagaaactgctctgtgggcatctgttccatgtgcattgtctgaggtcatggctagagcgccaacacacttgccccacgtgcagagctccaatcgttcctgcagataatggacgtgctgcatcatcacgacaacatggagcccaggctggggttcaacctggtactgccactccatcctcagaaggagcaccaggtgagaacatgagcaggcgccaagcaaaacttgaagctgctgctgcagcagcttctttatatggaagatcttttgtttatcctccagcaaacaccctaaacaggtctggttctccccagcctacatcaagtgcaccacaatctgaagccagtagctccaatcatcagtcacaaaaagaccaagaaacacagctccaaaacagcagcgatggtttagtgcctctgccttttagtgcagatggtgttgttggttcaggaacaagcacaagagatcttgaaaattcactgcagaaggcacaagaaaactttattaagagccagattgagatgttacaaatccaactgcaaatggtgcagcgtggcgctgctgggttgagcagtagcgagaacactgagcacacagaagactgactgaatctgtaaacaggcactcctgcatcgtggagtaataatgagaatactgagcacacgcagctgaatctgtaaataggcggagatgaggatggggataaaagaaagcaatcaaagaattggctatacctgggggaaactgatgttttgcctggattttggtaggcttgttgactatgctttcctgttactgtgttagtgccttcttgccagcgttagatgtttctctacgtgtggtggtttctgtaggttgggtacatctaattgctagtttaattatacgattacacaaaattcttgtaccgagggaaaatagaaaggataattgtacaaatgacttttttgtgtgcatatccatgatatcgggattgtctgtagattttgtgtttactggagtaaaacagaaaatttggctgct

SEQ ID NO: 201015 - DNA, 2242 bp, Zea Mays
ggaccaatgggcctagagcccctagacaggcagtttccatgcctgctccaggcccaggcaaaacagcaccggactgcggctccaccattgccgttcctgtttcttcgaattcttctcccgttcaggcgtccatccctcttttctctcgtggcgacgaagacgaccgacgccgacgctgacgccctacgccaggtgccaggttccgtcgggtccttcgccggcgaagagcatccaccaggcgacccagtgctgttctggtgcggtttcattgcggaagttttgttgtgggattttccggtggcgaagatgatccgactacccatgtacgcggcgttcagcctgctggcgacggcttcggcggcgtactacgcgttcagcagccgggagcagttctacccggcgatggtgtacctctccacctccaagatctgcttcgtgctgctcctcaacacgggcctggttgccatgtgcgtcgcctggcagctcgccaggcgtctcttcctcggctccctccgggaggccgaggtcgagcgcctcaacgagcagtcctggcgggaggtcatcgagattctcttcgccgtcaccatcttccggcaggacttctcggtgtccttccttgccatggtcgctgcactgcttcttgttaaggcactgcactggctcgcgcagaagagggtcgagtacatcgagaccacaccctccgtgcccttgctctcgcacatcaggattgtatccttcatggttttcctgctcacggtcgattgcctcttcctgtcaaactcactcaggtcactcatacagaagcgggaggcgtctgttgccatcttcttctcctttgaatatacgatactagcaacatccactttatcaacatttgtgaagtacatattctatgtcagtgacatgctaatggaaggtcaatgggagagaaaggcagtttatacattttacttggagctcatcagtgaccttgtgcacttgtcattatacatgctcttcttcatagctatcttcttgaactatggtgtcccgctgcacttgattcgtgagctatatgagaccttccgcagcttcagaattcgcattgcagattacatacgttacagaaagatcacttccaacatgaatgaacgctttccagaagctacatcagaagagctcgatgcgagtgatgctacatgtattatttgccgtgaggagatgactacagcaaagaaactgctctgtgggcatctgttccatgtgcattgtctgaggtcatggctagagcgccaacacacttgccccacgtgcagagctccaatcgttcctgcagataatggacgtgctgcatcatcacgacaacatggagcccaggctggggttcaacctgctgcaggtactgccactccatcctcagaaggagcaccaggtgagaacatgagcaggcgccaagcaaaacttgaagctgctgctgcagcagcttctttatatggaagatcttttgtttatcctccagcaaacaccctaaacagcaggtctggttctccccagcctacatcaagtgcaccacaatctgaagccagtagctccaatcatcagtcacaaaaagaccaagaaacacagctccaaaacagcagcgatggtttagtgcctctgccttttagtgcagatggtgttgttggttcaggaacaagcacaagagatcttgaaaattcactgcagaaggcacaagaaaactttattaagagccagattgagatgttacaaatccaactgcaaatggtgcagcgtggcgctgctgggttgagcagtagcgagaacactgagcacacagaagactgactgaatctgtaaacaggcactcctgcatcgtggagtaataatgagaatactgagcacacgcagctgaatctgtaaataggcggagatgaggatggggataaaagaaagcaatcaaagaattggctatacctgggggaaactgatgttttgcctggattttggtaggcttgttgactatgctttcctgttactgtgttagtgccttcttgccagcgttagatgtttctctacgtgtggtggtttctgtaggttgggtacatctaattgctagtttaattatacgattacacaaaattcttgtaccgagggaaaatagaaaggataattgtacaaatgacttttttgtgtgcatatccatgatatcgggattgtctgtagattttgtgtttactggagtaaaacagaaaatttggctgct

SEQ ID NO: 201016 - DNA, 1946 bp, Zea Mays
ctaccactctctctctctctctctctctctctctccaaatatattatcgcccatgtccgtgactggctctgccccctttgcttggattagctggctgacttctgagatttgtttccctgtatatcgcgcctgatgatccgactacccatgtacgcggcgttcagcctgctggcgacggcttcggcggcgtactacgcgttcagcagccgggagcagttctacccggcgatggtgtacctctccacctccaagatctgcttcgtgctgctcctcaacacgggcctggttgccatgtgcgtcgcctggcagctcgccaggcgtctcttcctcggctccctccgggaggccgaggtcgagcgcctcaacgagcagtcctggcgggaggtcatcgagattctcttcgccgtcaccatcttccggcaggacttctcggtgtccttccttgccatggtcgctgcactgcttcttgttaaggcactgcactggctcgcgcagaagagggtcactcatacagaagcgggaggcgtctgttgccatcttcttctcctttgaatatacgatactagcaacatccactttatcaacatttgtgaagtacatattctatgtcagtgacatgctaatggaaggtcaatgggagagaaaggcagtttatacattttacttggagctcatcagtgaccttgtgcacttgtcattatacatgctcttcttcatagctatcttcttgaactatggtgtcccgctgcacttgattcgtgagctatatgagaccttccgcagcttcagaattcgcattgcagattacatacgttacagaaagatcacttccaacatgaatgaacgctttccagaagctacatcagaagagctcgatgcgagtgatgctacatgtattatttgccgtgaggagatgactacagcaaagaaactgctctgtgggcatctgttccatgtgcattgtctgaggtcatggctagagcgccaacacacttgccccacgtgcagagctccaatcgttcctgcagataatggacgtgctgcatcatcacgacaacatggagcccaggctggggttcaacctggtactgccactccatcctcagaaggagcaccaggtgagaacatgagcaggcgccaagcaaaacttgaagctgctgctgcagcagcttctttatatggaagatcttttgtttatcctccagcaaacaccctaaacaggtctggttctccccagcctacatcaagtgcaccacaatctgaagccagtagctccaatcatcagtcacaaaaagaccaagaaacacagctccaaaacagcagcgatggtttagtgcctctgccttttagtgcagatggtgttgttggttcaggaacaagcacaagagatcttgaaaattcactgcagaaggcacaagaaaactttattaagagccagattgagatgttacaaatccaactgcaaatggtgcagcgtggcgctgctgggttgagcagtagcgagaacactgagcacacagaagactgactgaatctgtaaacaggcactcctgcatcgtggagtaataatgagaatactgagcacacgcagctgaatctgtaaataggcggagatgaggatggggataaaagaaagcaatcaaagaattggctatacctgggggaaactgatgttttgcctggattttggtaggcttgttgactatgctttcctgttactgtgttagtgccttcttgccagcgttagatgtttctctacgtgtggtggtttctgtaggttgggtacatctaattgctagtttaattatacgattacacaaaattcttgtaccgagggaaaatagaaaggataattgtacaaatgacttttttgtgtgcatatccatgatatcgggattgtctgtagattttgtgtttactggagtaaaacagaaaatttggctgct

SEQ ID NO: 201017 - DNA, 2161 bp, Zea Mays
ctttgcataaaagttatagcttttcttgacataggcgaatgtttggtgtgaggaagttatgggatgttaaagacaatcaagcttgggtgcatgacagatttgaggagatgaacttgcatgatgatttctatgaagaccagcggatgtcaagaggtcgtggtggtcgaggtaaagcaagaggtggtggccgtggtttttccagaggtggaaagcagcgtaattaccatgaagatagcaacaacacccaaaatcgcaccccaaaggtagtgagagggcgaggacctcgacgttatgaagctgctgcaaggaacaacagagaggttgttggatcccaacgaaaacaagcagctagatttcgagaatctgctccaaatgctgtagcagccagagattccgggcaagtttcacatgcacagccagaggctgcccctcccaaaaggaatgtcatgagttcaagcctaaattctgcgtccccacctttttatccctccagtgcatctactcaagattttccggtagcagctcaaacgagggacatacaagcaggaggttctaataagatccctccatcttccatgaagatggatgataactcaaagctacaatctggttcaatggttagagggagaatagccatggattatggtgggcgtgataagttacttgctgatggtcctattaggtcatcccaaggaagggcaccaacggcgtcactgaattcaggattcacatcatcatctgttaatcctggccaatcccctattgcgagggcttcagggggcaattcaaacatcggaatatcttcaaataatcagccacaaagtcatggatcagtgatgcaccaaaagttagggcaagtgcagaatcagtctgcaacaagaatcccaactcagcaattgagtcatcggactagtaatttgtcaccagtggctcagcatctacctggtaaatcaggagaaagtggcgagaatggttcataccctactctgaatgattcaaagacagcttctgcggtggtaaaagtcaatagccaggaaactgggatgagttcatttatgtatggtggcacccaggttattggggctgcgggcctttcccagggcgatcaaaattttcctggcactccagctctgctgccagtgatgcaatttgggagtcagcatcctggtggtcttggagttcctactgttggtatggccctccctggctatgtagctcaacagcagatgggaatgggaaacaacgaaatgacatggttgccattattggctggtgcagcaggtgcttttggaggatcatatccaccctatatagcccttgatccgagcttttactctagatcttcaggacagacatcatcatcagttccatccagggaacctagtactaatagagggtcaaaatatcctcaaaatgatattgggaatgaggagcttgatgagcgccagaacaagcctagaagatactcagagatgaacttcagccagtgaagcatcttgtaaggtgaactgcatctgaataagctggttatggccctatttaggccctttgtgatctccagttctgatctggagcactttgggtggctttgatacccttaattatgttaggtcttatgcctgttcgtggagtgttatctgatgggtcacttcacagcagagcagggggtggaattcgttacttgaattatagtattgctcggttgtgctgcgtctggaaatgtcaaatttgttgctgcgtctgaagacgtggacggttgctgaagagagcttgaaaataatggtttgcgttggttgataaagtttaagagttttttttttaaagtacatcctgttagtgactccagttggtggcagtgtactctgatgtatcgggtccgcatatagtggctgctaagaccaagcggcttcattgccgaagcttgtatattttggaatccgttgagtgcggtttgtgacaattttcagcttgcatgagcgtgtccaacatggattttttttttgaaaagccaacaagaggaatccgcccgtctttttatccccgggtgatagaaatttctatttcatggtgaaaagctacgattgtcatattctgtaattgtggaatgaaccgcatgccatcttactgaagctagaaatgagtagttttaactataaaacct

SEQ ID NO: 201018 - DNA, 1587 bp, Zea Mays
ctcatatatgaagttgtggtcaaaattttcatgttgagaatcgtctcaaagtaaaaaatgccatacacttaccaatagagaataattgcaattcggatcaacatagccttttattgcaattcggatactgtatctattagtttgatggaataaaataaagtcatttgccttttattgtggcgaatgtttggtgtgaggaagttatgggatgttaaagacaatcaagcttgggtgcatgacagatttgaggagatgaacttgcatgatgatttctatgaagaccagcggatgtcaagaggtcgtggtggtcgaggtaaagcaagaggtggtggccgtggtttttccagaggtggaaagcagcgtaattaccatgaagatagcaacaacacccaaaatcgcaccccaaaggtagtgagagggcgaggacctcgacgttatgaagctgctgcaaggaacaacagagaggttgttggatcccaacgaaaacaagcagctagatttcgagaatctgctccaaatgctgtagcagccagagattccgggcaagtttcacatgcacagccagaggctgcccctcccaaaaggaatgtcatgagttcaagcctaaattctgcgtccccacctttttatccctccagtgcatctactcaagattttccggtagcagctcaaacgagggacatacaagcaggaggttctaataagatccctccatcttccatgaagatggatgataactcaaagctacaatctggttcaatggttagagggagaatagccatggattatggtgggcgtgataagttacttgctgatggtcctattaggtcatcccaaggaagggcaccaacggcgtcactgaattcaggattcacatcatcatctgttaatcctggccaatcccctattgcgagggcttcagggggcaattcaaacatcggaatatcttcaaataatcagccacaaagtcatggatcagtgatgcaccaaaagttagggcaagtgcagaatcagtctgcaacaagaatcccaactcagcaattgagtcatcggactagtaatttgtcaccagtggctcagcatctacctggtaaatcaggagaaagtggcgagaatggttcataccctactctgaatgattcaaagacagcttctgcggtggtaaaagtcaatagccaggaaactgggatgagttcatttatgtatggtggcacccaggttattggggctgcgggcctttcccagggcgatcaaaattttcctggcactccagctctgctgccagtgatgcaatttgggagtcagcatcctggtggtcttggagttcctactgttggtatggccctccctggctatgtagctcaacagcagatgggaatgggaaacaacgaaatgacatggttgccattattggctggtgcagcaggtgcttttggaggatcatatccaccctatatagcccttgatccgagcttttactctagatcttcaggacagacatcatcatcagttccatccaggtgactaggcgttcaggcgagagctgggttcatctggacgcctaggcggggcctacgcgacaagtcg

SEQ ID NO: 201019 - DNA, 774 bp, Zea Mays
gtagattgctgtgtcttggcctctgccccctgattttgccgtggagacagggatgcccacgactttggaacctagtactaatagagggtcaaaatatcctcaaaatgatattgggaatgaggagcttgatgagcgccagaacaagcctagaagatactcagagatgaacttcagccagtgaagcatcttgtaaggtgaactgcatctgaataagctggttatggtcttatgcctgttcgtggagtgttatctgatgggtcacttcacagcagagcagggggtggaattcgttacttgaattatagtattgctcggttgtgctgcgtctggaaatgtcaaatttgttgctgcgtctgaagacgtggacggttgctgaagagagcttgaaaataatggtttgcgttggttgataaagtttaagagttttttttttaaagtacatcctgttagtgactccagttggtggcagtgtactctgatgtatcgggtccgcatatagtggctgctaagaccaagcggcttcattgccgaagcttgtatattttggaatccgttgagtgcggtttgtgacaattttcagcttgcatgagcgtgtccaacatggattttttttttgaaaagccaacaagaggaatccgcccgtctttttatccccgggtgatagaaatttctatttcatggtgaaaagctacgattgtcatattctgtaattgtggaatgaaccgcatgccatcttactgaagctagaaatgagtagttttaactataaaacct

SEQ ID NO: 201020 - DNA, 1435 bp, Zea Mays
agagaggcagagagccggccatggacgcaacgtcaaactcgaatttacgccggccaggccaccaccagtcgcccacgccccgccgccagtcctggcgcgcgcgcgcgcgtcccccggcccacaccgcaccttccacttccacggaccctgctgcatgcgcgctccagtgcgcagcactagtacgtacgagtagtagtagtgctgtgctgaggacgaggctgctaggtgctagctagctagctctccatgaatcgtatcgatcggaagagaagaagcccattccctgcccctgcctgccttggatacctactccctctccctccctcctcacatcacacagacagcagacaccactggccggccggcctgttcgttcattctctctcgctcgctcgctcgcccgcccgcccgcccgccagcctttcattccatctattaaacgcctataaatacagtacaggctcacacgtccatggaaggaatgtccatcttccttcactaccaccacacggctgctggctgctactaggcaggccttcccacacgcccgccgtagctctctcgcttgtgtggtcatccccggcctcgccttctctcattctgtcgtctgctgcccctgcctgccagtgccaccaccccccggccgtgcggattatattcgggcccaacccaagcaaatggagcagaaggcgaggaggcgccgcgtgccggcgttcggagagtggaactacaactactacggcagcagcgcggagctcgccacgcccgcggcaccggcggagctggaggcccgcagcgacgtctggttcaagtactcgccgcccccgcggaagccaccgccgccgccggcggccagcaggaaagttcggaggccggcggccgacaggtccgcatgcggcggcagcggcaagcggccccgtgccgcgacgcctgcgagggcgtccgacgccgtggtcccatcgtcgtcgtccgtgccacgcacgccggcgaagagcgcggccggcgctgccagggcgcgcgtggtgcgccgcgtcgacgcggacctgtaccaggtgcccccgccggacctgctccacgacgaggatctgccaccgaggcggaagaaggcgtccagcaggagcctgtggatgggttgcttcggcttcagttgcgttccggctgattaactattttctgtatttttttatccatgtatctactcctagtttaactgtactccttttcagattgtgcaatgttttggtttttttgtttgtttctagactagatttcagattgtgcaatgttttggtttttttttctttctggactagagcgagtattgtacagtgtgggcaatgaaaaaaatgtactattatgtatggtttcgtattcgagcctacttgacgccgcctaatcatctgacgcgcatcccgaaacatgcgggcgcttttcg

SEQ ID NO: 201021 - DNA, 1413 bp, Zea Mays
catggacgcaacgtcaaactcgaatttacgccggccaggccaccaccagtcgcccacgccccgccgccagtcctggcgcgcgcgcgcgcgtcccccggcccacaccgcaccttccacttccacggaccctgctgcatgcgcgctccagtgcgcagcactagtacgtacgagtagtagtagtgctgtgctgaggacgaggctgctaggtgctagctagctagctctccatgaatcgtatcgatcggaagagaagaagcccattccctgcccctgcctgccttggatacctactccctctccctccctcctcacatcacacagacagcagacaccactggccggccggcctgttcgttcattctctctcgctcgctcgctcgcccgcccgcccgcccgccagcctttcattccatctattaaacgcctataaatacagtacaggctcacacgtccatggaaggaatgtccatcttccttcactaccaccacacggctgctggctgctactaggcaggccttcccacacgcccgccgtagctctctcgcttgtgtggtcatccccggcctcgccttctctcattctgtcgtctgctgcccctgcctgccagtgccaccaccccccggccgtgcggattatattcgggcccaacccaagcaaatggagaaggcgaggaggcgccgcgtgccggcgttcggagagtggaactacaactactacggcagcagcgcggagctcgccacgcccgcggcaccggcggagctggaggcccgcagcgacgtctggttcaagtactcgccgcccccgcggaagccaccgccgccgccggcggccagcaggaaagttcggaggccggcggccgacaggtccgcatgcggcggcagcggcaagcggccccgtgccgcgacgcctgcgagggcgtccgacgccgtggtcccatcgtcgtcgtccgtgccacgcacgccggcgaagagcgcggccggcgctgccagggcgcgcgtggtgcgccgcgtcgacgcggacctgtaccaggtgcccccgccggacctgctccacgacgaggatctgccaccgaggcggaagaaggcgtccagcaggagcctgtggatgggttgcttcggcttcagttgcgttccggctgattaactattttctgtatttttttatccatgtatctactcctagtttaactgtactccttttcagattgtgcaatgttttggtttttttgtttgtttctagactagatttcagattgtgcaatgttttggtttttttttctttctggactagagcgagtattgtacagtgtgggcaatgaaaaaaatgtactattatgtatggtttcgtattcgagcctacttgacgccgcctaatcatctgacgcgcatcccgaaacatgcgggcgcttttcg

SEQ ID NO: 201022 - DNA, 676 bp, Zea Mays
gcgagcgccatctgactcttcatcgtcgcctttgcccacctcccaagcttccgcctcctcccctcccgcgctttctccgattcttccacgagcttccagatcgcgaaaccaccatagccgcagtcaggcgagacgagtgcccacccgcgccgcgggattcatcggaatggcgtacgtggaccacgccttctcaatcaccgacgacgaagacctggtcggcggcgcggtgggaggcccgcgtggcgccccggtcaaggaaatcgcctttgctgccgcgctcctcgcttttggcgtcctcggtgtcgtcgcgggatccttcatggccgcgcaccaagtcggcggcgaccgcgcccacgttctgggaggggtgatgttcatcccagggttctactacacaagaatagcgtattatgcttacaaagggtacaagggtttcaccttctccaacatacctcctatctgaagaagcaattggattggctcatccaactatccaacacatggctgtctctctctctctctgtctctcttttttgtttcttattaacctttgtataaagtcgacagcgtggcaagtgatctgtacatataaaaacaccaccgtaatgtaatgtgtcatcacaacattatgttaccacgtgaagttgttcgttatgagatataaacgttgacctat

SEQ ID NO: 201023 - DNA, 2260 bp, Zea Mays
atgacctcatcgggagtcgacacgcagccggaagcacagcaggcgcactacctagagtcacactccccaacaacacagtgccactccactccaaggaacaccagtacagaacaccccagaggcagcgagtcctgttcggtgtccggctggaaggccatgggggctagggctacctcccctccgccatggaggcgtcactgcctctgccgcgccctccacttcctcgttctcttgctctggggtacttccgaggcaaacaaagaacaggccatgttgcctccaagagggtggaactcgtatgattctttttcatggattgtagacgaaaatgcatacctgcaaaatgcacagatcatgacagagaagttactcccacatggatatcagttattgatttcctctggtaccggaaatatgttgacggtgcatacacagattcctatggatttgacaacattgatgaatggggtcgaccttttccggaccttcaaagatttccatcgtctagagttgatagagggttcagtcaaattgccagtaaggttcatggaatgggcttgaaatttggcatccatttgatgaaagggataagtgtgcaggctgttaatgctgacacgcctatcttggacataaagacgggaaaaccatatctagaggatggccgtcagtggacagcacgagacataggtctcagtcacagaacttgtgcgtggatgactcatggatttatgagtgttaatacaaatattggagctggaagggccttcttaagatctctttatcgacaatatgctgattggggtgttgattttgtaaaggtcgattgtatcttcggcacagattatagcccagaagaaatcatcactatttcagagctattgcaagaaattgatcgtccgatcatcctgtcaatctcaccaggaactgcagttactccagcattagctgagaatattagtgatcatgttaacatgtataggataactggagatgattgggacaactggaaggatgtgagctcgcattttggtgtatcaagttccttcgctactgctaagaagattggggccactgggttgcgaggaagatcttggccagacttagacatgcttccatttggatggcttactgatccaagtgtaaatcagggccctcacaggaaatgtaaccttactcttgatgaacagaaagcacagatggcactttggtcaatgactaaatcacctctcatgtatggaggagatttgaggaatcttgacgatagtacattaaacataattaccaattctggtttgttgaagataaaccactatagtagaaataacatggagttccattatgtgcacagtgaaaggacatcaaatggagaacattctggtcactttaggtctccttatcctgttcgtgttaccaagaatgatggcatatttgtcagtctcactgcttgcagcgacgatgcagctaaaggatggtatatgtttccacaagatgggaaaccagatcatatatgcaggaactatgaaatactgaatgataaaaatgtctcattttgcctcggaaaaacaaaacgttttcttgcatcggatgtccttaccatggacaccaaggaacaccaatcaaagtttcatatttcagttacaaacactgatgatacttgtttggatgcatctgctggtcgaaggcagactgcctcagagatcaggcttcctatgttctctgcatgcaggtggcatgcaaaacagatgtgggagttaaatgcgaatggaaatcttgtgagcagctattcaaggttatgtgccacagtggaatcaagggacgaaggaggtaccagtggaggtcgggcatggattgcaactggaagtgaaggagaaatctatctcgcattcttcaatctcgactccatgagcaggaagatgaccgttcaaatatcagaccttggaaaggttctcggaagaaaccttttggagaaaaacccatgtagctacactgaagtttggagcgggaagaatttcggcccggtgaaggaagagatttcagcggtggttcattcgcatggctccatggtgttcgaaatcatatgttgagattgcagtactgggcaagttgttcgagaagtttgcagtgataatttagttgtaagctccattcctgttgatccttttttacccttagtccggagatggaagagatacgttgatgaaccattaactagatgtctgctggatttgacttcaatgaataacaaaacaaacaaacaaac

SEQ ID NO: 201024 - DNA, 2285 bp, Zea Mays
atgacctcatcgggagtcgacacgcagccggaagcacagcaggcgcactacctagagtcacactccccagcaacacagtgccactccactccaaggaagtgcttgcctcccgctctctacctctcctaccaatttcagctcagctctgttctgctcccgcagcaccagtacagaacaccccagaggcagcgagtcctgttcggtgtccggctggaaggccatgggggctagggctacctcccctccgccatggaggcgtcactgcctctgccgcgccctccacttcctcgttctcttgctctggggtacttccgaggcaaacaaagaacaggccatgttgcctccaagagggtggaactcgtatgattctttttcatggattgtagacgaaaatgcatacctgcaaaatgcacagatcatgacagagaagttactcccacatggatatcagtatgcagttattgatttcctctggtaccggaaatatgttgacggtgcatacacagattcctatggatttgacaacattgatgaatggggtcgaccttttccggaccttcaaagatttccatcgtctagagttgatagagggttcagtcaaattgccagtaaggttcatggaatgggcttgaaatttggcatccatttgatgaaagggataagtgtgcaggctgttaatgctgacacgcctatcttggacataaagacgggaaaaccatatctagaggatggccgtcagtggacagcacgagacataggtctcagtcacagaacttgtgcgtggatgactcatggatttatgagtgttaatacaaatattggagctggaagggccttcttaagatctctttatcgacaatatgctgattggggtgttgattttgtaaaggtcgattgtatcttcggcacagattatagcccagaagaaatcatcactatttcagaggaactgcagttactccagcattagctgagaatattagtgatcatgttaacatgtataggataactggagatgattgggacaactggaaggatgtgagctcgcattttggtgtatcaagttccttcgctactgctaagaagattggggccactgggttgcgaggaagatcttggccagacttagacatgcttccatttggatggcttactgatccaagtgtaaatcagggccctcacaggaaatgtaaccttactcttgatgaacagaaagcacagatggcactttggtcaatgactaaatcacctctcatgtatggaggagatttgaggaatcttgacgatagtacattaaacataattaccaattctggtttgttgaagataaaccactatagtagaaataacatggagttccattatgtgcacagtgaaaggacatcaaatggagaacattctggtcactttaggtctccttatcctgttcgtgttaccaagaatgatggcatatttgtcagtctcactgcttgcagcgacgatgcagctaaaggatggtatatgtttccacaagatgggaaaccagatcatatatgcaggaactatgaaatactgaatgataaaaatgtctcattttgcctcggaaaaacaaaacgttttcttgcatcggatgtccttaccatggacaccaaggaacaccaatcaaagtttcatatttcagttacaaacactgatgatacttgtttggatgcatctgctggtcgaaggcagactgcctcagagatcaggcttcctatgttctctgcatgcaggtggcatgcaaaacagatgtgggagttaaatgcgaatggaaatcttgtgagcagctattcaaggttatgtgccacagtggaatcaagggacgaaggaggtaccagtggaggtcgggcatggattgcaactggaagtgaaggagaaatctatctcgcattcttcaatctcgactccatgagcaggaagatgaccgttcaaatatcagaccttggaaaggttctcggaagaaaccttttggagaaaaacccatgtagctacactgaagtttggagcgggaagaatttcggcccggtgaaggaagagatttcagcggtggttcattcgcatggctccatggtgttcgaaatcatatgttgagattgcagtactgggcaagttgttcgagaagtttgcagtgataatttagttgtaagctccattcctgttgatccttttttacccttagtccggagatggaagagatacgttgatgaaccattaactagatgtctgctggatttgacttcaatgaataacaaaacaaacaaacaaac

SEQ ID NO: 201025 - DNA, 2227 bp, Zea Mays
atgacctcatcgggagtcgacacgcagccggaagcacagcaggcgcactacctagagtcacactccccagcaacacagtgccactccactccaaggaagtgcttgcctcccgctctctacctctcctaccaatttcagctcagctctgttctgctcccgcagcaccagtacagaacaccccagaggcagcgagtcctgttcggtgtccggctggaaggccatgggggctagggctacctcccctccgccatggaggcgtcactgcctctgccgcgccctccacttcctcgttctcttgctctggggtacttccgaggcaaacaaagaacaggccatgttgcctccaagagggtggaactcgtatgattctttttcatggattgtagacgaaaatgcatacctgcaaaatgcacagatcatgacagagaagttactcccacatggatatcagtatgcagttattgatttcctctggtaccggaaatatgttgacggtgcatacacagattcctatggatttgacaacattgatgaatggggtcgaccttttccggaccttcaaagatttccatcgtctagagttgatagagggttcagtcaaattgccagtaaggttcatggaatgggcttgaaatttggcatccatttgatgaaagggataagtgtgcaggctgttaatgctgacacgcctatcttggacataaagacgggaaaaccatatctagaggatggccgtcagtggacagcacgagacataggtctcagtcacagaacttgtgcgtggatgactcatggatttatgagtgttaatacaaatattggagctggaagggccttcttaagatctctttatcgacaatatgctgattggggtgttgattttgtaaaggtcgattgtatcttcggcacagattatagcccagaagaaatcatcactatttcagaggataactggagatgattgggacaactggaaggatgtgagctcgcattttggtgtatcaagttccttcgctactgctaagaagattggggccactgggttgcgaggaagatcttggccagacttagacatgcttccatttggatggcttactgatccaagtgtaaatcagggccctcacaggaaatgtaaccttactcttgatgaacagaaagcacagatggcactttggtcaatgactaaatcacctctcatgtatggaggagatttgaggaatcttgacgatagtacattaaacataattaccaattctggtttgttgaagataaaccactatagtagaaataacatggagttccattatgtgcacagtgaaaggacatcaaatggagaacattctggtcactttaggtctccttatcctgttcgtgttaccaagaatgatggcatatttgtcagtctcactgcttgcagcgacgatgcagctaaaggatggtatatgtttccacaagatgggaaaccagatcatatatgcaggaactatgaaatactgaatgataaaaatgtctcattttgcctcggaaaaacaaaacgttttcttgcatcggatgtccttaccatggacaccaaggaacaccaatcaaagtttcatatttcagttacaaacactgatgatacttgtttggatgcatctgctggtcgaaggcagactgcctcagagatcaggcttcctatgttctctgcatgcaggtggcatgcaaaacagatgtgggagttaaatgcgaatggaaatcttgtgagcagctattcaaggttatgtgccacagtggaatcaagggacgaaggaggtaccagtggaggtcgggcatggattgcaactggaagtgaaggagaaatctatctcgcattcttcaatctcgactccatgagcaggaagatgaccgttcaaatatcagaccttggaaaggttctcggaagaaaccttttggagaaaaacccatgtagctacactgaagtttggagcgggaagaatttcggcccggtgaaggaagagatttcagcggtggttcattcgcatggctccatggtgttcgaaatcatatgttgagattgcagtactgggcaagttgttcgagaagtttgcagtgataatttagttgtaagctccattcctgttgatccttttttacccttagtccggagatggaagagatacgttgatgaaccattaactagatgtctgctggatttgacttcaatgaataacaaaacaaacaaacaaac

SEQ ID NO: 201026 - DNA, 2278 bp, Zea Mays
atgacctcatcgggagtcgacacgcagccggaagcacagcaggcgcactacctagagtcacactccccagcaacacagtgccactccactccaaggaagtgcttgcctcccgctctctacctctcctaccaatttcagctcagctctgttctgctcccgcagcaccagtacagaacaccccagaggcagcgagtcctgttcggtgtccggctggaaggccatgggggctagggctacctcccctccgccatggaggcgtcactgcctctgccgcgccctccacttcctcgttctcttgctctggggtacttccgaggcaaacaaagaacaggccatgttgcctccaagagggtggaactcgtatgattctttttcatggattgtagacgaaaatgcatacctgcaaaatgcacagatcatgacagagaagttactcccacatggatatcagttattgatttcctctggtaccggaaatatgttgacggtgcatacacagattcctatggatttgacaacattgatgaatggggtcgaccttttccggaccttcaaagatttccatcgtctagagttgatagagggttcagtcaaattgccagtaaggttcatggaatgggcttgaaatttggcatccatttgatgaaagggataagtgtgcaggctgttaatgctgacacgcctatcttggacataaagacgggaaaaccatatctagaggatggccgtcagtggacagcacgagacataggtctcagtcacagaacttgtgcgtggatgactcatggatttatgagtgttaatacaaatattggagctggaagggccttcttaagatctctttatcgacaatatgctgattggggtgttgattttgtaaaggtcgattgtatcttcggcacagattatagcccagaagaaatcatcactatttcagaggaactgcagttactccagcattagctgagaatattagtgatcatgttaacatgtataggataactggagatgattgggacaactggaaggatgtgagctcgcattttggtgtatcaagttccttcgctactgctaagaagattggggccactgggttgcgaggaagatcttggccagacttagacatgcttccatttggatggcttactgatccaagtgtaaatcagggccctcacaggaaatgtaaccttactcttgatgaacagaaagcacagatggcactttggtcaatgactaaatcacctctcatgtatggaggagatttgaggaatcttgacgatagtacattaaacataattaccaattctggtttgttgaagataaaccactatagtagaaataacatggagttccattatgtgcacagtgaaaggacatcaaatggagaacattctggtcactttaggtctccttatcctgttcgtgttaccaagaatgatggcatatttgtcagtctcactgcttgcagcgacgatgcagctaaaggatggtatatgtttccacaagatgggaaaccagatcatatatgcaggaactatgaaatactgaatgataaaaatgtctcattttgcctcggaaaaacaaaacgttttcttgcatcggatgtccttaccatggacaccaaggaacaccaatcaaagtttcatatttcagttacaaacactgatgatacttgtttggatgcatctgctggtcgaaggcagactgcctcagagatcaggcttcctatgttctctgcatgcaggtggcatgcaaaacagatgtgggagttaaatgcgaatggaaatcttgtgagcagctattcaaggttatgtgccacagtggaatcaagggacgaaggaggtaccagtggaggtcgggcatggattgcaactggaagtgaaggagaaatctatctcgcattcttcaatctcgactccatgagcaggaagatgaccgttcaaatatcagaccttggaaaggttctcggaagaaaccttttggagaaaaacccatgtagctacactgaagtttggagcgggaagaatttcggcccggtgaaggaagagatttcagcggtggttcattcgcatggctccatggtgttcgaaatcatatgttgagattgcagtactgggcaagttgttcgagaagtttgcagtgataatttagttgtaagctccattcctgttgatccttttttacccttagtccggagatggaagagatacgttgatgaaccattaactagatgtctgctggatttgacttcaatgaataacaaaacaaacaaacaaac

SEQ ID NO: 201027 - DNA, 2355 bp, Zea Mays
atgacctcatcgggagtcgacacgcagccggaagcacagcaggcgcactacctagagtcacactccccagcaacacagtgccactccactccaaggaagtgcttgcctcccgctctctacctctcctaccaatttcagctcagctctgttctgctcccgcagcaccagtacagaacaccccagaggcagcgagtcctgttcggtgtccggctggaaggccatgggggctagggctacctcccctccgccatggaggcgtcactgcctctgccgcgccctccacttcctcgttctcttgctctggggtacttccgaggcaaacaaagaacaggccatgttgcctccaagagggtggaactcgtatgattctttttcatggattgtagacgaaaatgcatacctgcaaaatgcacagatcatgacagagaagttactcccacatggatatcagtatgcagttattgatttcctctggtaccggaaatatgttgacggtgcatacacagattcctatggatttgacaacattgatgaatggggtcgaccttttccggaccttcaaagatttccatcgtctagagttgatagagggttcagtcaaattgccagtaaggttcatggaatgggcttgaaatttggcatccatttgatgaaagggataagtgtgcaggctgttaatgctgacacgcctatcttggacataaagacgggaaaaccatatctagaggatggccgtcagtggacagcacgagacataggtctcagtcacagaacttgtgcgtggatgactcatggatttatgagtgttaatacaaatattggagctggaagggccttcttaagatctctttatcgacaatatgctgattggggtgttgattttgtaaaggtcgattgtatcttcggcacagattatagcccagaagaaatcatcactatttcagagctattgcaagaaattgatcgtccgatcatcctgtcaatctcaccaggaactgcagttactccagcattagctgagaatattagtgatcatgttaacatgtataggataactggagatgattgggacaactggaaggatgtgagctcgcattttggtgtatcaagttccttcgctactgctaagaagattggggccactgggttgcgaggaagatcttggccagacttagacatgcttccatttggatggcttactgatccaaaccctatttcttttgttaatgcaggtgtaaatcagggccctcacaggaaatgtaaccttactcttgatgaacagaaagcacagatggcactttggtcaatgactaaatcacctctcatgtatggaggagatttgaggaatcttgacgatagtacattaaacataattaccaattctggtttgttgaagataaaccactatagtagaaataacatggagttccattatgtgcacagtgaaaggacatcaaatggagaacattctggtcactttaggtctccttatcctgttcgtgttaccaagaatgatggcatatttgtcagtctcactgcttgcagcgacgatgcagctaaaggatggtatatgtttccacaagatgggaaaccagatcatatatgcaggaactatgaaatactgaatgataaaaatgtctcattttgcctcggaaaaacaaaacgttttcttgcatcggatgtccttaccatggacaccaaggaacaccaatcaaagtttcatatttcagttacaaacactgatgatacttgtttggatgcatctgctggtcgaaggcagactgcctcagagatcaggcttcctatgttctctgcatgcaggtggcatgcaaaacagatgtgggagttaaatgcgaatggaaatcttgtgagcagctattcaaggttatgtgccacagtggaatcaagggacgaaggaggtaccagtggaggtcgggcatggattgcaactggaagtgaaggagaaatctatctcgcattcttcaatctcgactccatgagcaggaagatgaccgttcaaatatcagaccttggaaaggttctcggaagaaaccttttggagaaaaacccatgtagctacactgaagtttggagcgggaagaatttcggcccggtgaaggaagagatttcagcggtggttcattcgcatggctccatggtgttcgaaatcatatgttgagattgcagtactgggcaagttgttcgagaagtttgcagtgataatttagttgtaagctccattcctgttgatccttttttacccttagtccggagatggaagagatacgttgatgaaccattaactagatgtctgctggatttgacttcaatgaataacaaaacaaacaaacaaac

SEQ ID NO: 201028 - DNA, 1837 bp, Zea Mays
ggtgctcatgtggttgaagacgatgtagatgaaacaaaaagacacttgaacgtggttttcatcggccatgttgatgctggaaaatcaactactggaggacaaatattgtttttgagtggtcaagttgatgataggaccatccagaagtatgagaaggaagcaaaggataaaagtcgggaaagctggtacatggcttacatcatggacacaaatgaggaagaaagggttaagggaaagactgttgaagttggtagagcccactttgagacagaacacacaagattcactatcttggatgcaccgggtcacaaaagttatgttccaaatatgatcagtggtgcatctcaagctgacattggtgttctggtcatatctgctcggaaaggggaattcgaaacaggttatgaaagaggaggacagacccgtgaacatgtactacttgcaaaaactttgggtgttgctaagctggtagttgtaataaataagatggatgaacctactgttaaatggtctaaggaaaggtatgatgagattgaagcaaaaatggttccattccttaaatcttcagggtacaatgttaagaaagatgtacaattcttgccaatttctggtcttgtgggaaccaatatgaagaccaggatggataaaagcatttgtagttggtgggatggaccttgtctttttgaagttctggaccgtattgaaattcctttacgcgaccccaaaggtccagtaaggatgccgattattgataaatataaggatatgggcactgttgtaatgggcaaaatagaggctggcactatcagagagggtgacagtttattgattatgccaaacaagtctcatgtgaaagtcattggtttgaacttggacgagagcaaagtacgtcgtgctggacctgctgagaatgttcgtgtcaaattgtccggagttgaggaggaggatgtaatgtctggttttgtactttcaagtgtcgctaatcctgttggtgccgttaatgaattcatcgctcagttacagattttagagttgcttgacaatgctattttcacggctggctacaaagctgtgttgcatatccactctgttgtcgaagagtgtgagattgttgaactcatagaggaaattgacatgaagaaaaagaaaggagatccgaagaagaaaaaaccaaagaggaagcctctttttgtgaagaatggtgcaattgttgtttgccgcattcaggtgaataacttgatatgcatagagaagttctctgatttcccacagcttggaaggtttacacttagaactgaagggaagacggtagccgtaggcaaggttgttgatgttccgcctgctggcagcccaacattctgagcttaagccaattttgaacaggatggataatcatgaagcagtgcgttgtcttgagatacttttctttgggagaagtgagattagttgagcataggttttttccgagcccggcttgagaatggtctatgccttaatggtttaggcaacaagcctgtttagattggttccataatgttacatctctggttacatgtgaggtataatcagtatggatgagtgttccaaccttaatgcactgccaaattgtggtggcatttttgcgtacaatgctgtaactgtacagttgtgtgtgaagtcaaatgggcaggctgcattactcggatgtgcagcgtcgtgtcacacctggttttaagggtaaaaccgaatgcataacatatgtgtgctaggatctattttaacatatatgttgacatcatgagtgtaatatatctaaagaacaatgcataaaagcgtaaataaagattatattaacata

SEQ ID NO: 201029 - DNA, 4423 bp, Zea Mays
ccgacactcctctccttctccctgaatttctctttaaaaccccccgctcgctgatcccctccccctcccactcccacccccaccgacgctgccgccgctggcacgcattcctgcttcctctcctcctcttcttcatcggcgcggcgcggcgcagcgctgggggagaatcactcggatggaaatctgctgctagagtgagaggagctaccggacagtatcctgcgcgccttcgtcggcggcggaggggggaaggaagcgatggaggcgagcgccgggctggtggccggctcccacaaccgcaacgagctcgtcgtcatacgtcgcgacggcgatcccgggccgaagccgccgccgcgggagcagaacgggcaggtgtgccagatttgcggcgacgacgtcggccttgcccccggcggggagcccttcgtggcgtgcaacgagtgcgccttccccgtctgccgggactgctacgagtacgagcgccgggagggcacgcagaactgcccccagtgcaggacccggtacaagcgcctcaagggtgaacgtccccagctccatccaccgaaatgcagctccgccctggcgcaaatggatggaccagtcgtgcggctttcgatgcttcttcgttactctcaactgttcactcaactcgtcctgtgcgcgccggcgctttgtttgtaggctgccagcgtgtgaccggtgatgaggaggaggacggcgtcgatgacctggacaacgagttcaactggaacggccatgactcgcggtctgtggccgactccatgctctacggccgtggaggtgaccctaatggcgcgccacaacctttccagctcaaccccaatgttccactcctcaccaacgggcagatggtcgatgacatcccaccggagcagcacgcgctggtgccttctttcatgggcggtgggggaaagagaatccatcccctcccttatgcggatcccagcttacctgtgcaacccaggtctatggacccatccaaggatcttgctgcatatgggtatggtagtgttgcttggaaggagcgggtggagaattggaagcagaggcaggagaggatgcaccagacaaggaatgatggtggtggtgatgacggtgatgatgctgatttaccactaatggatgaatcaagacaaccgctgtccaggaaaattccgcttccatcaagccagatcaatccatataggatgattatcattattcggcttgtggttttggggttcttcttccactaccgagtgatgcatccggtgaatgatgcatttgctttgtggctcatatctgttatctgtgaaatctggtttgccatgtcttggattcttgatcaattcccaaagtggttccctatagagagagagacttacctagaccggctgtcactgagtggactatccagttgataaggtttcttgctatgtttctgatgatggtgctgcaatgctaacatttgaagcattatctgaaacatctgaatttgcaaagaaatgggctccattctgcaaaaggtacaatattgaacctcgtgctccagagtggtacttccaacagaagatagactacttgaaagacaaggtggcagcaaactttgttagggagaggagagcaatgaagagagagtacgaggaattcaaggtcagaatcaatgccttggttgctaaagcccagaaagttcctgaagaaggatggacaatgcaagatggaaccccctggcctggaaacaatgttcgtgatcatcctggaatgattcaggtcttccttggccaaagtggaggtcttgactgtgagggaaatgagctgccgcggttggtttatgtttcaagagagaaacgaccaggctataaccatcataagaaagctggtgctatgaatgcattggtccgagtctctgctgtactatcaaatgctccttatttgttaaacttggattgtgatcactacatcaacaacagcaaagctataaaggaagcaatgtgttttatgatggacccactactaggaaagaaggtttgctatgtacagttccctcaaagatttgatgggattgatcgccatgaccgatatgctaacaggaatgttgtctttttcgatatcaacatgaaaggtttggatggtattcagggtccgatttatgttggtactggatgtgtgtttagaaggcaggcattatatggttatgatgcccccaaaacaaagaagccaccatcaaggacttgcaactgctggcccaagtggtgtttttgctgttgctgctgtggtaataggaaacacaagaagaagactacgaaacccaaaacagagaagaaaaagttattatttttcaagaaagaagaaaatcaatcccctgcatatgctcttggtgaaattgatgaagctgctccaggagctgagaatgaaaaagctggtattgtaaatcaacaaaaattagaaaagaaatttggtcagtcttctgtctttgcaacatccacacttctcgaaaatggtggaaccttgaagagtgcaagtcctgcttctcttctgaaagaagctatacatgtcattagttgtggttatgaagacaagactgattggggaaaagagattggctggatctatggatcagttacagaggatattctaactggtttcaagatgcattgtcatggttggcggtcaatttactgcatacctaaacggcctgcattcaaaggttctgcacctctgaatctttcagatcgtcttcaccaggtgcttcggtgggctcttgggtctattgagatcttcttcagcaatcattgccctctttggtatgggtatggtggtggtctgaaatttttggaaagattttcctacatcaactccatcgtgtatccttggacatctatccccctcttggcttactgtacattgcctgccatctgtttattgacggggaaatttatcactccagaggtaaagcttaatcaactatagttttgttgtttgagaaaaaacaaaactatagttttgtttgttgtggaatgtctgaaccttatgttcactgtttcatctgctgcagctgaacaatgttgccagcctgtggttcatgtcactttttatctgcatttttgctacaagcatcctagaaatgagatggagtggtgttgggattgatgattggtggaggaatgagcagttctgggtcattggaggtgtgtcctcgcacctcttcgctgtgtttcagggacttctcaaggtcatagctggtgttgatacaagcttcactgtgacatcaaagggtggagatgatgacgaattctcagagctgtacacatttaaatggactaccttattgatacctcctaccactttgctcctattgaacttcattggtgtggtcgctggtgtttccaatgcaatcaataatggatacgagtcatggggccccctcttcgggaagctcttctttgcattttgggtgattgtccatctgtatcccttcctcaaaggtttggttgggaggcaaaacaggacaccgacaattgtcatcgtctggtccatcctgctggcttcaatcttctcactcctttgggttcggattgaccctttccttgcaaaggatgatggtccacttcttgaggagtgtggtttggattgcaactaggggatgtcagcacatcagctcccccaatcagcgtatgattgaagtatttttgccggcgtttgtccccatatttacagtgccccctctgtaggtaagagacaagaaatgtctcccgttccttttgatccatggtgaacctcgacctaatatctgggatacactggagggaaaatggaggctgcggcaatccttgtgcagatgggccgtggaatacagcatatgcaagtgtttgattgtgcagcattctttattacttgggcgcaaaactgatcgtctgagccgagcagcaaggtattttgatcctgcactgctcccgtgtacaaacttggttctcaataaggcaggcaggaatgtgcatctgccagtggaacagaggaacctgcacagtatttatgtacaaacttcattacatgttcgtctatactaggaaaaacagaatatttgtaccaatctatacttgattaaagtatgtaaaggagtccctttttttttcttgtgtactgtaatcgtcggagtaggttttgtgagattttcgtagaaaggttgaatgtgatataatatattttatggtcccatactagtgtattgagcaactctagcaaggcaactcttttggttacctattcttctatcctatttataaggataggggagaaaaaccaccagatctcttgttccttctcccctatgattagtagatacaatcagttataaagacctcttgttccttctcccctataatcagctattttgatgcaagagatacaatcagttataacagag

SEQ ID NO: 201030 - DNA, 3580 bp, Zea Mays
ttgctgccgaatccaagtcgatgacatcccaccggagcagcacgcgctggtgccttctttcatgggcggtgggggaaagagaatccatcccctcccttatgcggatcccagcttacctgtgcaacccaggtctatggacccatccaaggatcttgctgcatatgggtatggtagtgttgcttggaaggagcgggtggagaattggaagcagaggcaggagaggatgcaccagacaaggaatgatggtggtggtgatgacggtgatgatgctgatttaccactaatggatgaatcaagacaaccgctgtccaggaaaattccgcttccatcaagccagatcaatccatataggatgattatcattattcggcttgtggttttggggttcttcttccactaccgagtgatgcatccggtgaatgatgcatttgctttgtggctcatatctgttatctgtgaaatctggtttgccatgtcttggattcttgatcaattcccaaagtggttccctatagagagagagacttacctagaccggctgtcactgaggttcgataaggaaggccagccgtctcaacttgccccaatcgatttctttgtcagtacagttgaccccttaaaggaacctcctttggtcacagcaaatactgttctatctatcctttcagtggactatccagttgataaggtttcttgctatgtttctgatgatggtgctgcaatgctaacatttgaagcattatctgaaacatctgaatttgcaaagaaatgggctccattctgcaaaaggtacaatattgaacctcgtgctccagagtggtacttccaacagaagatagactacttgaaagacaaggtggcagcaaactttgttagggagaggagagcaatgaagagagagtacgaggaattcaaggtcagaatcaatgccttggttgctaaagcccagaaagttcctgaagaaggatggacaatgcaagatggaaccccctggcctggaaacaatgttcgtgatcatcctggaatgattcaggtcttccttggccaaagtggaggtcttgactgtgagggaaatgagctgccgcggttggtttatgtttcaagagagaaacgaccaggctataaccatcataagaaagctggtgctatgaatgcattggtccgagtctctgctgtactatcaaatgctccttatttgttaaacttggattgtgatcactacatcaacaacagcaaagctataaaggaagcaatgtgttttatgatggacccactactaggaaagaaggtttgctatgtacagttccctcaaagatttgatgggattgatcgccatgaccgatatgctaacaggaatgttgtctttttcgatatcaacatgaaaggtttggatggtattcagggtccgatttatgttggtactggatgtgtgtttagaaggcaggcattatatggttatgatgcccccaaaacaaagaagccaccatcaaggacttgcaactgctggcccaagtggtgtttttgctgttgctgctgtggtaataggaaacacaagaagaagactacgaaacccaaaacagagaagaaaaagttattatttttcaagaaagaagaaaatcaatcccctgcatatgctcttggtgaaattgatgaagctgctccaggagctgagaatgaaaaagctggtattgtaaatcaacaaaaattagaaaagaaatttggtcagtcttctgtctttgcaacatccacacttctcgaaaatggtggaaccttgaagagtgcaagtcctgcttctcttctgaaagaagctatacatgtcattagttgtggttatgaagacaagactgattggggaaaagagattggctggatctatggatcagttacagaggatattctaactggtttcaagatgcattgtcatggttggcggtcaatttactgcatacctaaacggcctgcattcaaaggttctgcacctctgaatctttcagatcgtcttcaccaggtgcttcggtgggctcttgggtctattgagatcttcttcagcaatcattgccctctttggtatgggtatggtggtggtctgaaatttttggaaagattttcctacatcaactccatcgtgtatccttggacatctatccccctcttggcttactgtacattgcctgccatctgtttattgacggggaaatttatcactccagagctgaacaatgttgccagcctgtggttcatgtcactttttatctgcatttttgctacaagcatcctagaaatgagatggagtggtgttgggattgatgattggtggaggaatgagcagttctgggtcattggaggtgtgtcctcgcacctcttcgctgtgtttcagggacttctcaaggtcatagctggtgttgatacaagcttcactgtgacatcaaagggtggagatgatgacgaattctcagagctgtacacatttaaatggactaccttattgatacctcctaccactttgctcctattgaacttcattggtgtggtcgctggtgtttccaatgcaatcaataatggatacgagtcatggggccccctcttcgggaagctcttctttgcattttgggtgattgtccatctgtatcccttcctcaaaggtttggttgggaggcaaaacaggacaccgacaattgtcatcgtctggtccatcctgctggcttcaatcttctcactcctttgggttcggattgaccctttccttgcaaaggatgatggtccacttcttgaggagtgtggtttggattgcaactaggggatgtcagcacatcagctcccccaatcagcgtatgattgaagtatttttgccggcgtttgtccccatatttacagtgccccctctgtaggtaagagacaagaaatgtctcccgttccttttgatccatggtgaacctcgacctaatatctgggatacactggagggaaaatggaggctgcggcaatccttgtgcagatgggccgtggaatacagcatatgcaagtgtttgattgtgcagcattctttattacttgggcgcaaaactgatcgtctgagccgagcagcaaggtattttgatcctgcactgctcccgtgtacaaacttggttctcaataaggcaggcaggaatgtgcatctgccagtggaacagaggaacctgcacagtatttatgtacaaacttcattacatgttcgtctatactaggaaaaacagaatatttgtaccaatctatacttgattaaagtatgtaaaggagtccctttttttttcttgtgtactgtaatcgtcggagtaggttttgtgagattttcgtagaaaggttgaatgtgatataatatattttatggtcccatactagtgtattgagcaactctagcaaggcaactcttttggttacctattcttctatcctatttataaggataggggagaaaaaccaccagatctcttgttccttctcccctatgattagtagatacaatcagttataaagacctcttgttccttctcccctataatcagctattttgatgcaagagatacaatcagttataacagag

SEQ ID NO: 201031 - DNA, 673 bp, Zea Mays
cttccagtcaactaggtgtccaggcgctctccaaaaggatccactatgggaagtttgtggcagaggctaagtttcaggagtccccggaagcttacatgccagccataatagctcaggaccgtgatcaactcatgcaccttctcacatatgaaacggtggagcgtgctatcgaacatagggtggaagccaaagccaagatcttcgggcaagaggtgaacatcggtgtggaggacaacggcagcccaccggtgtacaagatcgttccgagcttggtcgccgagctgtacagctacagaatcatgccgctaaccaaagaggttcaaatcgcgtatttgcttaggaggctggattgagtatgtttatgtagatgtaaattgccagatcagaactcctggcgttaagccagaacattggtaaataccggttttggtgtcaggatgcaaaatgtaccatgtgtggaattgtgccaacaaacaagcataatatcatgtggagttgtcgagtagtcgcgcctcgtgcgtactgccaatggacaatgtttgtagactgtatggaatgatgggtcacttcctttggcgggtgcccttttgaaagggagtaaaattctctcattgtcgttgaaatttatacagatccgctcaagtgccatcgaaattttcaacttactttgatt

SEQ ID NO: 201032 - DNA, 4529 bp, Zea Mays
tacgcaacgcgacctagctaccccgcactcgcatagccgcaactcacaattgccatggttaaccaaaagtttttttttaaaaaaaaacaaccttgccatttcggtcgagagaccggatatccctgcgcactgcacggctgcaaaagcgctgcaaagggggagaccagaggtgtgccgtgtgcatgcatccgcttggcggcacacctcaagatagcaaaaccatttcatggcaagaaggccaagatggcaggaagagttgccagggagaagattccatgaggcctgcagggctgcaaacagcagctcggagtagttaagcttccctttcgtcagctcgttccggccttccgcgacgacgacgtcgaggcggcagagaaaatctccagtggtcccctgcagctggagctcccggaattgaaggcgctcggcctgagccttacggatggccgatggacgctacggccagtgtttaaggcatggtgacctccgcatttagattttagtgcgtcggattcgaatggttgcaggcaggcagtgctttcaccaggccgccacggcgccacccgtcatgaactccagcgtagcacggttggttagcagacctgtagcgacctaatctgcagtgttgccatcttcgctggccgctgggttgtgttctgttctgttcatgccttgtactctcacctagggacggacacagaatgaaatgagagtgagagcacacttacaacaacgcgctaaaatgttagagtgagtatatctaaattaagcttagcaggagatataatggtcaaaacctagtctttactacttgcaagttgcaacacaaaaatgaccggagcctattcccttaggtccgcccatgctctcacctcctgaagagctgacttgaattctagtatctgtcgttattctcgtcttttagaggatttggtgttagagaaactcgcgaattttaaataaaaagggacaaacagaccggcaaagatcaaagaggaagctcgttggtggattcggggaggggtaaaacatttagccaatctgctataactttgtgtttttggtgcatggcgatcatgcctccgtttttaatgttttttccgctttttgttgggatttattatttgtagcttctctgggcgtccatcccctttttaatatgaaaggcaactctcttatcaatttcaaaaaaaaagtatatgcttttggaacgtaggagtataaaacaatggaaatttagaaagatacaagggtcttcaaacttcaaccaacaagccagcgcggtgggcgacgggcaacgggtggagcaaaacactgcatcactgaaatacactagtccgatgtgcccccttcagattgttatcagtttttttattaaaaaaagaaacaccttggaattcatatataggacaacatacattcttaatctctaccacactatataatccactactctaaattttacaaaatttacccaaccaaatcatccacacatctacaacctccactaaatccgttaactccgacttaacacatcattaaaatcaacggttcatattattagataacccatattcccttactcaatcaaaattaataaacaatattattcggatgatctatcatatctcatctctataacaggatcctaactcaaagctaatcgttgaaaatcgtactttgctttcgggctataccacatcttccaaaaactttgctagcaaatggctttgtgtttctctccctcccattggttacctcctgacatctaatcaggcacactccaaacatcttaatatttcatcgctgctctgttaaatcgaagcagattaaaaccggttgtttgaattgctgtagctacaatttatagagacaaaaatattctataagcagtagaagccgatacggattaaagccaaatgaataggttgagttccaccgtagcagcctacctcaatggtttgctaaagatgcagttggtggggaacttggggaatttgttgtggtgtttcctttcaaattattgagtacaatagcaaacaccggtagtaaattttgtttattggttggtctagatccatttctagagaaacattctctcctccgccacaagtttggtttggcttttggctttggcttttttctcttaaaagtcgaaagctaaatcaaagggtcctaaccaggaagcagtttttttcaaaagccatctttctcgtagtgtaaaattaaaagtatctctagacctacttatagtgtctttcggataaactgtgcaaatatatacatgggagatattttagtgacttttagcgacttccatcaaacatttgtagcgttttatagctcacaaccaataatagcttttttcacagctcatagctcacaacagtttttttcatagccacggtccaaccaaacataccctatagatgtcccagtggatcgtgttgaatggggccgcactagccttgatacatctcatagtgttttggcacgacatgacccgatgcatatagtgctcgtgccagcaaggcacgtcgccctagcacggtgggctgacacaagcacggcacgactaagtggttggcacagggcagacatggcttagatcaactgttgaatagtggacatgattgtgatttgtgcttatggttgtgaattgtgatttgttaccgttttaaatatgataaatttagtaatatgaatattcatgttttgaaattatatctgtaattttaaagatgttttaaagtgaaatagtgtatggctctcacgagtactgttaggtgctaccatgttagtgttaatagtattgacacagcacgattaggcactattggcctgtttggttcccttcttatatgagccaagctgtacttgggcagccaagttccaagtagccaggttgagcgcatgcatatgagcgatgtttggttattgtatgcacgaaacctggttgctcggagatttcgtctggttagcttcatgcaggcatcttctcacactcacagagccactgacatatctgatccacgtgcttgttgcgctcgcgcgagcctggccacatagaaacgaagatttttgccgcatgagtagagcctggctcataagaaaatcctgcactgcgtgagacaggccctaaccttcatccaagcaaccaaacgctcagccactgtacgaaacgggcctggttgtgggttgggtcaggcaaccaaacggctcctatatgtcatgtctgagacgatggatgaacatgtttaattatagacatggcacaccacaattatccgtatctgatattgtcgtgcctaaaacattactgtgttttatagtgttggtgctagtggcgtgctgtggcacgttagccacagcccacgagaactgagcgtgaattaaatgggtaataaaaacgcacgagtcctgttccctgagcgagcgtcgtgggggtgcattcaacctctgaatctagccatctacgatctaccacagaggacgatcgtcatgtacactgtgcagtgtgcacagatcaggacccctgccagaggcacacctgctatgcatccgtgcaatgaattttatcagtgatcccgctgtggaaggaggtggagtacttcaaggagtacaagcggcggctccggcgacacgtggggctcgccggtgcccgtcgcatcgtctccgacgcgctgtacgtggtgagcgtcggcaccaacgacttcctggagaactacttcctgctggtgacggggcggttcgcggagttcacggtgggcgagttcgaggacttcctggtggcgcaggcggagtggttcctgggcgagatccaccggctgggcgcgcggcgggtcgccttcgcggggctcagccccatcggctgcctgcccctggagcgcacgctcaacacgctccgcggcggctgcgtcgaggagtacaaccaggtggcccgggactacaacgccaaggtgctcgacatgctccgccggctcacggcggcgcggccggggctgagggtcgcctacatcgacgtgtaccagaacatgctggacctcatcaccgacccttccacgctggggctggagaacgtggaggaggggtgctgcgccacggggaaggtggagatgtcgtacctgtgcaacgagaagagccccgacacatgcgacgacgcggacaggtacttcttctgggactccttccaccccacccagaaggtgaaccagttcttcgccaagaagacgctggacctgtgctacgaccagctcctgctgtgatgctgatgatgcgccctagagctcagtgtggctacgtttagtccacactccacagtcaaaattgttgctgctaattcgtctccgtgtgtatagcatagctagcattcgatgtgatgtatgtagtagtatatggttgctgtgcctgtctcgatgcgtcgatcgatggattcacgattcttttgggcttaaatgctcataagggagataaaatttacacatttgacgcgagttacaattggttccggccggagccggacgtctttt

SEQ ID NO: 201033 - DNA, 1008 bp, Zea Mays
tcatggggctcccgtagcgtcgactgcttcgagaagctcgagcagatcggcgagggcacttacgggcaagtgtacatggcgaaggagacgggcaccaacgagatcgtcgcgctcaagaagatccgcatggacaacgagcgggaagggttcctaatcaccgccatacgcgagatcaagatcctgaagaagcttcaccaccagaacgttatcaagctcaaggagatcgtcacttccccaggcccagagcgggacgagcaagggaggtcaattgacgacaacaagtacaaggggagcatttacatggttttcgagtatatggatcatgacctcactgggcttgctgatagaccaggaatgcggttcattgtgccacagattaagtgttacatgaagcagctgcttacaggcctacactattgtcacgtcaaccaagtcctgcatcgagacatcaagggatctaacctcttgatagataacgagggtaacttaaagcttgctgattttggccttgcaagatcattctccagcgatcacaatggaaaccttaccaaccgtgtgatcactttgtgacctccagagttgctacttggaagcacaaagtataatctagccgttgacatgtggtcagtgggctgtatttttgcagaactgctcaatgggaagccaatattgcctggaaagaatgagccagagcagctgactaagatcttcgagctttgtggtacccctgacgacacaatctggcctggtgtcacaaaaatgccatggtacaacaacttcaagcctcaccggccattaaagatacgagttaaagacttctttaaacattttgatcggcatgcactggatctgttagagaagatgttgactttagatccatcacaaaggatatcagcaaaagatgcacttgatgcagaatatttctggacttcacgagcgatgagcgcggccgtgaacaccatgaggatacgggcccccagatggcgtcggctgtgcaggcggccatga

SEQ ID NO: 201034 - DNA, 917 bp, Zea Mays
tcatggggctcccgtagcgtcgactgcttcgagaagctcgagcagatcggcgagggcacttacgggcaagtgtacatggcgaaggagacgggcaccaacgagatcgtcgcgctcaagaagatccgcatggacaacgagcgggaaggggcccagagcgggacgagcaagggaggtcaattgacgacaacaagtacaaggggagcatttacatggttttcgagtatatggatcatgacctcactgggcttgctgatagaccaggaatgcggttcattgtgccacagattaagtgttacatgaagcagctgcttacaggcctacactattgtcacgtcaaccaagtcctgcatcgagacatcaagggatctaacctcttgatagataacgagggtaacttaaagcttgctgattttggccttgcaagatcattctccagcgatcacaatggaaaccttaccaaccgtgtgatcactttgtgacctccagagttgctacttggaagcacaaagtataatctagccgttgacatgtggtcagtgggctgtatttttgcagaactgctcaatgggaagccaatattgcctggaaagaatgagccagagcagctgactaagatcttcgagctttgtggtacccctgacgacacaatctggcctggtgtcacaaaaatgccatggtacaacaacttcaagcctcaccggccattaaagatacgagttaaagacttctttaaacattttgatcggcatgcactggatctgttagagaagatgttgactttagatccatcacaaaggatatcagcaaaagatgcacttgatgcagaatatttctggacttcacgagcgatgagcgcggccgtgaacaccatgaggatacgggcccccagatggcgtcggctgtgcaggcggccatga

SEQ ID NO: 201035 - DNA, 1847 bp, Zea Mays
agaaaagctcgcaggagtgacctccctctgtgtctctccgctcggcgctcggaccaccgcggaacggcggaaccctccgatagaatcatagaaccaaaccctcctcctcgcaccgcgccgctgcagctgaccaccctacttgaccggccggggagagagatagagataaagacatagacaaacagacggcgggcaggcatgggcggcgtcacgtccaccatcgccgcgcgcttcgccttcttcccgcccacgccgccgtcctacaccgtcgtggtcgccgacgctgcgacaggccgcctcgccatcccggagatctcacgggccctctcgcgccgccggaggcgggacggcgccggcgctgggggctcctcctcggcctcctccgtcgcggccgccgagaacgaggagggcgcggaggtggtgcgcctccggacccgccgcgggaacgagatcgtgggggtgtacgtgcgccacgcgcgggcctccgccacgctgctctactcccacggcaacgccgccgacctcggccagatgtacggcctcttcgtcgagctcagccgccgcctccgcgtcaacctcttcgggtatgattattctggttatgggagatctacagggaagacattgaagcagcatataactgcctcaaggaaaaatatagtgtcgcagatgaggatataatcttatacggccagtctgttggaagtggtccaaccattgatcttgcttcacgattgccagacttgcgagctgtggttttgcatagtcctattttatctggagtaagagtactatatccagtcaaacggacgttttggttcgacatttacaagaacatcgataaaattggtttggtaaattgtccggtgcttgtcatccatggtacatcagatgatgtcgttgactgctcccacggtaaacagctatgggaacattgcaaagtaaaatattctccactgtggttaaatggtggtgggcactgcaacctcgagctatatccagattacattaagcacttgaagcagtttgtgtcaagcgttagcaaaaaaacatcaaagccggaccagaaagagataatggcaaaggatggcactaccagtaaagaaagagaggaagcatactcggagaaacctcagccggcagctaagtgctcacagtcacagatctcacgtaagagcatagatagccgagttgggaaatccaaaacagtggatgttcctgataaatcacggatgagctcagatgacatcgacaagttccggaggagaaggtgcttggtttggtgatgcctatgttgtgcacagattgtcgaacagtacctgagtgaggatactatagcatggaaatcaagcaactttattacatacatcatgctgcgaggaatggcatcagccgttcctgcagtggagaggaaagaactgttaaataagaaaaggaaccagaaagctaccatcatcatccatcagagacaaagccacttgactgaaagctggtagtttcccagttaatttaacactgacactgacaccgtcgacatgttttgcagcaccggttagggtttccccatcatctaaaagtgtacaattattgtatgtaatcacgagggacctatacaaacatttacagccgctctgtgcaaagtctgaaagcctaggagcaccatagtttatcctcggtgcatcagcatcgggcccacatgcgttgtggaaccatttggctatgtgagctctgcatactgatctactccagccttattatacggatcgtgctccacttatcaactgtgacacggcagcaagcggatcatgctccacatatcaattggaaactgttgggtgaaaggtcag

SEQ ID NO: 201036 - DNA, 1867 bp, Zea Mays
atttgagaaaagttctttggaaatattcgatatcactagcgagcactagtgcacaatatattctgtattctgcaagcattctactgttactcatttttagtgcacggatgaacatttcacttgatttgtgcagttgagtttcattgcactaaaggcaaaatctccttgtgttttgagatgacaaattcctctctgcacaattcaatggttttgcttaccttggactgtactggtaaggttttttatttcggaggattccccttctcaagctggattgagaccgcaggacaatctccaagcaaaaggctcatggttaatgcatgcagctggcccaagctcagatgattcgctgccacctggcttcgaatcattgcagccaacaagctgtctcaaaattgacatatcccaaatccatgttattaggtggagatgcccaccaaaggtattgcataatcctgtttggcttgtagctgctggagaagaaagtgaggaggttgccttgcagaatgatagaatatttggagcacttgaggctatatatccacggccgtcgaatatacccccaaacccatttgttactcctgatgtgaaagactcccaatatgatgattcccgaacccagttggttccgttgctcccagttgaagaggatgatgcctctgaccagttggaagaaccacctgttggtctatcaagtagttaccagcagtcagataagtacgactcagcaacattcagggtcccacaagcctcagacgctccctttaccactgcgcagcagcagcagccgaatggttccatcaacaccacaaggtctggtgcccccgttgagcctgacacagtggctgctgcatctgctgcttacactgcaataattcagagcaaccgaatgggaaatatgattgacaaagatctgctcgtcgaaatgctaagtgaccctgcccaacttgagaggttaatgaaagaatatggcgcgcttaagcacgaacagtcaactaacagttctgttgccccaatggtgcaaggtccaccaccccagatgacagctagtgttccggtctccttcccagatcacaccactacttttcacaacataaactctacactgccgcctccacctgttctgaatcgtctgcctcctccagctattccttcagcagttaccatcaatccaccagcaagttcaagtcaagcaattagctttccaactggccgaaccagcggcttgaactattaccagaccctgatccatcagcatggaggggagaggcaggagccacagccacttcaacagcatggaatgcactttccaatgcatcatcgcactgtcgcttcccagtctagcgccactgatattgtcagcagtggtactatgccagctagggatactaagcaaaggcctacgaggccttgtgcttacttcaacagcgccagaggatgccgcaatggtgcgaactgcacctttctgcacgatgtgtctgccgcgaggaaagaacagccaaagggatccaaaagaattaagctagacagtagaatagctggtcggtattgaggaggctgctgccggttgattttttactgttctttggttcaaaatccttttcctcctttttcccttcaaaaaattattcagtaaatattgcgccccagctcctttgctttctcttagccaatttctatttgtttactagaagaacatgctcttagcccatttctctttgttgactaaaagaaaatgttttagaagaaagaaaaaaaatcccatgattaaatggagctctgtcgttattgaaccagttgaacacatgttaattggtggcagttatctcgtggtcatttgttttattttgtgtgtgtttgtgaagaa

SEQ ID NO: 201037 - DNA, 2297 bp, Zea Mays
gtttaaatcacatccccatcactccacaccccgtcaatggcgttctccgccgcctcgtcggcggcggccgcggcagcgtaccccagaactacgcttccactgcggcggcggccgggcctcttggccctcctcctccttctcctttgcttcctctccttccaggtcgtgatccatgtgccctccgccagatcagcggtgtcgctgtggctcttctcgggtcaccgagcgtaagaaccattgccatccatccatcctccctctcttccttcctcattactacgcgattcagtaaaggctctgacttcggtgttgcggtgtgattttggattgtcagcgaacgcgggactcgcgagaactgccctggctgcagcaagttacaggatgtggataaagctgaaaagactatcgcgtacactgaccagcatggtcggatcaagctattcaaagttaccgccagagaattcggttcgtcctctatctgggagaacccgtggttgcccagagatagccagccggtagccagaacacaagaggttgccggggatcatctactcgccagtggatcagaaaccaccaatctttcaagtgctgaaactctggcaactacaattgtcgatccgattaaattacggcgacaggtatttcgccgtagaagaaaggagcggagggttcaggagctgcttcagatggataagaagattgaacttcagatgcggaatgcagcaataaatagctcaaggaactttaacaataaagttagaggaagctacaacatatggaggcaggagttccgccttgttaatacagactcaacactaaggctcatgaaagatcagataataatggccaagttgtatgccactattgcactctcccagaaagaaccagacatgtacgcgttgctcatgaagcgcataaaagaaagccaaacatctatcggagatgcacttatcgacagtgaactcgattctagtgccttagagagagcaaaagcaatggggcatgtgttatcttcggctagagatgttctgtacagctcgggtgaggtgtcaagaaaattgcgtgttatgttgcagtcgacagaactaaatatcgacgcagtgaagaaacaaaactcatttctggttcagcatgctgcaaagacagtacccatgcccttgcactgcctacatatgcagctgacaactgattattattttcgtgattatgtgaccaaggaacattttgacgatgatgctttgaaggcgggacaatataaagaaaagcttgaggatttgtcactctaccactatgctatattttctgataatgtgcttgcggcctcggtagttgtcaaatcaactgtggcaaatgccaatgaaccagagaagcacgtgttccacattgtcactgatagacttaattttgcagccatgaagatgtggttcattactcatcctcctcaactggcaactgttcatgtggagaacatagacaatttcaaatggcttaattcctcatactgttctgttcttcggcaactggagtcagctcgcctcaaagaatattacttcaaagcacacgatccgtcgtcactctctgatggaaatgagaatctgaaatacaggaaccccaaatatttgtccatgctcaaccatttgaggttctacatgccagagattcacccaaagcttgagaagatactgtttcttgatgatgatgttgttgtacagaaggatttaacacccctttgggatgttgatcttaaagggatggtaaatggcgctgtggaaacctgtaaagagagtttccatcgctttgacacttatctcaacttctcacacccaaagatctcagagaacttcgatccacacgcttgtgggtgggctttcgggatgaacatgtttgacctgaaggagtggaagaagcgaaatatcactggaatataccattattggcaagatttgaatgaggaccgtaagctgtggaagctgggtacgctgcctccaggtttaattactttctacaacctgacatacccgttgaatcgtacttggcatgtcttgggcctgggctatgatccagctgttgacattgctgagatcgacaacgctgcggtagttcattacaacgggaattataagccctggcttgaccttgccatttccaagtacaagccattctggtccaagtatgtagatgttgacaactcgcacgttcggcgttgctatgagggcaaacaatgacatctgcagggtgtcatactgatgaactgaaccgtcattccggacgaaccacagtaaccaggccaagggaag

SEQ ID NO: 201038 - DNA, 1664 bp, Zea Mays
ctgatatagtgaggctgccaaggttgcctcctgaacctgatggttgggagactcggtgggtggaatccgactggaaaaggagtgaagggaaagcaggaaggttcaagcacacagcggggagatactctgcagatcctgatgacaaaggaatacaaacaacaatagatgccagacattttgctatctcagccaagttcccggaattcagtaacaagaaccggacgcttgtggtccagtactccattaagtttgagcaggatattgaatgtggcggtggctatattaagcttatgtccggttatgtcaaccagaaaaaatttagtggggacactccgtacagcttgatgtttggaccagatatatgtggtactcaaacaaagaagctccatcttatactctcttaccaggggcagaactatcccatcaaaaaagatctagaatgtgagacggacaagttaacacacgtgtatactttcattcttaggcctgatgcatcttatagcctgcttgttgataaccgtgaaagagaatctgggagcatgtacactgattgggatattctccctcctcgtaaaattaaggatgttcacgccaaaaggcctaaggattgggatgacagagaatatattgaagatcctgatgaagttaagccagagggctatgattctatcccaaaacagattcctgatccgaaggacaaaaagcctgacacatgggatgaagatgaggatggaatatggaagcccagaatggtatcaaatccagcatacaagggaccttggaaacgcaagagaattaaaaatcctaactacaagggtaaatggaagaccccatggatcgataatccagagtttgaggatgatccagatctttatgtgctgaagcctttgaagtatattggaattgaagtttggcaggtaaaagctggttcagttttcgacaacattctgatttgtgatgaccctgagtatgcaagaaaggttgttgaggaaacttggggtgcaaatagggaggctgaaaaggaagcttttgaagaagctgaaaaggagaggaaagctagggaggatagggaaggtcaaaaggcaaaggacgatggtggccggcatcgaatacacaggcgtcataaaaaacactacagagatcactgggacgactaccatgatgagctataaaagtccccaaatattgcattcctcaaaagcataagctggaagttgcttcggacattgtgggtgcttttcaataataataattgattcgcctggtcagaacaacctgaagtgtttcttgctatgcgccaacaaattattgaactacaggatttgatatgtaatggacaaccgaagatctgcagggcattccagcgaaaacttggctctggtactgaaatagaggggacgagagactgtagtttgtgtctgtacaacggtgccggccatgtgctagctttgtaatctcaaaacattgtctttgcatgaataatgtaagttacccaaaaattactgcataccaagttacaaagtgttgtagctgacatatgaggaacactttaattttaatcttcatatatatacttctgtaatcttcaaaaaggatacgatgcaattggtctatctctgtcatcaccttgcataaatgaacacacaggtttcagcaacttggct

SEQ ID NO: 201039 - DNA, 2514 bp, Zea Mays
cgcacacgtcgcaccggccccgcttatttaagccggcccccgtcctactcgctcacttcaccggagacgtagcggaccagcagccggacggccgtataaaacataccaaggccgcctcgctcgctcagcatacggaggcagccgccggacctcgagttattaagttgggcgaggagaggtggttcattccagcagggatccttctcgtgagcccagtcgatctgaccgtccttggtatctggggggggttgttctgtactctctctttaatttggacctccaaagtagtgctgggatgtatcgcctttgggattttctgggtgatggccgtcttccccaccgtcccgttcatgcctgttgggcggacggctgggtccctccttggtgctatgctaatggtcctgttccgcgtcatctccccggaggacgcgtacgccgcgattgacctcccgatcatcggcctgctcttcgggacaatggtcgtcagcatcttccttgagagggctgacatgtttaagtacctcgggaacctgctctcgtggaagagcagaggcagcaaggacctgctcttccgagtctgcatcgtgtccgcgtttgccagcgcgcttttcaccaatgacacatgctgtgttgtcctcaccgagttcatcctcaaggttgctaggcaaaacaacctgccaccacagcctttccttctggcccttgccactagttcgaacatcggctctgctgccacgccgatcggcaaccctcagaaccttgtcatagctgtcgagagtgggatctcatttggccagttcttgctgggagttttcccagctatgatcgttggggttctcacaaacgctgctatcctccttttgtacttctggaaatacttgtcggtggagaaggatcaggagggtgggcagcccacaggaccagaggtggttgccgacgatgaggttacttcccatcggttcacaccggctagaatgtcacatgtttcttctctgaatccagatgacatggattgcgtaagcgaaccgatcatcaggagcaacagtgtcagtactactgggaatgagaacctgagaagcagaagcatcaattctgaggctgacattcagcttgcgatcaagtctctgcgggcatcaagcatgtcgcatgagatggtagaggtctcgacggttcctgatcggagagatgaaggtgcatcctcaaggaagttcacaaggactgctagccagcaaaggagcgtgataatagaggatttagcaccctccccagagattaatggggaaaaggagaaagaaactgaagttgcagagaagagatggaaagtacttgtgtggaagactgctgtttatcttatcactctcggtatgctcattgcacttctaatgggactgaacatgtcctggactgcaatcactgcagctcttgttcttctggcactcgattttacggacgcacaagcttgtcttgagaaggtgtcatattcactgctgatctttttctgcgggatgtttatcactgttgatggcttcaacaaaacgggcataccgaacacactatgggagttagtggaaccatattcacgaatcgatagtgcgaaaggtgttgcacttcttgccgtggtgattcttatcctttcaaacgtggcctctaatgttcctacagtcctattgctcggtacaagagtggctgcatcagcggcttcgatttctcatggttcagagaggaaagcctggctcatccttgcatgggtcagcaccgtggctgggaacctcaccctcctaggctctgcggcgaatctgattgtctgcgagcaggccaggcgggcccagttcttcggctacaacctcaccttctggagccacctccgattcggggtcccgtcgaccatcatcgtcacggcgattggtttgctcatcgtcatcagttactgaaacagctgaaggcagaagagcgtagtgtaagagaagcagaatggataaaaatccttccaataagaagtacatgtaaattaggcttgccctataactcaagtgtgtatcggtacgttatgtctccgtctgtgctcttgctcgtgagcaagcagcacatggctgaccgtgtagcttgcatttccattgcataataggcttatgaagaatgctttggtaatatgattttacagtctgacaaggattgtgaagcagaggcagtgtaccatcaagataatacttctggaagcatataaaaaaatttcgtatatttggatttcaaatccagtctgcttcagactggaaattcatattatcttctggaatcgtgctttattgtcagaaacatgggctaaaattggaaagtccgtcatttattgggcttgcaatgggacaaccttttgggtctgttatatatcactataaccagtgacaactttggttcgcaaactcaaaccagtttctaatctttattttatgatttttatataaagttcttaataggtcctcttgctattttcaatctaaattctaaatactaaaaaaa

SEQ ID NO: 201040 - DNA, 1988 bp, Zea Mays
ctcagcatacggaggcagccgccggtaagccgcgcgcgcgtgcagtcacccatccgtccgtccgtccgtccgtcgtccgccgtccaccgccagcgcgcgctcgccaccgcacccagctagcagcacaagaaaagtctggtggcgtcggcggcggcggcggcggccggcttgccacagtccaatccttgtaccggaccaaaaagcagttgaagggcgcgagcgagcaagctagcgcgcccctacgcctacgcgcgatcgagccgcgcattgctgacctcgagttattaagttgggcgaggagaggtggttcattccagcagggatccttctcgtgagcccagtcgatctgaccgtccttggtatctggggggggttgttctgtactctctctttaatttggacctccaaagtagtgctgggatgtatcgcctttgggattttctgggtgatggccgtcttccccaccgtcccgttcatgcctgttgggcggacggctgggtccctccttggtgctatgctaatggtcctgttccgcgtcatctccccggaggacgcgtacgccgcgattgacctcccgatcatcggcctgctcttcgggacaatggtcgtcagcatcttccttgagagggctgacatgtttaagtacctcgggaacctgctctcgtggaagagcagaggcagcaaggacctgctcttccgagtctgcatcgtgtccgcgtttgccagcgcgcttttcaccaatgacacatgctgtgttgtcctcaccgagttcatcctcaaggttgctaggcaaaacaacctgccaccacagcctttccttctggcccttgccactagttcgaacatcggctctgctgccacgccgatcggcaaccctcagaaccttgtcatagctgtcgagagtgggatctcatttggccagttcttgctgggagttttcccagctatgatcgttggggttctcacaaacgctgctatcctccttttgtacttctggaaatacttgtcggtggagaaggatcaggagggtgggcagcccacaggaccagaggtggttgccgacgatgaggttacttcccatcggttcacaccggctagaatgtcacatgtttcttctctgaatccagatgacatggattgcgtaagcgaaccgatcatcaggagcaacagtgtcagtactactgggaatgagaacctgagaagcagaagcatcaattctgaggctgacattcagcttgcgatcaagtctctgcgggcatcaagcatgtcgcatgagatggtagaggtctcgacggttcctgatcggagagatgaaggtgcatcctcaaggaagttcacaaggactgctagccagcaaaggagcgtgataatagaggatttagcaccctccccagagattaatggggaaaaggagaaagaaactgaagttgcagagaagagatggaaagtacttgtgtggaagactgctgtttatcttatcactctcggtatgctcattgcacttctaatgggactgaacatgtcctggactgcaatcactgcagctcttgttcttctggcactcgattttacggacgcacaagcttgtcttgagaaggtgtcatattcactgctgatctttttctgcgggatgtttatcactgttgatggcttcaacaaaacgggcataccgaacacactatgggagttagtggaaccatattcacgaatcgatagtgcgaaaggtgttgcacttcttgccgtggtgattcttatcctttcaaacgtggcctctaatgttcctacaggtaatttttcttacgcatatgaccatgtataaccatttaatactttatatacatatatgctcttctgtttgcaaaattcataacacatggtatttcgagaggttgtgtgctcaatgccgccatctggcctctgttctttattcatgacaagcatgattaaatgaaggaaatggaagcattacattatcttgtgtacatagg

SEQ ID NO: 201041 - DNA, 2639 bp, Zea Mays
ctcagcatacggaggcagccgccggtaagccgcgcgcgcgtgcagtcacccatccgtccgtccgtccgtccgtcgtccgccgtccaccgccagcgcgcgctcgccaccgcacccagctagcagcacaagaaaagtctggtggcgtcggcggcggcggcggcggccggcttgccacagtccaatccttgtaccggaccaaaaagcagttgaagggcgcgagcgagcaagctagcgcgcccctacgcctacgcgcgatcgagccgcgcattgctgacctcgagttattaagttgggcgaggagaggtggttcattccagcagggatccttctcgtgagcccagtcgatctgaccgtccttggtatctggggggggttgttctgtactctctctttaatttggacctccaaagtagtgctgggatgtatcgcctttgggattttctgggtgatggccgtcttccccaccgtcccgttcatgcctgttgggcggacggctgggtccctccttggtgctatgctaatggtcctgttccgcgtcatctccccggaggacgcgtacgccgcgattgacctcccgatcatcggcctgctcttcgggacaatggtcgtcagcatcttccttgagagggctgacatgtttaagtacctcgggaacctgctctcgtggaagagcagaggcagcaaggacctgctcttccgagtctgcatcgtgtccgcgtttgccagcgcgcttttcaccaatgacacatgctgtgttgtcctcaccgagttcatcctcaaggttgctaggcaaaacaacctgccaccacagcctttccttctggcccttgccactagttcgaacatcggctctgctgccacgccgatcggcaaccctcagaaccttgtcatagctgtcgagagtgggatctcatttggccagttcttgctgggagttttcccagctatgatcgttggggttctcacaaacgctgctatcctccttttgtacttctggaaatacttgtcggtggagaaggatcaggagggtgggcagcccacaggaccagaggtggttgccgacgatgaggttacttcccatcggttcacaccggctagaatgtcacatgtttcttctctgaatccagatgacatggattgcgtaagcgaaccgatcatcaggagcaacagtgtcagtactactgggaatgagaacctgagaagcagaagcatcaattctgaggctgacattcagcttgcgatcaagtctctgcgggcatcaagcatgtcgcatgagatggtagaggtctcgacggttcctgatcggagagatgaaggtgcatcctcaaggaagttcacaaggactgctagccagcaaaggagcgtgataatagaggatttagcaccctccccagagattaatggggaaaaggagaaagaaactgaagttgcagagaagagatggaaagtacttgtgtggaagactgctgtttatcttatcactctcggtatgctcattgcacttctaatgggactgaacatgtcctggactgcaatcactgcagctcttgttcttctggcactcgattttacggacgcacaagcttgtcttgagaaggtgtcatattcactgctgatctttttctgcgggatgtttatcactgttgatggcttcaacaaaacgggcataccgaacacactatgggagttagtggaaccatattcacgaatcgatagtgcgaaaggtgttgcacttcttgccgtggtgattcttatcctttcaaacgtggcctctaatgttcctacagtcctattgctcggtacaagagtggctgcatcagcggcttcgatttctcatggttcagagaggaaagcctggctcatccttgcatgggtcagcaccgtggctgggaacctcaccctcctaggctctgcggcgaatctgattgtctgcgagcaggccaggcgggcccagttcttcggctacaacctcaccttctggagccacctccgattcggggtcccgtcgaccatcatcgtcacggcgattggtttgctcatcgtcatcagttactgaaacagctgaaggcagaagagcgtagtgtaagagaagcagaatggataaaaatccttccaataagaagtacatgtaaattaggcttgccctataactcaagtgtgtatcggtacgttatgtctccgtctgtgctcttgctcgtgagcaagcagcacatggctgaccgtgtagcttgcatttccattgcataataggcttatgaagaatgctttggtaatatgattttacagtctgacaaggattgtgaagcagaggcagtgtaccatcaagataatacttctggaagcatataaaaaaatttcgtatatttggatttcaaatccagtctgcttcagactggaaattcatattatcttctggaatcgtgctttattgtcagaaacatgggctaaaattggaaagtccgtcatttattgggcttgcaatgggacaaccttttgggtctgttatatatcactataaccagtgacaactttggttcgcaaactcaaaccagtttctaatctttattttatgatttttatataaagttcttaataggtcctcttgctattttcaatctaaattctaaatactaaaaaaa

SEQ ID NO: 201042 - DNA, 3654 bp, Zea Mays
cacagaaccaatactgtagctacgaagctacataatatatcctacttatattacactgacgagaacgtgtcgagcaggagtggtgctggggcccaataaagaaaatgcccaataccccccttttcttttgccatgagactgacggccgccccctctagctagttttgtcgctcaacggaaccgcacgcgttttctttttcttggatgccaagaaagatctatataactgtgctgggcacagcagttaagcgcaagcccaagcccccacgcgcaaaatccaaaaaaaaaaaaaacatcagagccatcgaaatcacggttccgtctctctaaccgaagaagctccctcacgaatcgaatcacatgaatcaccacgcgggagaggaaaaagtgctaggtgtacataaacctggccattagtttcgcaacgttaatggtaacggtaatggttcacactcgataaccaacggtaacaagattgaatataccaatatcaatttctagtatgatatccaattacggttagacttaaataaacaagatttaatcttatcggttaaatatgtgaaccaaacaacacctaaaacttttatactccagtactagacagttgcaacctgcatatatttattcgaaaagaaaacatgattcagcaaacagacaaattctctgtgacataagaaaaaaaccgtccaacttttttaccatccagaaaacgggagctctaccagtgtgccgggtgcgcctggtaaattacgggcgtccatgcatggagccccacccccacctccatgtaggacccacgcccaagtgaccccaccacatacccgtgaatgaaaggaagactgaaaagcagagttcctgccatgttccccgtccccacacgctcacgcggctcccatggtgcacacccacggccacgggccatagcgacaccccccgcggcccgcctatttagccgcccccacccacatcgcggcggggtctccatgcctccagtgtccagtccagagtccaggctccaggactaccaccactccgtctcgtctcgtcctcacaccccactccaccaccacctctgccttgcaaagctttccaccgatccgccgcctcgtccgcgcgctcgcaggcagcagtgtggactacccgccccatactccatcccctactcgaaggatacaccgtgagtaggcgtgatggtgcttgataccccgttttcgtgcagcttgttgctaattcgttttagtttgagggatcaagaaccaccttgttctttctttctttcttttttggactatgatgaatcattgcaaatctcttgaatacatttttcactataaaatactgccttgcctttgagctccttggttcacgtgcaatgtttctttgccctccgattttgcaggacctcgagttattaagttgggcgaggagaggtggttcattccagcagggatccttctcgtgagcccagtcgatctgaccgtccttgggacctccaaagtagtgctgggatgtatcgcctttgggattttctgggtgatggccgtcttccccaccgtcccgttcatgcctgttgggcggacggctgggtccctccttggtgctatgctaatggtcctgttccgcgtcatctccccggaggacgcgtacgccgcgattgacctcccgatcatcggcctgctcttcgggacaatggtcgtcagcatcttccttgagagggctgacatgtttaagtacctcgggaacctgctctcgtggaagagcagaggcagcaaggacctgctcttccgagtctgcatcgtgtccgcgtttgccagcgcgcttttcaccaatgacacatgctgtgttgtcctcaccgagttcatcctcaaggttgctaggcaaaacaacctgccaccacagcctttccttctggcccttgccactagttcgaacatcggctctgctgccacgccgatcggcaaccctcagaaccttgtcatagctgtcgagagtgggatctcatttggccagttcttgctgggagttttcccagctatgatcgttggggttctcacaaacgctgctatcctccttttgtacttctggaaatacttgtcggtggagaaggatcaggagggtgggcagcccacaggaccagagatgacatggattgcgtaagcgaaccgatcatcaggagcaacagtgtcagtactactgggaatgagaacctgagaagcagaagcatcaattctgaggctgacattcagcttgcgatcaagtctctgcgggcatcaagcatgtcgcatgagatggtagaggtctcgacggttcctgatcggagagatgaaggtgcatcctcaaggaagttcacaaggactgctagccagcaaaggagcgtgataatagaggatttagcaccctccccagagattaatggggaaaaggagaaagaaactgaagttgcagagaagagatggaaagtacttgtgtggaagactgctgtttatcttatcactctcggtatgctcattgcacttctaatgggactgaacatgtcctggactgcaatcactgcagctcttgttcttctggcactcgattttacggacgcacaagcttgtcttgagaaggtgtcatattcactgctgatctttttctgcgggatgtttatcactgttgatggcttcaacaaaacgggcataccgaacacactatgggagttagtggaaccatattcacgaatcgatagtgcgaaaggtgttgcacttcttgccgtggtgattcttatcctttcaaacgtggcctctaatgttcctacagtcctattgctcggtacaagagtggctgcatcagcggcttcgatttctcatggttcagagaggaaagcctggctcatccttgcatgggtcagcaccgtggctgggaacctcaccctcctaggctctgcggcgaatctgattgtctgcgagcaggccaggcgggcccagttcttcggctacaacctcaccttctggagccacctccgattcggggtcccgtcgaccatcatcgtcacggcgattggtttgctcatcgtcatcagttactgaaacagctgaaggcagaagagcgtagtgtaagagaagcagaatggataaaaatccttccaataagaagtacatgtaaattaggcttgccctataactcaagtgtgtatcggtacgttatgtctccgtctgtgctcttgctcgtgagcaagcagcacatggctgaccgtgtagcttgcatttccattgcataataggcttatgaagaatgctttggtaatatgattttacagtctgacaaggattgtgaagcagaggcagtgtaccatcaagataatacttctggaagcatataaaaaaatttcgtatatttggatttcaaatccagtctgcttcagactggaaattcatattatcttctggaatcgtgctttattgtcagaaacatgggctaaaattggaaagtccgtcatttattgggcttgcaatgggacaaccttttgggtctgttatatatcactataaccagtgacaactttggttcgcaaactcaaaccagtttctaatctttattttatgatttttatataaagttcttaataggtcctcttgctattttcaatctaaattctaaatactaaaaaaa

SEQ ID NO: 201043 - DNA, 3693 bp, Zea Mays
cacagaaccaatactgtagctacgaagctacataatatatcctacttatattacactgacgagaacgtgtcgagcaggagtggtgctggggcccaataaagaaaatgcccaataccccccttttcttttgccatgagactgacggccgccccctctagctagttttgtcgctcaacggaaccgcacgcgttttctttttcttggatgccaagaaagatctatataactgtgctgggcacagcagttaagcgcaagcccaagcccccacgcgcaaaatccaaaaaaaaaaaaaacatcagagccatcgaaatcacggttccgtctctctaaccgaagaagctccctcacgaatcgaatcacatgaatcaccacgcgggagaggaaaaagtgctaggtgtacataaacctggccattagtttcgcaacgttaatggtaacggtaatggttcacactcgataaccaacggtaacaagattgaatataccaatatcaatttctagtatgatatccaattacggttagacttaaataaacaagatttaatcttatcggttaaatatgtgaaccaaacaacacctaaaacttttatactccagtactagacagttgcaacctgcatatatttattcgaaaagaaaacatgattcagcaaacagacaaattctctgtgacataagaaaaaaaccgtccaacttttttaccatccagaaaacgggagctctaccagtgtgccgggtgcgcctggtaaattacgggcgtccatgcatggagccccacccccacctccatgtaggacccacgcccaagtgaccccaccacatacccgtgaatgaaaggaagactgaaaagcagagttcctgccatgttccccgtccccacacgctcacgcggctcccatggtgcacacccacggccacgggccatagcgacaccccccgcggcccgcctatttagccgcccccacccacatcgcggcggggtctccatgcctccagtgtccagtccagagtccaggctccaggactaccaccactccgtctcgtctcgtcctcacaccccactccaccaccacctctgccttgcaaagctttccaccgatccgccgcctcgtccgcgcgctcgcaggcagcagtgtggactacccgccccatactccatcccctactcgaaggatacaccgtgagtaggcgtgatggtgcttgataccccgttttcgtgcagcttgttgctaattcgttttagtttgagggatcaagaaccaccttgttctttctttctttcttttttggactatgatgaatcattgcaaatctcttgaatacatttttcactataaaatactgccttgcctttgagctccttggttcacgtgcaatgtttctttgccctccgattttgcaggacctcgagttattaagttgggcgaggagaggtggttcattccagcagggatccttctcgtgagcccagtcgatctgaccgtccttggtatctggggggggttgttctgtactctctctttaatttggacctccaaagtagtgctgggatgtatcgcctttgggattttctgggtgatggccgtcttccccaccgtcccgttcatgcctgttgggcggacggctgggtccctccttggtgctatgctaatggtcctgttccgcgtcatctccccggaggacgcgtacgccgcgattgacctcccgatcatcggcctgctcttcgggacaatggtcgtcagcatcttccttgagagggctgacatgtttaagtacctcgggaacctgctctcgtggaagagcagaggcagcaaggacctgctcttccgagtctgcatcgtgtccgcgtttgccagcgcgcttttcaccaatgacacatgctgtgttgtcctcaccgagttcatcctcaaggttgctaggcaaaacaacctgccaccacagcctttccttctggcccttgccactagttcgaacatcggctctgctgccacgccgatcggcaaccctcagaaccttgtcatagctgtcgagagtgggatctcatttggccagttcttgctgggagttttcccagctatgatcgttggggttctcacaaacgctgctatcctccttttgtacttctggaaatacttgtcggtggagaaggatcaggagggtgggcagcccacaggaccagagatgacatggattgcgtaagcgaaccgatcatcaggagcaacagtgtcagtactactgggaatgagaacctgagaagcagaagcatcaattctgaggctgacattcagcttgcgatcaagtctctgcgggcatcaagcatgtcgcatgagatggtagaggtctcgacggttcctgatcggagagatgaaggtgcatcctcaaggaagttcacaaggactgctagccagcaaaggagcgtgataatagaggatttagcaccctccccagagattaatggggaaaaggagaaagaaactgaagttgcagagaagagatggaaagtacttgtgtggaagactgctgtttatcttatcactctcggtatgctcattgcacttctaatgggactgaacatgtcctggactgcaatcactgcagctcttgttcttctggcactcgattttacggacgcacaagcttgtcttgagaaggtgtcatattcactgctgatctttttctgcgggatgtttatcactgttgatggcttcaacaaaacgggcataccgaacacactatgggagttagtggaaccatattcacgaatcgatagtgcgaaaggtgttgcacttcttgccgtggtgattcttatcctttcaaacgtggcctctaatgttcctacagtcctattgctcggtacaagagtggctgcatcagcggcttcgatttctcatggttcagagaggaaagcctggctcatccttgcatgggtcagcaccgtggctgggaacctcaccctcctaggctctgcggcgaatctgattgtctgcgagcaggccaggcgggcccagttcttcggctacaacctcaccttctggagccacctccgattcggggtcccgtcgaccatcatcgtcacggcgattggtttgctcatcgtcatcagttactgaaacagctgaaggcagaagagcgtagtgtaagagaagcagaatggataaaaatccttccaataagaagtacatgtaaattaggcttgccctataactcaagtgtgtatcggtacgttatgtctccgtctgtgctcttgctcgtgagcaagcagcacatggctgaccgtgtagcttgcatttccattgcataataggcttatgaagaatgctttggtaatatgattttacagtctgacaaggattgtgaagcagaggcagtgtaccatcaagataatacttctggaagcatataaaaaaatttcgtatatttggatttcaaatccagtctgcttcagactggaaattcatattatcttctggaatcgtgctttattgtcagaaacatgggctaaaattggaaagtccgtcatttattgggcttgcaatgggacaaccttttgggtctgttatatatcactataaccagtgacaactttggttcgcaaactcaaaccagtttctaatctttattttatgatttttatataaagttcttaataggtcctcttgctattttcaatctaaattctaaatactaaaaaaa

SEQ ID NO: 201044 - DNA, 1930 bp, Zea Mays
gcgtgatggtgcttgataccccgttttcgtgcagcttgttgctaattcgttttagtttgagggatcaagaaccaccttgttctttctttctttcttttttggactatgatgaatcattgcaaatctcttgaatacatttttcactataaaatactgccttgcctttgagctccttggttcacgtgcaatgtttctttgccctccgattttgcaggacctcgagttattaagttgggcgaggagaggtggttcattccagcagggatccttctcgtgagcccagtcgatctgaccgtccttggtatctggggggggttgttctgtactctctctttaatttggacctccaaagtagtgctgggatgtatcgcctttgggattttctgggtgatggccgtcttccccaccgtcccgttcatgcctgttgggcggacggctgggtccctccttggtgctatgctaatggtcctgttccgcgtcatctccccggaggacgcgtacgccgcgattgacctcccgatcatcggcctgctcttcgggacaatggtcgtcagcatcttccttgagagggctgacatgtttaagtacctcgggaacctgctctcgtggaagagcagaggcagcaaggacctgctcttccgagtctgcatcgtgtccgcgtttgccagcgcgcttttcaccaatgacacatgctgtgttgtcctcaccgagttcatcctcaaggttgctaggcaaaacaacctgccaccacagcctttccttctggcccttgccactagttcgaacatcggctctgctgccacgccgatcggcaaccctcagaaccttgtcatagctgtcgagagtgggatctcatttggccagttcttgctgggagttttcccagctatgatcgttggggttctcacaaacgctgctatcctccttttgtacttctggaaatacttgtcggtggagaaggatcaggagggtgggcagcccacaggaccagaggtggttgccgacgatgaggttacttcccatcggttcacaccggctagaatgtcacatgtttcttctctgaatccagatgacatggattgcgtaagcgaaccgatcatcaggagcaacagtgtcagtactactgggaatgagaacctgagaagcagaagcatcaattctgaggctgacattcagcttgcgatcaagtctctgcgggcatcaagcatgtcgcatgagatggtagaggtctcgacggttcctgatcggagagatgaaggtgcatcctcaaggaagttcacaaggactgctagccagcaaaggagcgtgataatagaggatttagcaccctccccagagattaatggggaaaaggagaaagaaactgaagttgcagagaagagatggaaagtacttgtgtggaagactgctgtttatcttatcactctcggtatgctcattgcacttctaatgggactgaacatgtcctggactgcaatcactgcagctcttgttcttctggcactcgattttacggacgcacaagcttgtcttgagaaggtgtcatattcactgctgatctttttctgcgggatgtttatcactgttgatggcttcaacaaaacgggcataccgaacacactatgggagttagtggaaccatattcacgaatcgatagtgcgaaaggtgttgcacttcttgccgtggtgattcttatcctttcaaacgtggcctctaatgttcctacaggtaatttttcttacgcatatgaccatgtataaccatttaatactttatatacatatatgctcttctgtttgcaaaattcataacacatggtatttcgagaggttgtgtgctcaatgccgccatctggcctctgttctttattcatgacaagcatgattaaatgaaggaaatggaagcattacattatcttgtgtacatagg

SEQ ID NO: 201045 - DNA, 640 bp, Zea Mays
  misc_feature (138)..(138): n is a, c, g, or t
tcttggctttctgatattttgttgcccagcttcctagaggcacacatgagtggtccaaactggttaccccggaggagcttgtcctaatgctgcaaaaggcttccgtctccgtcgaagagatggcagggttcgtttacnatccgttgagcggagaatggtccctgtcagaaagatatcagtgtgaactacattgcttttggcgtcaagaagggcgaggcatcattgacaaatgacagagaagcaagtttatcatagcgaagaaaaacacgtgaccttgaattgtcgggcatcattttcagaggaccaattcatgtcactgaaatctattgctaagtatgcaaccaagtagcagaagagaattctcttgccctttgttagtcttggaaactggagcttgtggagtgatgcttcctggaagcgccattgagaagtcaagttgacaacaagtgactgctaacaagtagagctatctgccttttttgggtaatgtttcaggcagtttttctcaattttgtggcagtcactgatctaaataaaaatactactacactgctgtacgtgaaaactgaacagatttgctgtctggaaatgtaactatttttaacagttaaggggggagttaaggggtgttttaatgcac

SEQ ID NO: 201046 - DNA, 2734 bp, Zea Mays
cgcaaggacgacaggccgtgacaaggcgcaatcagctgccgcctgccggctgttgattgaagtccagtgttgtcaaaatttccacatccaaattgaagagccggtccttgtcaccctaacttcagtcacttgactctcacgcacaacctctctcgccgaacacagaccagagcagagcaatcctgtctgtcagggtctctccgatccctcggctccccccacaattcacacgcgcgatggctcccctgctcctgctcctccccgtcgtccagctcctcctggccgtagccgacgccgtccccgattcctgcgccaaagccacatgcgccggccatgagatacactaccctttccggctggactcctctatgcccgacgactgcgtggtgtaccccgtccccgggatcggcctcatctgccaggacaactccacgctgatcctcccctttgagtcgcacaggtacacagtgctgagcatcaactacaaggcgcacaccatcctagtctccgacgccgacatcggcgacgagtacgcggcggcggcggcgggcgccggctgcccgcgcctccacgtgaacctgaccatggacgccttctggctgcggctgtctccctccgactccaacatcaccttcctctacaactgcaagaggaacgtcaccctgccatccgccgtggagctgagcgggtgccaagatggcaacgacgacgacgacgacgacagcaggtcgccgtcgccgtcgtactcgtacgcgctgcgggacggcggggtcacgggcgctgaggcgcacgagctcgagtgccaggaggtggtggtggcgccggtgctggacgtgcacaagagggcgatcgtgggcgcgcccggcggcccgcctccgcctccgggggacgggtcgtcgccgttccgcgaggtgctgcagggcggcttcgagctgagctacgacacccactcccggcagtgcgaccggtgcgagcgctccggcggatggtgcgggtaccagcgcgctggagcgacgacgcccgccgccggcgcgagcgcgacgatgaccttcacctgtttctgcgagagcggcccggcctcggatcggtgcgggccaaaaagtaaaacagcagttattgccggtgtcgcggctggcgctggtgttgcaatacttgctgctgccatttttttgttcgtgaggcgcaagagaaagcagaagagagtggtcaactcgtcttcgaagctcctcaagtacagcggctctggcgggaccccgcgttcacgggtcggtgacatggagtccggcagcatcgaggacccgcctacgcatctcttcacctacgaggagcttgaggaggcgaccagttgcttcgacgaaaacagagagctcggtgacggtggcttcggcaccgtctacaaagggtacctcaaggacgggcgcgtggtggcggtgaaacggctgtacaacaacagctaccggcgcgtggagcagttccagaacgaggcggccatcctgtcggggctacgccaccccaacctcgtcatgttctacggctgcacgtccagccagagccgcgagctgctgctggtgtacgagttcgtggccaacggcacggtcgccgaccacctgcacgggcagcgggccgccgagcgcgccctcccgtggccgctccgcctcggcgtcgccgtggagtccgccgcggcgctcacctacctgcacgccatcgagccgcccgtggtgcaccgcgacgtcaagaccaccaacatcctcctggacgccgactaccacgtcaaggtcgccgacttcggcctctcccgcctcttccccctcgacgtcacgcacgtctccaccgctccccagggcacgccagggtatgtagatccagagtaccaccagtgctaccagctgacggacaagagcgacgtgtacagtttcggagtggtcctggtggagctcatctcgtccaagcccgccgtcgacgtcacccggcaccgcaacgagatcaacctggccggcatggccatcagcaagatccagaagtgccagctggaggagctcgtcgacatcgacctgggctacgagaccgacccggccaccaagaaggcgatgacggcggtcgccgagctggccttccgttgcctgcagcagaacggcgagatgcgcccgccgatcaaggaggtgctcgaggtgctcaggagcattcagggcgaataccagacggggaaggacggagacaaaaacaaggacggacccctctctcccaccacggttcatgctccgtgggagagcagggccacgacgcccaacaccagcagggactagaccagtcggtcagtgtcaaggactggagaccggagaagttgctgctgctgtgtgactgtgaggcatgccagattgcctgtcatttgttttcaggcttcgcggtccggttcctgctgatgtatatatttgttttgttgggtctgtcagagctgagggaatgtacatatatgtgaaagagtggtgaatgatatatataatacacatataaataaatgagtactagtaaatagatgtcacttgtgcctgccctgacctttcacccaacagtttccaattgatatgtggagcatgatccgcttgctgccgtgtcacagttgataagtggagcacgatccgtataataaggctggagtagatcagtatgcagagctcacatagccaaatggttccacaacgcatgtgggcccgatgctgatgcaccgaggataaac

SEQ ID NO: 201047 - DNA, 771 bp, Zea Mays
attttattgtttattgcaagttgtcccctatatttatatacaacattgctggttgaatttattttaagtttgagttttctaacaatcaatgttctctagggctcaagaacagtaacttggacacatgtgtacttggagctattggggttcttgctagtgttgttacaaccaagatcttggacagagctggacggagaatccttcttattatttcttcgtctgggatgactctaagcttgctcacggttgctgttgtattttacatcaagggcaacatttcacatgactctgacttgggtaacaccttaagtatggtgtctttgattggtgtcttggcttgtgtcactgcttactcctttggtatgggtgccattccatggatcataatggctgagatccttcctgttagcatcaatagcgtggcaggaagctttgccacccttgccaactggctgacatcctttggaataacaatgacagcaaatttgcttctaagttggagtgctgcaggtacatttgccttgtacatgatggtgagtgctttcacggtcgtcttcgtcatcctttgggtgccagagacaaagggaaaaaccctcgaggagatacaatggttcttccactgggccgtccgacgcgcagagggaagcctggctgggctgaaatgagtgctgcagcccatttaggtcaaaattcctttcactttttctctaattttcttcttctcctatttttaattcccaatttgaatctcaagtaggactttgaattttg

SEQ ID NO: 201048 - DNA, 814 bp, Zea Mays
gacacatgtgtacttggagctattggggttcttgctagtgttgttacaaccaagatcttggacagagctggacggagaatccttcttattatttcttcgtctgggatgactctaagcttgctcacggttgctgttgtattttacatcaagggcaacatttcacatgactctgacttgggtaacaccttaagtatggtgtctttgattggtgtcttggcttgtgtcactgcttactcctttggtatgggtgccattccatggatcataatggctgagatccttcctgttagcatcaatagcgtggcaggaagctttgccacccttgccaactggctgacatcctttggaataacaatgacagcaaatttgcttctaagttggagtgctgcaggtacatttgccttgtacatgatggtgagtgctttcacggtcgtcttcgtcatcctttgggtgccagagacaaagggaaaaaccctcgaggagatacaatggttcttccagtgagctctagcatttcatctttatatgcaaatagcgtggcacatcctctaggatctataagaaaatatagtgaaatatagcataatcaatgtcatttagcaattttagtgtttaaatggaatttgctattgttttcgtaagaaaaactataaatattgaaattttataaaaatattactcaaatatatgtacgaggatgtaaaagaagatgtccctagatccattacttaacatttgttgaatcaatcgaggatcgaaatagtcgaccaacgaatgtgtatagaagccaataaataatttttgcacaaggtaa

SEQ ID NO: 201049 - DNA, 1340 bp, Zea Mays
cacatgtttacttacagaagttcatgaaaagacacgtgcacttgaggcttctggatacttcttctgcctagaggaccgtgcactactttgtagagactgtgatgttgctatacacacagtgaattcctttgtttcagtacatcagagattcctgctaactggagttcaggtgggtcttgatcctgctgatccagttccacctattgctgaaaagcatgttaatgctgttggtggatcagtgaatcaaccagtgagacatcagccaaggagaagcccgacagttcaattttcagttgaagggagtgcttctgttcctaccaaaaatgtaacaaatggagattgttcaaggcagaattttgtcccaacagccagggcagaagtggttgattggactatgaataatagtacaattcgatcagtagaatctccgcctaagtacatttcagaggaaagccccacacttctgcaatctagccagaccacaacagtcttctccaaccaaattaatggcaatagtgatggggcctaccacttgtcattctcaggtggtaatgtgacagacagcctaccagattggcccgtggatgagttcttcagtaactcagaatatggtccaaactttggcttctccgagaatggttcttctaagggtgataccgctaagctggggggcgctggtggatctccacaatgccgtttggctgaaggctcagttgctgaggaactattagggcaggtgcctggattgatcaccgatgaatatatgggccgagtacctgagaattcatggacagtgcctgaggttccctctccaccaacagcctcggggctcaactggcatgggaatttgtgtttccctgcgtatgacagcaccatgtttgttcctgaaattacctccctccagaactcccaaagtcacttcaccgtaccttccagtttcaagcgccggagaagagagtactaagaggcgacaagaagatcactagacaccactgtccggtctaggccatcttgagaaaggcttcttggtgggccaaatgacgaaagaaaatatccaggactgagtggtcattcaaacatcaactgagctatccagtagccaggttttaagtgtgttgtaatgcttcaatgtgtttcattttctaaagacctgagcttcgcttgtgatttgttccgagctgtacggtgtcgattttgtgtatataatataatataccgaaataaagggtacccattatgagtatatgatcattccgaaataaagggtatcccgtatgagtatgatcattcgcgagtacatcgcacactggtggtggcacattaagttacttctgcaatac

SEQ ID NO: 201050 - DNA, 1312 bp, Zea Mays
gcatgctagctaccttctagctatctagcctctaggtccaatgcactccctccttataaacaaggaaccctccttcgcctctcttgccatagaccggacaccggagaggtcactgcacaggagcgctcaggaaggccgctgcgctgagatagaggcatggcggccaatgcgggcggcggtggagcgggaggaggcagcggcagcggcagcgtggctgcgccggcggtgtgccgccccagcggctcgcggtggacgccgacgccggagcagatcaggatgctgaaggagctctactacggctgcggcatccggtcgcccagctcggagcagatccagcgcatcaccgccatgctgcggcagcacggcaagatcgagggcaagaacgtcttctactggttccagaaccacaaggcccgcgagcgccagaagcgccgcctcaccagcctcgacgtcaacgtgcccgccgccggcgcggccgacgccaccaccagccaactcggcgtcctctcgctgtcgtcgccgccttcaggcgcggcgcctccctcgcccaccctcggcttctacgccgccggcaatggcggcggatcggctgggctgctggacacgagttccgactggggcagcagcggcgctgccatggccaccgagacatgcttcctgcaggtgctgtagactacatgggcgtgacggacacgggcagctcgtcgcagtggccatgcttctcgtcgtcggacacgataatggcggcggcggcggccgcggcgcgggtggcgacgacgcgggcgcccgagacactccctctcttcccgacctgcggcgacgacgacgacgacgacagccagcccccgccgcggccgcggcacgcagtcccagtcccggcaggcgagaccatccgcggcggcggcggcagcagcagcagctacttgccgttctggggtgccggtgccgcgtccacaactgccggcgccacttcttccgttgcgatccagcagcaacaccagctgcaggagcagtacagcttttacagcaacagcacccagctggccggcaccggcagccaagacgtatcggcttcagcggccgccctggagctgagcctcagctcatggtgctccccttaccctgctgcagggagcatgtgagagcaacgcgagctaccactgggacgtgcgttgctgtcattgtcctaggttagtagctagtgccagttactagtaagcatcaggcataggagtatgtagtagaagcatgtctggagaaaggcaatagctagcgtttgggagatctctggcggtactattattagatagcg

SEQ ID NO: 201051 - DNA, 2399 bp, Zea Mays
tcgtccggcactccggccacaccttcgctttcctgcctgccacagccactgccatgcatgcatgcggcgcccggcaggggccagcccataaacatttctgccatccctggctggccccccttttctccgcgtccccttgttcgcgggtgtaccatcgtcctcctcccgatcctagcatgtcattacgatggcaagccgcatcgcatcgttcccctccttcctcgcctttgtcgtcgtcaccgtcgccacgttattcccctcctcttcctcccagcagcagcccgccgccgccgtgccacagcccagagggttctatataagctgcgggtcggacaaggacgtgcaggtagggagcatcaagtgggccaaggatgagggcttcaccgccgtcgggaacgcctccgccatcaacaagccccacctcctccccctgctcgccgcgctgcgctacttcccggacgccaccgcgcggaagtactgctaccagttgcccgtcgtcaagggcacgcgctaccttgtccgcaccacctacttctacggcggcttcgacgggggcaaggaaccgcccgtgttcgaccagatcgtggacggcaccctgtggagcgccgtcaacaccacggacaactaccggcgcggcatgtccacctacttcgagatggtggcgcaggggcagggcaagaccatgagcgtgtgcctagcgcgccgccccgacacggcgtccagccccttcatctccgcgctcgaggtcatcgacctcgccgactccatgtacaacaccacggacttcagcaggttcaccatgaccaccgtggtgcgcagccgcttcggcagcaagggcgatatcgtcagctatccagatgacccgtacaaccggtactgggcgccgttcgcggacgccaaccccatggtggagagccactcctccatctcgcccgacgacttctggaaccagccgccggccaaggcgctcaaggccggaatcacaaccagccggggcaagaagctcgccgtgcagtggccgaccacggagctccccgcggcgacctactacgtggcgctctacttccaggacccgcgcacggcgagccccttcagctggcgcgtcttcgacgtcgcggtcaacggcaacgacttcttccgggggctcaacgcctccgcggccggcgtcatggtctactccagcatgatgcagctgtccgggaagacggagatcttgctcacgcccaacgagacgtcccccgtcggcccgctcatcaacgccggagagatctaccagatcgtcccgctcggcggcaggaccgccacaagagacgttagcagttgtcggtcgcgtccggtttcttgtgcagtggttgcaatggaagacctggcaagcagcctcaagaacctgcctccggactgggctggagacccttgtctaccacagcaacattcctggactggggttgaatgctcccagggatcacccgtgcgcgtcttgtcactggatctaaaaaaccatggtctttcaggatcgctacccgacagcattgtacacttgacagggatgaaaaccatctatctcagtggtaacaatctctcaggccccatacctgacttgagcagcatgcacgccctgactgcagtgcgccttgatagcaatcagttcagtggaacgatcaacccatcaatggaaaaactagccaatctcaaggagctacacctgaacaacaacaatctcacgggcaaaataccagatggtctgaaaaacaaagctggacttgatttgagaactgaggggaacaaatttgaatgaggctgacaaggaggaaatcatgagtacgatgctgcacccatgcacacagttcaatgatgaagggagaggactgaagacttcaaaatttgtacgatgacatacattaatggctgatgtataagagctgaagagtgatttcatatctagcatgcatttgccatttccatcctcttcttagagttttgttgtacatgttggcgcatgctgcatcaagaagcatcaatttaggggtaggtaattaagtattaggtgaaagaatcgttccttaatcttcaaaaagtcacaagacatgcattttatgaaacttccattaggacatgaacatgcagtggccagaaaatagctcataatgcattctgcaagttatgacttctgcatcttaggagtcacactggtagcatcgagacatacagataaaatacatactagggcaatcctgatatataaagcctaaaactacccaaaatcccactttccacctcctcctgctaagttagtactcagtacagccgtcgcgtgatgcagtcactcatctacctcactgacatcatcagaagctgctcggatgatatacacctggaagacgaatgcattgttggatgag

SEQ ID NO: 201052 - DNA, 1616 bp, Zea Mays
ggaactcaaattattttggattccaagagtccctaaatgcctattctctaaaagaaacaatagaaagatgttaagttttacatcgattatcttttcttgggagattatgtcgatcgtggtcagcatagtctggagacaatcagtcttctccttgcactgaaggttgaatatcctcacaatgtacacttaatccgagggaatcatgaagcagcggatatcaatgctctatttgggttccgaatcgagtgcatagaaagaatgggtgagcgggatggaatctggacctggcaccgtgtgaacaggttatttaattggcttcctttggctgcactaatagaaaagaagataatctgtatgcacggtggtattggtcggtccatcaaccatatagagcaaatagaaaatcttcatagaccaattaccatggaagcaggctcagttgttctgatggatcttctatggtctgatccgactgagaacgatagtgtagagggtctcaggccaaatgcacggggccctggtcttgttaccttcgggcccgacagagttatggagttctgcaacaacaatgacctgcagttgattgtgcgagcacacgagtgcgtgatggatggcttcgagcgtttcgctcaaggtcacctgatcactcttttctcagcgacaaattactgcggaacggcaaacaacgcaggagcgatcttagttctcggaagggatctggtcgttgttccaaagctcatccatcctttgccgcctgccattacgtcacctgagacctcaccagagcaccacattgaggacacatggatgcaggagttgaatgccaatagaccgccaacaccaaccaggggccgccctcaagcgcccaataacgaccgaggctctgttgcttggatatagcggcctggccatattatgaaacagtcagatttctcgcctcccaccagtggcttgaggcttatattatccatccatcttgggcacatgcaggcggtctgtgctgaaagcacatgcttagcccaaaacaacatcgaaagggaactgttcagggagcgagactaagcggtgctctgaagacagaaggccagagaagactcaccagtcaccgtcgacagtgctctccaaatccttcccctccaaatgacatgagaagtagaagaacagaaccaagtgttggcaaaccacagggtcttgcctgaggtcacgcctgtacatactcagatgccagcagataggcggggttgtgtactgtgttctttttgtcgagcgtccaaagtggtagcagcagtccattgtgctaggtattcatttgctgtagggtttttgtttcttgtccctcatgttgcagagtatggaagtgataaaaatgggtcgttctgtcaggtcgtgtataatagcgttgtcgcttgtttatgggtagtagcagcgagtcagctgtcagcacgccttacacctccctcgtgttgtaattcccgtcacctgtgctgagagtgtgcacaatatatcgtcgtctgttgtccaaagttttgggtcatggacgggtttggtgatttgagttgatttattagagaagcaatgtgttgttcgattttgagctttatggctgtgcacctctg

SEQ ID NO: 201053 - DNA, 2575 bp, Zea Mays
ctcttgtttgcatgaaattgattactgaattggattgcttcaaattttctggagcatatatattgaaggaacaattcttaatatagattcctgcagataaataaatcaagggtgtgctgttagatgacctcctagttgctgaagatcttgctgctgctgaaacaaccagtgcagctaatcatgcagcagcagcagctgctgcatcctcaaatgtacaaagagaaccgggtagatatgcctacaacgatgaacaatcaggacaaacagttacagtttcaagtcctgatggagctgttgttcttgggactccagttgctcctccagtcaatggggacatgtatactgatattagtcctgagaatgccattatccagggacagagaagattgagcaaaggtgttgattacttggttgaagcatcagctgcagaggctgaggcaatcagtgctactttagctgctgtaaaggctaggcaagttaacggtgagatggagcattcacctgacagggaacaatctccagatgctgcaccaagtgccaagcaaaattcaagccttataaaaccagatcctgctcttatgaacaattcaacaccaccacctggggttcggttgcaccatagagcagttgtggtagcagcagaaactggaggtgccttaggtggcatggttagacagctctcgattgaccagtttgagaatgaaggtagaagggtcatttatggcacccctgagaatgcaactgcggcaaggaaattgctggatcgacaaatgtctattaatagcgtgcccaaaaaggtaattgcttctctgctgaaacctcgtggttggaagccccctgtgcgaaggcagttctttcttgactgcaatgagattgcagatctatgtgataatgctgaaagaatattttcaagtgaacctagtgtcttacagcttaaggctcccattaagatatttggtgatctgcacggtcaatttggtgacctcatgcgcttgtttgatgaatacggtgctccttcaactgctggagacattgcttacatcgattatcttttcttgggagattatgtcgatcgtggtcagcatagtctggagacaatcagtcttctccttgcactgaaggttgaatatcctcacaatgtacacttaatccgagggaatcatgaagcagcggatatcaatgctctatttgggttccgaatcgagtgcatagaaagaatgggtgagcgggatggaatctggacctggcaccgtgtgaacaggttatttaattggcttcctttggctgcactaatagaaaagaagataatctgtatgcacggtggtattggtcggtccatcaaccatatagagcaaatagaaaatcttcatagaccaattaccatggaagcaggctcagttgttctgatggatcttctatggtctgatccgactgagaacgatagtgtagagggtctcaggccaaatgcacggggccctggtcttgttaccttcgggcccgacagagttatggagttctgcaacaacaatgacctgcagttgattgtgcgagcacacgagtgcgtgatggatggcttcgagcgtttcgctcaaggtcacctgatcactcttttctcagcgacaaattactgcggaacggcaaacaacgcaggagcgatcttagttctcggaagggatctggtcgttgttccaaagctcatccatcctttgccgcctgccattacgtcacctgagacctcaccagagcaccacattgaggacacatggatgcaggagttgaatgccaatagaccgccaacaccaaccaggggccgccctcaagcgcccaataacgaccgaggctctgttgcttggatatagcggcctggccatattatgaaacagtcagatttctcgcctcccaccagtggcttgaggcttatattatccatccatcttgggcacatgcaggcggtctgtgctgaaagcacatgcttagcccaaaacaacatcgaaagggaactgttcagggagcgagactaagcggtgctctgaagacagaaggccagagaagactcaccagtcaccgtcgacagtgctctccaaatccttcccctccaaatgacatgagaagtagaagaacagaaccaagtgttggcaaaccacagggtcttgcctgaggtcacgcctgtacatactcagatgccagcagataggcggggttgtgtactgtgttctttttgtcgagcgtccaaagtggtagcagcagtccattgtgctaggtattcatttgctgtagggtttttgtttcttgtccctcatgttgcagagtatggaagtgataaaaatgggtcgttctgtcaggtcgtgtataatagcgttgtcgcttgtttatgggtagtagcagcgagtcagctgtcagcacgccttacacctccctcgtgttgtaattcccgtcacctgtgctgagagtgtgcacaatatatcgtcgtctgttgtccaaagttttgggtcatggacgggtttggtgatttgagttgatttattagagaagcaatgtgttgttcgattttgagctttatggctgtgcacctctg

SEQ ID NO: 201054 - DNA, 2933 bp, Zea Mays
ctgcttttgattcacgttaaattgcttcataatttgtatgcaactgctagtgcccgttctgatggcctccttttgctttgtggtggaagggatgccaatagtgtgccactatcaagtgcatatgggcttgctaagcatagagatggacgctgggagtgggcaattgcccctggtgtgtctccatcacccagatatcaacatgcagctgtttttgtcaatgcacggcttcatgtctcaggaggggctcttgggggtggtcgcatggtagaagactcctcaagcgttgcagtattggacactgctgctggagtttggtgtgataccaaatcagtagttacaactccaaggacaggaaggtatagtgcagatgcagcaggtggtgatgcttctgtagagcttacacggcggtgcaggcacgcagctgccgcggttggtgatttgatatttgtgtatggaggtttacgtggaggtgtgctgttagatgacctcctagttgctgaagatcttgctgctgctgaaacaaccagtgcagctaatcatgcagcagcagcagctgctgcatcctcaaatgtacaaagagaaccgggtagatatgcctacaacgatgaacaatcaggacaaacagttacagtttcaagtcctgatggagctgttgttcttgggactccagttgctcctccagtcaatggggacatgtatactgatattagtcctgagaatgccattatccagggacagagaagattgagcaaaggtgttgattacttggttgaagcatcagctgcagaggctgaggcaatcagtgctactttagctgctgtaaaggctaggcaagttaacggtgagatggagcattcacctgacagggaacaatctccagatgctgcaccaagtgccaagcaaaattcaagccttataaaaccagatcctgctcttatgaacaattcaacaccaccacctggggttcggttgcaccatagagcagttgtggtagcagcagaaactggaggtgccttaggtggcatggttagacagctctcgattgaccagtttgagaatgaaggtagaagggtcatttatggcacccctgagaatgcaactgcggcaaggaaattgctggatcgacaaatgtctattaatagcgtgcccaaaaaggtaattgcttctctgctgaaacctcgtggttggaagccccctgtgcgaaggcagttctttcttgactgcaatgagattgcagatctatgtgataatgctgaaagaatattttcaagtgaacctagtgtcttacagcttaaggctcccattaagatatttggtgatctgcacggtcaatttggtgacctcatgcgcttgtttgatgaatacggtgctccttcaactgctggagacattgcttacatcgattatcttttcttgggagattatgtcgatcgtggtcagcatagtctggagacaatcagtcttctccttgcactgaaggttgaatatcctcacaatgtacacttaatccgagggaatcatgaagcagcggatatcaatgctctatttgggttccgaatcgagtgcatagaaagaatgggtgagcgggatggaatctggacctggcaccgtgtgaacaggttatttaattggcttcctttggctgcactaatagaaaagaagataatctgtatgcacggtggtattggtcggtccatcaaccatatagagcaaatagaaaatcttcatagaccaattaccatggaagcaggctcagttgttctgatggatcttctatggtctgatccgactgagaacgatagtgtagagggtctcaggccaaatgcacggggccctggtcttgttaccttcgggcccgacagagttatggagttctgcaacaacaatgacctgcagttgattgtgcgagcacacgagtgcgtgatggatggcttcgagcgtttcgctcaaggtcacctgatcactcttttctcagcgacaaattactgcggaacggcaaacaacgcaggagcgatcttagttctcggaagggatctggtcgttgttccaaagctcatccatcctttgccgcctgccattacgtcacctgagacctcaccagagcaccacattgaggacacatggatgcaggagttgaatgccaatagaccgccaacaccaaccaggggccgccctcaagcgcccaataacgaccgaggctctgttgcttggatatagcggcctggccatattatgaaacagtcagatttctcgcctcccaccagtggcttgaggcttatattatccatccatcttgggcacatgcaggcggtctgtgctgaaagcacatgcttagcccaaaacaacatcgaaagggaactgttcagggagcgagactaagcggtgctctgaagacagaaggccagagaagactcaccagtcaccgtcgacagtgctctccaaatccttcccctccaaatgacatgagaagtagaagaacagaaccaagtgttggcaaaccacagggtcttgcctgaggtcacgcctgtacatactcagatgccagcagataggcggggttgtgtactgtgttctttttgtcgagcgtccaaagtggtagcagcagtccattgtgctaggtattcatttgctgtagggtttttgtttcttgtccctcatgttgcagagtatggaagtgataaaaatgggtcgttctgtcaggtcgtgtataatagcgttgtcgcttgtttatgggtagtagcagcgagtcagctgtcagcacgccttacacctccctcgtgttgtaattcccgtcacctgtgctgagagtgtgcacaatatatcgtcgtctgttgtccaaagttttgggtcatggacgggtttggtgatttgagttgatttattagagaagcaatgtgttgttcgattttgagctttatggctgtgcacctctg

SEQ ID NO: 201055 - DNA, 2965 bp, Zea Mays
gaaaaactgttggaagatgaaaagatatagagagggatttttctctctccaaatgatgatttagagagtatgcaactgctagtgcccgttctgatggcctccttttgctttgtggtggaagggatgccaatagtgtgccactatcaagtgcatatgggcttgctaagcatagagatggacgctgggagtgggcaattgcccctggtgtgtctccatcacccagatatcaacatgcagctgtttttgtcaatgcacggcttcatgtctcaggaggggctcttgggggtggtcgcatggtagaagactcctcaagcgttgcagtattggacactgctgctggagtttggtgtgataccaaatcagtagttacaactccaaggacaggaaggtatagtgcagatgcagcaggtggtgatgcttctgtagagcttacacggcggtgcaggcacgcagctgccgcggttggtgatttgatatttgtgtatggaggtttacgtggaggtgtgctgttagatgacctcctagttgctgaagatcttgctgctgctgaaacaaccagtgcagctaatcatgcagcagcagcagctgctgcatcctcaaatgtacaaagagaaccgggtagatatgcctacaacgatgaacaatcaggacaaacagttacagtttcaagtcctgatggagctgttgttcttgggactccagttgctcctccagtcaatggggacatgtatactgatattagtcctgagaatgccattatccagggacagagaagattgagcaaaggtgttgattacttggttgaagcatcagctgcagaggctgaggcaatcagtgctactttagctgctgtaaaggctaggcaagttaacggtgagatggagcattcacctgacagggaacaatctccagatgctgcaccaagtgccaagcaaaattcaagccttataaaaccagatcctgctcttatgaacaattcaacaccaccacctggggttcggttgcaccatagagcagttgtggtagcagcagaaactggaggtgccttaggtggcatggttagacagctctcgattgaccagtttgagaatgaaggtagaagggtcatttatggcacccctgagaatgcaactgcggcaaggaaattgctggatcgacaaatgtctattaatagcgtgcccaaaaaggtaattgcttctctgctgaaacctcgtggttggaagccccctgtgcgaaggcagttctttcttgactgcaatgagattgcagatctatgtgataatgctgaaagaatattttcaagtgaacctagtgtcttacagcttaaggctcccattaagatatttggtgatctgcacggtcaatttggtgacctcatgcgcttgtttgatgaatacggtgctccttcaactgctggagacattgcttacatcgattatcttttcttgggagattatgtcgatcgtggtcagcatagtctggagacaatcagtcttctccttgcactgaaggttgaatatcctcacaatgtacacttaatccgagggaatcatgaagcagcggatatcaatgctctatttgggttccgaatcgagtgcatagaaagaatgggtgagcgggatggaatctggacctggcaccgtgtgaacaggttatttaattggcttcctttggctgcactaatagaaaagaagataatctgtatgcacggtggtattggtcggtccatcaaccatatagagcaaatagaaaatcttcatagaccaattaccatggaagcaggctcagttgttctgatggatcttctatggtctgatccgactgagaacgatagtgtagagggtctcaggccaaatgcacggggccctggtcttgttaccttcgggcccgacagagttatggagttctgcaacaacaatgacctgcagttgattgtgcgagcacacgagtgcgtgatggatggcttcgagcgtttcgctcaaggtcacctgatcactcttttctcagcgacaaattactgcggaacggcaaacaacgcaggagcgatcttagttctcggaagggatctggtcgttgttccaaagctcatccatcctttgccgcctgccattacgtcacctgagacctcaccagagcaccacattgaggacacatggatgcaggagttgaatgccaatagaccgccaacaccaaccaggggccgccctcaagcgcccaataacgaccgaggctctgttgcttggatatagcggcctggccatattatgaaacagtcagatttctcgcctcccaccagtggcttgaggcttatattatccatccatcttgggcacatgcaggcggtctgtgctgaaagcacatgcttagcccaaaacaacatcgaaagggaactgttcagggagcgagactaagcggtgctctgaagacagaaggccagagaagactcaccagtcaccgtcgacagtgctctccaaatccttcccctccaaatgacatgagaagtagaagaacagaaccaagtgttggcaaaccacagggtcttgcctgaggtcacgcctgtacatactcagatgccagcagataggcggggttgtgtactgtgttctttttgtcgagcgtccaaagtggtagcagcagtccattgtgctaggtattcatttgctgtagggtttttgtttcttgtccctcatgttgcagagtatggaagtgataaaaatgggtcgttctgtcaggtcgtgtataatagcgttgtcgcttgtttatgggtagtagcagcgagtcagctgtcagcacgccttacacctccctcgtgttgtaattcccgtcacctgtgctgagagtgtgcacaatatatcgtcgtctgttgtccaaagttttgggtcatggacgggtttggtgatttgagttgatttattagagaagcaatgtgttgttcgattttgagctttatggctgtgcacctctg

SEQ ID NO: 201056 - DNA, 2147 bp, Zea Mays
gtcagcgtccattctccatggccatcgtcgtcgtcgtcttccacaatccaatcggccggccggctgcacgcacgcatcctccgcctgccgcacccgccaccgcaagaagagggttcaaaatactcaagatggctccgccggcacggccgccacgtgctggggaggacttggaggagggcacaggcgagagctccccacctcctcggtcgccacgtgcgtccaaccccgactgccacgaggtgcagaggaagatctgcgagcgcctccgccagacggggcggcacgaccgtacgctcgccgaccccaccttcaacgcccgcttcgcccgccacctcgagaggttgccgcggaggtacctactcgacctcgacctggacgacaagctcgaggatgtcttgctgcactgggggattctcgacgagtgcgccgaccccaataagcgacccgtctttcgcgcgcggttcataaagtataagacagttcctagggaggatgacggcattggtcatgatcaagatcacgaggagccgtgtcaaaagttgttggaggacctcagtttggaaagaagaaagatcgcggacagaaatgattccctgtctatctcctctaggggcgatttgaaaactgtcctccttcatgagatcattttctcctccatcgacaagcccaagctcctaagtcggctaactgcgttgctctctgaggttggactgaatatccaggaagctcatgtgtactccacgaaggatggtttttgtttggatgtttttgttgttgatggctggaagacagaggagactgatgagctgatcgcggcgattaaggagacattaacacaaaaaaatgcatcaccatctaattcaacaaattcttcgacgccggagaaaatagttgacctacaacaacaggttggagattatgaaattgacttaagcatgctaactaggggggacaagatcgcatctggatcatccgcagactttggtgttaatcatgaaaatattctgcaattttatggggcatgcacaaaacatccaaactattgcattgtaacagaatacatgcctggagggaatatatatgactttcttcacaagcaaaataacttcttggacctccataaaattctaagatttgctatcgatatctcaaaaggaatggattatctgcaccagaataacattatacacagagatttgaagtctgcaaatcttctgctaggccatgaccaagttgttaagatcgcagactttggtgtggcgcgacatggaagtcagcaggggcagatgactgctgaaactggaacctaccgatggatggcaccagagataattaatcataagccgtatgaccacaaagcggatgtattcagctttgccattgttctttgggagctggcaacttcaatggtcccatatgacaacatgacacccttgcaagctgcattaggagtaagacagggattgcgcttggacattccgggcagcgtgcacccaagattgaccaagctgattcgacagtgctggaacgaagatcctgatgcgcgtctgacttttgcagagattactaaagaactccaagatagtctacaccatatcgaggcacccaagggagccagccgtcgatctagagcaaagatgcagaagaaataagagggcaaggtttcctacttttttttgggtgtgttacactagttgcagtatgagtgtttaaggtgtatgtcgcggttataaatattttaaggccaaggaagtgttaaaaaccgaccttagctcagttggtagagcggaggactgtagtggattgcagatgaaatccttaggtcgctggttcgaatccggcaggtcggagttgtttttaaaataacatttttttgctcaacaatgttaggctactcgcctactcacctgtcgctactctgtactcactacggttaaagtcgtgctctttttcttaacatttttacaaatgtcattttgcacaaaaaaaggaaaaaggggatgcatatgtggtcacattattatttgcataaaagccatgcagatcaatattcaggaacagaaaggccaaacgcctgcgaaagttgttgtgagagaccgttgcttaataaaaggcaaaacagaatgtaactatcccgtgaacaaaaa

SEQ ID NO: 201057 - DNA, 3126 bp, Zea Mays
atggaaattttggagcattggtttgtattttcttggatacatcaaaaacacaattgggcatggaagcttagaggaaagcgaatgagtggacacatccacaagagcttcaggttaactggtcaaaattgtaagttgggcatcgtagcaaacctgttagcatgtaatgcatggatcgatagattgggcaaggatggaagatatagggaggcagaaaagctcttcagagggatggcagacagaggtctagatccaaatgaggtgacctatgctatactgatacattccttgtgcaagaggggtatgatggaagatgcactttgcatgtttgataggatgagggagaagggaatcagaatgactgtttatccatacaactctttaattaatggttactgcaaacacaacaattttcatcaggcaagaggtcttttgaatgagatggttgcgaagggattgacaccaagtccagcatcatattcccctcttatagctggtttatgtaggaaaggggatctggccagtgcaatggagctccacagggagatgaccaggaatgctgtttcagggaatgtatatacatttacagctcttatcagtggtttctgcaaggatggaaatatggatgaagcaactaggttgtttcataaaatgatggagagttccctagtgccaaatgaagtgacttttaatgttatgatagaagggtattgccgtgtaggcaatattaggaaggcattccagttatatgatcagatgctagatagaggcctaacacctgacaattacacttacaggtcactgataagtgtagtttgtttgacgctaggtgccatgaaagctaaggaatttgttgctgatctagaaaacaactgtgctgtgctaaatagttttagccttacagcacttatgcatggattctgcaaagaaggaaggttaactgaaacgtaccaagtttgggatgatatgagagctcggggagtctagcttgatcttatcagtttaagtaattgcataagcagctcagaactgcatgacagggagaaaatactcttgttatttggggaaatgaaagcaaaaggtgtcaagccagacaatgtgtttcatacatgcatgattcatgtgcactcaaaggaagaaaatatagttcaagctttaaactgctgggataagatgatagatgacggatgctctccaaatgttatcacatatacagttttaattaatcatctatgtaagtctggatatttgagcagcgcagagatcctctgtaaagaaatgttagctggacacttccttcctaatagctatacttataattgctttcttgattatctggcaaatgaaggagagctcgaaaaggctaaagttctacacgcagccatgcttgaaggctgtttagctaacacagtgacatttaacacattgatcaaagggttctgtatggctgggcagatccaaggggcaattgaccttatgcagaagaatactgagagtggtttctttcctgattgcatcagctattctacaataataaatgagctctgtaaggttggtgacaccaataaagcatttgagctttggaatgaaatgttatacaaaggactgaaacctgatattgtggcatacactattttgattcgctggtgcaacattcatggtgaatttgataagggcttaggaatttacagtgatatggttaaaaatggtgtgcgaccaaactgggacacatatagagctcttttcttaggagcttctttgatgaccacaaatggaagaactttactattgaccacctgatgttagggcaatatctgttctcatctactggaataggctgaatcaagacggatgcaagatgcaaaaatcaatctgaccctgaactgttgcttcatatgcaagtggctataagcctaaaacatacgcatgcatatctgcatattggcttttttctatgcttgagaagatggattccagtctgaggtcaatttaaagtatgaatattatacaatcacaaagggtcaggaagaaaagtgatcgaaaacttcatcaaatttatgctgctgaacttgcaaatatagattttgcatatggtggtggctgtgtaggtgacagtgttgccagagtacccagaggtttacaacatagtaaacaagctgagggtggagtcagtggttgctgttgaaggtgtgatccagccacgcccggtggatgccatcaatgcagatatgaggaccgggactatagaggttgtggcacatcatgttctagtgctgaactcagtaacccggtcactgccgtttccagttacaatttctgatactgtaaaagagaagtttccagaagaaattagattgagttgaatactgtaggtttagaatgttgggacttgtgtcgtccacaaatgcagtcaaatttgcggttgcgccataatgttgttaaactcatacgccgctacttggaggatgaacatgaatttgttgaggttacatgttccaaggtagattgagactcctgttttgtccaagtctacacctgaaggtgctcgggagtcgggactatcttgtaccatcgagagttcaggaggcattgcctatggattggatcggttggtgatgcttttggcgggtgagagctcgatccgagatgtgattgctttccccaagaccacgactgctcagtgtgcactcaccgaagcaccatcagctgtagaaccacagcaactgaaggatctcgccttccccaaacctacttcgtgagacgctgttcatgtgttcatgacaaaaattccgtgctctcaaggacagctatagtttgcttcttctagtttttgagtgtattggcctattctatttttgcatagtatagaatgcacagtttttggaccgtgaatccgtgataaatttgtagaagatgcttaacatgccaaagttctggaagagtattgttttaatagcggtgcttatgtgtttgtgcttgtgcacaaacttacctggcatattattcaacagaatccattttccaaggctagctagctgagtcgctagctactccttttccgtatatatgaggccttgcaaacgcgactcaacgccttagatgtagagatggcaatgagtaccggatgtt

SEQ ID NO: 201058 - DNA, 3054 bp, Zea Mays
aaaacgtggcgggcttcaccgggcccgggccgggctgccggtttggccatctctacccacatctgctgcagactcgaggcgatcgaagcgtcattggcggcggctgcggcaatggcggggctgtcgctactgtgcggtgactgcggcgcgcagctgcgtagtgtggaggaggcgcaggcgcacgccgaggccaccaaccacgccaacttcgtcgagtccaccgaggccgtcctcaacttcgtctgctccgactgcggcaagccatgccgctcccagaccgaggtggacctgcacaccaagcgcacgggccatacggagttcgcggacaagaccgcggaggcagccaaacccatcgatctcgaggcgccgcttaagccggcctccgaggatgtcatggacgtagacacgtcggcttcggcgagtggggagccacaagagatggttgtcccggaggtgaacaaggagatgctcacggaccttgagggcatgggtttctcgacagcgcgcgccaccagggtgcttcacttctccggtaccagccaactcaaaaacggaggataacaagcccagcctgactcctgaggaaatgaagattaaagcacaggagctaagggatcgtgctcgtaaaaagaaagaggaagaagagagaagaatggaaagagaaagggagaaggaaagaatacgaattggaaaagaacttctggaagccaaaagaattgaggagcaaaatgaaaggaaacgcatgatagaactgcgaaaacttgagaaagaggaggagaaaagagctagagaaaaaatccgccagaagttagaagaagataaggctgaaaggagaaggaaactaggactgccaccagaagacccagcagctgccaaaccaagtgcaccgcttcctgttgaagagaagaagagtgcattgcctgtccggccagctacaaaggctgagaggatgagggattgcctaagaaatcttaagcaacagaacaaggatgatgatgccaaagtgaagagggcatttcaaacactccttacttacattggaaacgttgctaaaaatcctgacgaggagaaatttagaaagatcaggctaaccaatgctacatttcaggagagggttggaaatttgcatgtgggcatagagttcctggagctctgcggatttgagaaacttgaagggaacgagtacttgtttttggcaagggaaaaagtcgacaaggctatcctgaacacagctggagccgagctgaattctgccatcaccaatcctttctttggggtcctttgagtcgtaaaaaaccagtacaatgtatactcaaaactcttggtttctcactttgtttgacatcaactgggcgccaactgtagatttgtaagtctgtggtcggtatctgatttcatgaattattattgttgcatacagactagtacttgcgtgcatcgctgaggcaatatatcttccattctgttttcatcgctctcccggcctccctgcattttacaatgctctagcaccaaaaacaagagcggatgtactttgatgcattttacagcaacttcaatcaattcttagttatatgctagtacagtacaacatatcatctgaggacggagagagtcggcgaatcccccagtcatcatctttaatcaaagctgaacctggcgcccgtgaatccagctgaatggcgcgaactccggatccttggccttgttgtcgtgcgccctctcctccagcctcctgaaccggggccccagctcgcacacgaactcctgcgcgcggcggccttccccggacagccccgtgagttcctggacgccccaccggcggaccaggaactcgaggatgtcgacgtagtccctggccgtgtagacaccgatgcgctgcgcgacagcgctgaagcgcgcgaacagcccgtcgtcctggccgtcgtacatgaggtgggcgggcatggccaccttcttcctcatggtgtccgcgaaggcgcgcaccgtgtagtccgggtccacctcgaacagcttctcgacgatccgctcgtacgccgactcgtggcgcttctcgtcggcggcgattgtgccgcagatctgcgccagcttggtgtcgccgtaccgcctggcgtggcgcgccgtgttgccgtgggagatgaaggtggcgcgctcctggaacgacgtgtagacgaagcccatgtacgggttcgtctccgtcttgggatcctgcatttgtttgtacgtacgtcatgcgtgcgtacgttcatgcatcaaccacccatcatttaaaggaagaggtatttgttcatgaggtcgccgtgcctgttctcctcggcggcccacgccctggtccacaccgcccagctggtcgagctggcgccggtctcgtcgcggacgccgccgtccagggtgttgagcatggtctggtacgtcggcagcgcctcctcggtgaccatgtcgcccacgaagcagacgaagtagtcgtcggggatctcccgggcgcgctctcgcagctcccggacctcgtcgtcgaaggactcggaggcggcgtccggcaggtagtcctgcggctgccaggacctctccacgggcttgaggagcaccaggatgttgtccgccgcccacgactcgagcgactcgaagatctcccgcttctgcgggggcagcgagtgcgccacggggcggtgtacctcgcgaggaggggcgaagggcttcctgctgggagctctcacccttcattcatcatcagcatcatcgcaagattatcacaaagctaaaggaaattcaattgaggcaccgcaagattcagaggaggacaaggcagagctcacggggctgcggaagccatggccaccaccgaggagaaggctctccttgtactcactaggcaaggaggggcgaaggcgccgcaggaagggaacgccgccaccgccatgcccgccgccacttgtaatctccgcgatgctctagctagctacagtacataacaatgcaatgagcgagcgaccggcaattcaaactccaatgccgtatgtaatcggtaagtaaagtacctgatcattaagtagctga

SEQ ID NO: 201059 - DNA, 876 bp, Zea Mays
ataacttgcagagttatggcctcaaggtttcatggatagtgttggaatcaaagatgccatttatagatgaaaggagcgaagaagattatactacagccagcaaaagcgaagagagaatgaaaaggaagaggctggctgcagcagcaaagctggaagatggcttcccagttgtaatgcgagctggtgttgccccacaagtttcacaaccacccataacaaacaacatcacataccagattatggacagaaccaggggtttaaattttttgacagggctcgtgaaacgagctccagtggaattcctgatgacggcaacagaaatattggcgagatcaagaagaaaagaaaacctgaatacgatgttgtagatacacaagctaacctaccaaaggctcccttaccgcatgggagagaagcaaaagccttctaagcctgctgacgaggccagtgctggtagcctgccctccacgtcgacaactcaaactgtgcttggcctaccctaccatcggtgcttggtcataaccaacaacctaactgatcatttcggcatattgttggacatttggttatccttataggctcttttcagctgctgtacaaaattatggcatttccatgtgttcagcatccatggtcaaggccatcacctttccgagtcgagaggatatttgaccatttgcaattttctagcattgcttggttcctttggccaggttatctgtgccacgctgataaatatggtcagatgcagatttgcacccctacaaatatcggttgtaattatgaatcgtttctgagacatgcgttcatattgtgcgatttaaaatctcattcagcgaggtgcagatttaatatcattgacaaccgcacaaaaca

SEQ ID NO: 201060 - DNA, 934 bp, Zea Mays
accccagaggcaccggggtccggggcatagaggcatcataagacgggacaataacttgcagagttatggcctcaaggtttcatggatagtgttggaatcaaagatgccatttatagatgaaaggagcgaagaagattatactacagccagcaaaaggttcgcagcgaagagagaatgaaaaggaagaggctggctgcagcagcaaagctggaagatggcttcccagttgtaatgcgagctggtgttgccccacaagtttcacaaccacccataacaaacaacatcacataccagattatggacagaaccaggggtttaaattttttgacagggctcgtgaaacgagctccagtggaattcctgatgacggcaacagaaatattggcgagatcaagaagaaaagaaaacctgaatacgatgttgtagatacacaagctaacctaccaaaggctcccttaccgcatgggagagaagcaaaagccttctaagcctgctgacgaggccagtgctggtagcctgccctccacgtcgacaactcaaactgtgcttggcctaccctaccatcggtgcttggtcataaccaacaacctaactgatcatttcggcatattgttggacatttggttatccttataggctcttttcagctgctgtacaaaattatggcatttccatgtgttcagcatccatggtcaaggccatcacctttccgagtcgagaggatatttgaccatttgcaattttctagcattgcttggttcctttggccaggttatctgtgccacgctgataaatatggtcagatgcagatttgcacccctacaaatatcggttgtaattatgaatcgtttctgagacatgcgttcatattgtgcgatttaaaatctcattcagcgaggtgcagatttaatatcattgacaaccgcacaaaaca

SEQ ID NO: 201061 - DNA, 2946 bp, Zea Mays
acagaaaaactacacagagtgaaatttcggaagcacgcagacccggtcggatccaccggcccgcggaacggatcgaggccaccggcatcctccgcttgcgtcgcattgcggcgccgagctcgaaacccctggatcggttgcagctttcccactgcccccgcccgataacgcggcggtagggtggtggcctgtcgatctcgcggcgggagccggctaactacctgccgttttgtggatttgtgtgcgtgcttgattttggtgcgtgtggtggcgtggagtcgccggcgggggggggggggagctagggttttggtttgggctttcgggatgacgcgccgggtgcggcggcggacgtgcagggaacgggagggtagggtggtgcggggcgcgtggtgtgttgtttcggcgaggccggaaggcgaggacgatgcggcagcggtggaggtggactggagggcgctgccggacgacacggtgctgcagcttttcgcgcggctgaactaccgcgaccgcgccagcatggcctcagcgtgccgggcttggcgagcgctgggctcgtcatcctgcctgtggagcacgctcgacctccgtgcacaccgctacgaccgggaggtggcgtcatcgcttgcctcgcggtgcgggagccttcgtcggttacgcctgcgcggccacgaggcagcagaggccgtcccggccctctgcgcgcatggtctccgcgaggtggtggccgatggctgccgcggcctcacggatgccacgctcgctgtcctcgccgcgcggcatgaggacctccagagcctccagatcgggcccgatcctctcgagcgcatatccagtgacgccctccgccacgtcgctctttgttgctcccaactccgccgcctgcgcctctcgggtctccgtgaagctgacgcggatgccgtcggagcgctcgcccgctgctgccccctcctcgaggacgtggctttcctcgattgcggcaccgtggatgagaccgctcttgctggtatccactctctccgcttcctctctgtagcaggatgccggaacctgaaatgggctactgcatccacctcctggactcagctttcctcccttattgcccttgacgtctcccgcacggatgtttcaccaagtgctgtttcacggctcatttcccatgccaaaaccctcaagcttatatgcacgctgaactgtatttctgttgaggaggaacagcttcataatcctgctgtttttagtaactctaagggcaaggtcgtgctaacgattaacagtgacatctttagatcttttgagaccatgtttccaattgtggatgctaaagagcacggggttttccatcagtgtaactggagtcacaaagacaagatagctggtgatataacaacatggctcgagtggatcctgtcacagtcacttctccgaattgcagagtccaacccacaaggcatggatggtttttggctgcagaagggcaccacactgctgcttagactattgaagagtttgcaggaggatgtgcaggagcgggcagccactgcacttgctacgtttgtagttatggatgacgagactgcaaatgtggatcctgcaaggtcggaggcggtgatgcagaatgggggcatccgaatgttgctggaccttgcaaggtgctcaagggagagcgcacagtctgaagcagcaaaagctattgccaacttgtcagtgaataccaaggttgccaaggcagttgcagatgaaggcggcattacaatactcactgatttagccaagtcgatgaataggcttgttgctgaagaggctgctggtggcctttggaatctctctgtaggcgaggaccacaaggcgtctattgcagtatctggtggtatcaaggccctggtagatctaatatttcgttggcctgctggaaccgatggagttcttgaacgtgctgctggtgcgcttgcaaacctggctgccgacgacaagtgtagcttggaagttgcaaaggctggtggtgtccatgctttggttacacttgctcgatcatgtaaacttgatggcgccctagaacaggctgcaagaggtctagctaacttagctgcacatggggacaacaatgacaacaatgctgctgtaggtcaggaagctggggctctggaggcactagtgcaactaacaggttctcaaaacgagggtgtaagacaagaagctgctggtgctttgtggaacctgtcatttgatgacagaaaccgtgaagccattgctgcagtgggtggcgttgaagctttggttgccctagtgcaacaatgtttgaatgcttcagaaggccttcaggagagagctgctggtgcattatggggattatctgtttcagaagctaatagcattgcaattgggcagggtggtggggttgcacctttgctcacattggcacgctcagaggttgaagatgttcatgagacagctgcaggggcactatggaatcttgctttttattctggtaatgctctccgcatagtcgaagaaggtggggtgcctgttcttgtaaaaatttgctcatcatcagggtccaagatggcacgcttcatgtctgcactagcactagcatatatgtttgatggaagaatggatgaagttgctttggttggagcatcctcagctagcagttccaagagtgttaatattgaaggagctagaagaatagcatttaagcatatagagacctttgtgctcactttctcagatccacaaatgttctctacggctgctgcctcctcagccccggcagcgctgtctcatgttgctgaagcagtgtttatacaggaagctggacacctgagatgcagtcgctctgagattggtagatttgttgtcatgcttcggaatccttcaccaattcttcgtgcttgtgctgcctttgcccttcttcagggtgctgcaaattcctccgagcaagcc

SEQ ID NO: 201062 - DNA, 3694 bp, Zea Mays
attgcctgcccctccatccacctatggcagcgccaagcaaaccagagagatgcagacgtgatcgcaagcgcagtgatccgttgttggtttcgcttacaagatccagcttccagttccagccagccattactcatctaacatcaccatggcgtaccttcggaacaagtcgatggagttcctcaagcggttcgaggtgccggccaagaacccgtccgaggacgcgcagcgccggtggcgggaggccgtcggcacgctcgtcaagaaccgccgccgccgcttccgcatggtccccgacctcgacaagcgctcccaggtccaggcgcagcgccgcaacattcaggagaagcttcgtgttgcactctacgtgcagaaggctgcgctgcagttcatcgatgccgcccgcaagaccgagcacccgttgccggagatggcgcggcaacgcggcttctccgtgagcgcggaggagctggccgccgtggcgcgcaaccacgacgccaagagcctgaggcaccacaggggcgtcgacggcatcgcggcgaagctgaacgtctccctcgccgacggcgtcaggtcggacgaggcgggcgtccgggccgaggtctacggcgccaaccagtacaccgagaagccgccgaggacgttctggatgttcctctgggacgccagccaggacatgacgctcctgctgctcgccttctgcgcgttcatctccgtcgccatcgggctcgccaccgaggggtggcccagcggcatgtacgacggcctcggcatcgtgctcaccatcttcctcgtcgtcatgatcaccgcggctagcgactacaagcaatcgctgcagttccgggacctggacagggagaagaagaagattgacatacaggtcacccgtgacggctaccggcagaaggtgtccatttacgacatcgtcgtcggcgacattgtgcatctatctatcggcgaccaggtgccggcggacggcctgtacatcgacggctattcgctcgtggttgacgagtcaagcatgtccggcgagagcgagccggtgcacccgtctaccgcgaagccgttcctgctcggcgggaccaaagtgcaggatggatcggcgcggatgctggtcaccgcggtcgggatgcgcacggagtggggtaacctgatggagactctgagccagggcggcgaggacgagacgccgctgcaggtcaaacttaacggcgtggccaccatcatcggcaagatcggactggtgttcgcggtgctcacgttcaccgtgctcatggcgcggttcctagtggacaaggcacacgcgcccggcggcctgctgcagtggaggggagcggatgcgctctcgatactcaacttcttcgctgtcgcggtcaccatcattgtcgtcgccgtgcccgaggggctgccgctcgccgtcactctcagcctggcgttcgccatgaagaagctcatgcaggagcgcgcgctcgtgaggcacctgtcggcgtgcgagaccatggggtcggcgagctgtatctgcacggacaagaccggtacgctcaccacgaaccacatggtcgtcgagaaggtctgggcgtccggggcggcgcagacggtgagcaccgccaagggtttcgacgagctccggtcgtcggtgtcggagaacttcacgagggtgctcctggagggcgtcttccactgctccggctctgaggtcgtcacgggcaaggacggaaggactagcgtcatgggcacgcccaccgagacggccatcctggagttcggtctcgaggtggagaagtacatgggggtggagcacgccggcgccaagaagctcaaggtggagcccttcaactcggtgaagaagaccatggccgtggtcatcgcgtccccgaacagcgccggccacccgcgcgcgttcctcaagggtgcgtccgaggtggtcctgagccggtgcagctccgtcatcgacggcaccgggagcgtggagaagctcacggaggcgaaggcgaagcgcgtgggcagcgccatcgacgcgttcgcgtgcgaggcgctgcgcacgctctgcctggcgtaccaggacgtcggcggcgctggcgacgtccccggcgacgggtacacgctcatcgcggtgttcggcatcaaggacccgctccggccgggcgtgagggaggccgtgaggacgtgccacgatgcgggcatcaacgtccgcatggtcaccggcgacaacatcaacacggcgaaggcgatcgcgagggagtgtggcatcctgaccgatgacggcgtcgccatcgagggccccgagttccgggcgaagagacccaacgagatgagagagctcatacccaaaatccaggcacgtagctggagtaatgtgatggctcggtcgttgccactggacaagcacacgctggtgacgaacctgaggggcatgttcaacgaagtggtggcggtgaccggcgacggcaccaacgacgcgccggcgttgcacgaggccgacatcggcctcgccatgggcattgcaggaacagaggttgccaaggagaacgccgacgtgatcatcatggatgacaacttctccaccatcatcaacgtcgccaaatggggccggtccgtatacatcaacatccagaagttcgtgcagttccagctcacggtgaacgtcgttgccctgatggtcaacttcgtctctgcatccttcacaggaagcgcccccctgaccatcgtgcagctgctgtgggtgaacctgatcatggacaccctgggcgccctggcgctggcgacggagccccccaacgacgccatgatgcggaggccgccggtcggccgaggcgacaacttcatcaccaaggtgatgtggcggaacatcgtcggccagagcatctaccagctcgtcgttctcggcgtcctcatcttcaagggcaagagccttctccggctgaacggcggcggggatctgtccgacgcccagctcaacacgttcctattcaacacattcgtgttctgccaggtcttcaacgaggtcaacagccgggagatggagaagatcaacgtgttcagcggcatcttcagcagctggatcttctcggcggtcgccggcgccaccgccgcgttccaggtcatcatcgtggagctcctggggactttcgcgagcacggtgcacctgagcgggaggctctggctcgccagcgtgctcatcggctcggtcagcctgttgatcggtgccgtcctgaagctcatccccgtgggttccggcagcgacgactcgtcgtctgccgatcgccacgatgggtaccagcccatccccaccggccccaacgccgtgtgatctccgtggagacgttctgccattcttccttctttttccttttgttgtttttattgttagaaacaagagaattgagccctcggatgcattttgatttgcagttttggacaaaaaaaaatattttagataggagtcgtccccaggaaattgatccgttttgtctttgtagccggcaatgtttctgaatgtagatgatagaatccaatgtatttagagaatccaatgatttataacctctctgcaaaatatcaaattttttggagcttgtttgaatttatttcttagggagttcagttgaaatctgtaacaaccggctgaggccggtttgatgacggctttggtcagtttttcaaagtcgctctggacgagctgtttttttagttggag

SEQ ID NO: 201063 - DNA, 1931 bp, Zea Mays
cgttgccactgttgccacgccacgcaggcggcagcgagcgcaataatgcgcacgcagaggagcacagcggcgtcactgctgcggcagtaatggccgcctggttctcccacggcgtctactagcgatacaccgagaccacttttctcttgcttccttcgaccccgccccctccggcctccggatcgcgcaccgcgcctgccctccacccaaaaccgctccggagcctttgcgaagcggcgccgcttactggccggcaaggcgaccccgtctctcggcggcctgcgttgatctggttgctgctgttgaggtgggcagagcggcggccgcgatgggcatctcggcgaggtggctcaagtcattagttgggctgaggaaggtggagcagcagccgcgtaaggagagtgcagatgttggacgaatgtttcattttcagaatcagcgctctcaagatgacagcagcattgctgcacaagaagaaattccagaggttccttatggaaatgatccacctgaagatgattctaatgcaccttcatgcttggaacccacttatagttcagctgatgtgccactgtttcaaactgaagaggaactgaaagagatctgggctgctacaattattcagacaacattcagagctttcctggctaggagagcccatcgagctttaaaagggttggttaggcttcaagcccttgtaagaggtcacatagtaagaaagcaagctgatacgacactccgttgtatgcaagctttggtcagggttcaggcccgtgttagagcaaggcgagttcgcatggctttggaaaaccagactgatcagcaaaatacttcaccagagcacacgaccgtggcacgtgtcagagaaattgaggatggctggtgtgatagtattggttctgtggaagatatccaagcaaaacttttaaagaggcaggaagcagcagctaaacgtgagcgagccatggcctatgctctagctcatcagtggcaagcaagttcaagacaaattacagcatttgagcctgacaagaacagctggggctggaattggctggagagatggatggctgttcggccatgggagagtcggttccttggcacttacactgcagatgggattttcgtagtcaatgaaaccaagcaacctgacagaagtgcaaccaagaccccctacagaaaacctgttaaaaagcatgattcaacccttcaatcaaacatgttgaaccagaagggcttcccatcaaactcagagggtgttggctcctcggcaaaccgacccagtggtttggtatctactaaatctagactcaaggttttacccagagaaggtcctgaggaagccccatctcgtccttcgccacttgtgcggtccgctagtaatccgaaggagaggacttccggttcagaagctggtagacacctgacaaagaaaggcacagttaaccgatccctgaaggccacaaaagattcccacatgctggggtcaagacatcatcttgccagttgcattgatccagttcccactagagttgagctggagacttagaaggcatgtgatgcttgaacatcgccatggattgcacttagcatagcaagtagcaacttggatgccattcatgtctgcatggctgcatcgtttgtactggcggcagcggcttctttcaacaccgaatatgcacgtcagcatgtccatacatgctgaggttaccccattgggcctttgagatgtaaattatgtcgttcagtcgagtggtatgcttatcatgtgtttatcggtgtatgatgttggtatagttgtaacttggaaggctaagcgaagttgtactgttgtatttggtattgccgtattgatatatagattgcacatgcgtcttgcagttgaatttctaccattttagacaaaatttgctaaaaaaacattgggtgcg

SEQ ID NO: 201064 - DNA, 1595 bp, Zea Mays
aaaggacatacgtactgcgaagtaaccctaacgcctggtgccagccgccgcgctctcgctcgctctaacgccgacgcctggtgccgactgccgaggccttcgctggttactagcaccgccccagctccttctcccttttccggcggaggtgaacaccgccaccactagagcgccacgatgaggccgatcctgatgaagggccacgagcgcccgctgacgttcctgcgctacaaccgcgacggggacctcctgttctcctgcgctaaggaccacacccccacggtctggtacgccgacaacggcgatcgcctcggcacctaccgcggccacaacggcgccgtctggacctgcgacgtctcccgcgactcggcgcgcctcattaccggatccgccgaccagaccgcaaagctatgggaggtcagcacggggaaggagctcttcagctttcgtttcgacgcgcccgccaggtccgtcgagttcgccatcggggacgcgctcgccgtcgtcaccaccgacaacttcatggaccacgttcccaccgttcaggtcaagcgcatcgccgaggacatcgacgaccagacggaggagtctgcactcgtcatcaccggcatcaagggaaggatcaacagggccgtttggggcccgctgaacaggaccattatcactgccggggaggatgccaccattcgcatctgggactcagagactggacagctgctgaaagagtctgataaagaatctggacatcagaagaccatttcatcgttgtcaaaatccttggactggtcgcattttatcactggctccttggataaatctgcaaagctatgggatacaagaacgctaaccctgatcaagacgtatgtcacagagagacctgttaatgctgttgacatctctcccactcatgatactgtggttctaggaggtggtcaggatgcaatgaatgtgactatgacagatcgccgtgctggtaaattcgaggctaaattctatcacaagattttgcaagaggaaattggtggtgttaaaggacattttgggccaattaatgctttggcatttaatcctgatgggcggagtttttcaagtggcggtgaagatggttatgtaaggctgcatcattttgattccgactacttcagcatcaagatgtagataaagaacaccagactaacccgaggtgctgctggttggccatgacgcacgcagagcaggctcagctcctctaggggtagtggcagtctgttgcttgttttaagacgatgttgctccggacaagcagctttgtcttctgcatgaggaatttgtgcacacatggcaatgaaaagatccttgaaccgctgtcttgagctgtcgttctcgatccatggtttccaatctagtttcgatttgtattctctgttcatctaattgttccaatacggtagtagacacatttcaaaacccgtgtttttttgtttgcttaaaaggcaaattttacttgagtatccatgtgcatacacgttcccaatgcgtatgcttgtgtactaacaaaaggagcttgtgtgtgcacacacgtgtttagagagtatgtccgtatatatagacacgac

SEQ ID NO: 201065 - DNA, 2172 bp, Zea Mays
ctgttctccaaccccacggcggccccggaccgcacccaatgtacgaacacctccccgcgttcccgatcgcgccggccgccgtcggcgactgccgcggcatccccttcgacccttcctttctcccgcgcctcctcctctccgccacctcctgcacctcccccttcctcgccgagcgcgcagtctccgccctccacgcgaccggtctcaagctcggcgcgctcccctcctccctcccggcctcgaacgccctcatctccgcctactcccaagcggacctcctcccctccgccctccgcgtcttctccctcctcagccacccctccaccgcctcctacaccaccgtcctctccgcgctctcccgccacggccgtccccacgaggcgatctccctcttcgccacctccgcgtccgcggtcgcccccgacgccgagctcctctcctgcctcgtctcatgctgccgccgcgcgtccgccttactccccgcgcgcgcggcgcacgcctacgggatcaagaacgtggcggcgctggccttctacgcctcggcaggtccggcgctggtcgccttgtacgcgagccgcgggaaggtcggtgcggctaggagggtgtttggctacatggacggcttggacgtggtgtcctggaacgccatgatcggcgggttcgctagtgccgggatggacgaggagtcgtgggcctgcttccgggagatgcactcgagaggtgttcgagggaatgcccgcacagctgtggtggtgctgggatcttgtgacatggagtccggcaggcaggtccatgggactatagtgagtagtcatggtggttcttcaaacgccattttgtggaacgcgttgatgagcatgtattcgcgtgccggctgtgtcactgatgcagagagggtgttcctggagattgtaaagaaggatgttgtgtcatggaatgtgatgatcggagcgtttgcgaagaatggatatggagaaagggcccttgaatttgtggacatggtgttgcagtgtggtatgaagccagactctgtgacattcacggccgttctcatggcatgctgccattgtggcttggttgatgaagggcttgtactattccagcgctttgtgtcagttgttgggctcgttccaactatggagcagtgtgcttgcattgtggacttgcttgcacgtgctgggaggtttctggaggccttggaatttatcggccagatgtcagtgagaccaaatacagttgtctggggtgctttgctgtctgcaagtaagatgcatcacaacgtggaatttgcaaagattgcatttgaacaactggttcaggtggagcctgagaatgctgggaattttgtgacaatgtcaaacatatatgcaaaggctgggatggtagaagatgcaaagagagtgaggatgatgattgatagtgtagagttagcgaaaccttctggaaaaagctgcgtggaaattttgtagtaaagcataagactccatggacttgtcagggtttcacatcttcaaagaggaaaggattgcaacagggcaaaccaaatcatgcgattagtgatatgaagagacttgaagtgcctgcatgttttgatgcaaccaggaagctgactgaagataaatatcagcaaatgttaccacaagagatataataaaacttatccagtaacatatactgatctccttattatttcacatgaaatggtggcaaaataaaacgtatccaggatgaggatggagtcaattcaaaactgctgctgttccctgcatgcataactcatctcccagcacccatccggtagaagtactggcgacaacaaaagattgatatggagaaagggctccttgaacttgtagccaatggtttgtgacttataaagacaattatgcatcatggacaaaattttatctagttcttagttttgatcattcctgaatgttcttgtttctaatgagagctatctcactgagtcaccaggtcgtgacttcaaagcaatctctccatatttgcgagggaagacttttttgcctcattctctagacctcactcatgttggagcctccgacattgggtctgtcctgcctcgaatgttcttgtcttagagccttcatagatgaagggtatttattcagtgatacagtagtggggttcattatctacaccactttgatc

SEQ ID NO: 201066 - DNA, 1839 bp, Zea Mays
gagagaggctaagcaccacctgactcggctgaaaatctagcgcgaccggcttttaacacggcccggcccatcaaaatgaatgcactgtactagccggcgaggaccacgtgtacccgccaccgcgccgcgcggctccaccgttcggcggcgctcgggcacggcacgccgtaaaaccctagctcttgcgccccctcctctccaccgcgccggcgagccgtggagacgcggagctaaggatgccgcggaccactgagctggagagccccggctgcccgccgctccgcgccctcaccaccgacatcctcggccttgtcaaagtcgtcgaggcccacgcgaggccggcgggtgccgccaaggtcgtggagacgtggggcgcacccgacgcctcctgcgccatcgtcgctgcctccctcgccgatcgtgccaccgaccccgttttggctgtggcgaggatgaacggcgtggttgagttgctgaatcccctgaacggagatactttggctgctgtcaaggcagtgggaccagcaccaaatgatggtggcgctgaaggggaaagcttctataaggtccatcacgaaagaaaatgcagcttcaggctcacatattgagccatctgctacatgggatgtgtgcggtggggccaatgtgcaattttgctcagttgatcatggtgaaaactatgtgatgtttggagggtatagaagtgagtttgtgggatattacatcttgtagtaagacatggtctgctaaatctccccgaacaaatagtcttggtatattcactcggccttggttcactgctgggaccttcttgtgcaaggatgatcatcgtaaaattgtagcctgcacaaatagtcatcaggtccgcttatatgatactgcattgcaaagaaggcctgccatctctgttgagtttaaggagtcaccaatcaaggcagttgctgctgatccgaatgggcatgatgtctatattggcacagggacaggggaccttgcttcctttgacatgagaactgggaaattgcttggatgctattttggcaaatgcagtggaagtattagatccattgttaggcatccagatctacctttgatagcatcttgcggactggatagctacttgcgtatttgggacacaaacacaagacagttgctatctgctgtctttctgaagcaacatcttacaactgtggtccttgattcacatttttctgttgaagagcctggagagatgaaatccaagcaactggagtcttcagtggagactgagactgaagtccgaaaagaaaagaagaaaaagagtaaggcaattacagaggatgagactgaggcacaaatccgaaaagaaaagaagagtagaacaattgaagaggaagaacaagctggattggtcgaccatagcgatattaatgatgaagtatatgccagaaaagaaaagaagaaaaagaagagtagaggtattgaagggggcaaggagcgagacagcgacggggaaatttgcagtcccaagagaagaaaatctggagaaagaagcaaatgcctgaagaagaggagcaagaaacagctggttgcctagtacaagtatcatttctcattacccgccttcttgattttgcagaattacacaattttgtgtggtagtttgttcggaattgtatcccttttgaaaccctgcaagggaagtgcatcattttcgtgtgcgcatttttctactctggtgtagctaaattttgagacatacacgctggagtagttacagccaaaacttgaaactaatttttgagatagacatgtgggactaaatttcgagatatacgcgtaggagtttctactataaaa

SEQ ID NO: 201067 - DNA, 1148 bp, Zea Mays
gtgggccagtgtggatcactattgttagtggtggtaggccccatttgaagcagcttactagccggctgatgtgcagtgagatgagcccgcgtcaagcaagcactaccagcagcagagatgccacagcactgggcagtaccacggccagtaccacggtcagtcggtccactagtgaccttccctccctccccattccccaagcatgcatatatttatgtgtgtgccttggaaagcctgggctcttaaaccagaccagaaagaaggcaggtgaggtgaggtgatgcagatgacccggctggaagacctgacccctgctccatccatggagcattcctcgaggccgaccctggggtttcccctgggaactgctctcctgctcctcgtcatctttgccctgagcggcatgttctcgtgttgctaccactgggacaagctccgcgccctcctccggtctcggcatcccgacatgttcctggaggccgaggagcatacggccgtctccgtggcgtcgtcatcgccgccgagaaaggcggtttctggtcacaagctggagagatcgggggaagagcgcggtgtgcccgttattattatgcctggagacaaggtccccaagttcttggcgatggcgaggcccagccctcgcggccccgaagcagcagcagagaagaccaccgaatgtcgggatcatcaggaaccctccgtcagtatctgtatacatgatgaaagcacagttagctgttagcatgatttgatcgagtgtatatatgtgcaatttgcttgcttgctaacacatctctctctctctctctctctctctctctctctctctctcgtgtgttaaactagatagagtttgaaaggacaaaaacagtcctagctagctaggtaactggctgttgttgaatgctactgtacccagcctgtaatccaaagagcaaagggggctagtgaagaagaatgttcttttatttatgctctttaattggagcatggatcagtcctatggaagaagaagctatttattgttaggtatttgttggtgccgtgcacgtatgttgtgtgcacgcattttgtcgggggactaaaagcaaagcaaagcaaagggcactatcaccaagtgaatgctctgaaagaaaagaaaaagaaaa

SEQ ID NO: 201068 - DNA, 1279 bp, Zea Mays
ctggagatgagctcctcatctgaagattttcatatcctgctttgtaaagacatcacattttgaggagtatctcaatgtccaggaagctgttatgttggaccttcttagaatagttgggcatcacaaagcaaggcttgctacccaaattcgaacagttcagaaatcatatggcaatgcagacttcgataacattccttttggagaggacatgtatagtcgagtccgtggccggccacttctgattgatacatctgcaaggatcagtgatgacaaacccaggcctcgacctgtatcatcacgtgaggagcagaaagtcaagacaaatggctcggtagatattaagtccagttcccctgaaaatgctagttcaagcaactctgaaaagcaggaaccgaaaaaaatggtgcctgaagatactcgggtgaagaacattaagggtgataatgtgatgccagtaacaccatctttagatcctgctacgtcaacttccaaggctggtaaagggaagacacgggaaccagagcccactgagcggcaaggagatgggtcagtctcggtggctaatccaaagaaagaatctagaccagtttttgaagataacattgttctgggcgtagcccttgagggttccaggaggacactgcctattgaagaaggaaatcctcatctatcactatctgagactgaggtggacaccgaagaggcggcttcatcaccgaaggataagataggccaaagcccaaaactttgaggtccagaaaaaaagccgttcagaggaatctcgataggtcatccgagttcaaactgtatccttgtgaagatttgtcaccaagcctaccttttttgtgcgcttgtgcaaatacaatgccaccacacatcagtgttgtatgcttaaggggtaaattcacactgacgattattcagggaacattacctgtcagtcgtattgctacaggcttgtaaagaagcaagtgcttcaataggcattttgtaaagattatattattgctcatttaagtggcttcttgcatatgcatcggcaattcagcatgcgccgttgcaactgtcatctcggtttccaggtttggcttacgttagttttgtttccaatgccatctgctgcgagctgaaatatcatcgtctcttttcctttttttttttttacaaaagacacgctaagtcgtggagacggtgaattcttccggatggcgtctcatcttgcagacgactaaaacggaataccgcgattatcgaaaaggaaacggaataccgcgcggcg

SEQ ID NO: 201069 - DNA, 1823 bp, Zea Mays
ttttttagactgaaatacatatggatatggggtttgattttaccatgaaagctctttatactggtgtttggattgcttctgtttctctctttatggagttgctgggtttcaatacccagaagtggataactgctggagggtttgggacagtgttgcttacacttgctggtcgagagatttttactaacttcctctcaagtgtcatgatcaatgcaacacgcccatttgtagtcaatgaatggatcgatgcaaagatagatggtgttgatgtctctggcattgttgagcatgttggtttgtggtctccaacactcattagaggtgttgatcgagaagcgatatacattcctaaccataagtttacagtttctatattaaggaataacactcagaggacccattggcgtattaagacctatcttgctattagccacatggatgctggaaaaattgggactatagttgctgacatgaggaaagttttggcaaaaaatccgcatatagaacaacaaaagctgcacaggagagtattctttgagaaaattgatccaaaaaatcaagcacttatgattttcatatcctgctttgtaaagacatcacattttgaggagtatctcaatgtccaggaagctgttatgttggaccttcttagaatagttgggcatcacaaagcaaggcttgctacccaaattcgaacagttcagaaatcatatggcaatgcagacttcgataacattccttttggagaggacatgtatagtcgagtccgtggccggccacttctgattgatacatctgcaaggatcagtgatgacaaacccaggcctcgacctgtatcatcacgtgaggagcagaaagtcaagacaaatggctcggtagatattaagtccagttcccctgaaaatgctagttcaagcaactctgaaaagcaggaaccgaaaaaaatggtgcctgaagatactcgggtgaagaacattaagggtgataatgtgatgccagtaacaccatctttagatcctgctacgtcaacttccaaggctggtaaagggaagacacgggaaccagagcccactgagcggcaaggagatgggtcagtctcggtggctaatccaaagaaagaatctagaccagtttttgaagataacattgttctgggcgtagcccttgagggttccaggaggacactgcctattgaagaaggaaatcctcatctatcactatctgagactgaggtggacaccgaagaggcggcttcatcaccgaaggataagataggccaaagcccaaaactttgaggtccagaaaaaaagccgttcagaggaatctcgataggtcatccgagttcaaactgtatccttgtgaagatttgtcaccaagcctaccttttttgtgcgcttgtgcaaatacaatgccaccacacatcagtgttgtatgcttaaggggtaaattcacactgacgattattcagggaacattacctgtcagtcgtattgctacaggcttgtaaagaagcaagtgcttcaataggcattttgtaaagattatattattgctcatttaagtggcttcttgcatatgcatcggcaattcagcatgcgccgttgcaactgtcatctcggtttccaggtttggcttacgttagttttgtttccaatgccatctgctgcgagctgaaatatcatcgtctcttttcctttttttttttttacaaaagacacgctaagtcgtggagacggtgaattcttccggatggcgtctcatcttgcagacgactaaaacggaataccgcgattatcgaaaaggaaacggaataccgcgcggcg

SEQ ID NO: 201070 - DNA, 1996 bp, Zea Mays
tagcattcgaactttgtttaaacagggtttggatccagttgtcttgccttcagcagcaagtcaagctgtgaaaacacgtctgataacttttgtgagatcattatcaactgtcctggctgttgcatatattctcacaagcttgattcagcaggtacaaaagtttcttatggacatgcgcaatcccaatgatacaagaaatatggggtttgattttaccatgaaagctctttatactggtgtttggattgcttctgtttctctctttatggagttgctgggtttcaatacccagaagtggataactgctggagggtttgggacagtgttgcttacacttgctggtcgagagatttttactaacttcctctcaagtgtcatgatcaatgcaacacgcccatttgtagtcaatgaatggatcgatgcaaagatagatggtgttgatgtctctggcattgttgagcatgttggtttgtggtctccaacactcattagaggtgttgatcgagaagcgatatacattcctaaccataagtttacagtttctatattaaggaataacactcagaggacccattggcgtattaagacctatcttgctattagccacatggatgctggaaaaattgggactatagttgctgacatgaggaaagttttggcaaaaaatccgcatatagaacaacaaaagctgcacaggagagtattctttgagaaaattgatccaaaaaatcaagcacttatgattttcatatcctgctttgtaaagacatcacattttgaggagtatctcaatgtccaggaagctgttatgttggaccttcttagaatagttgggcatcacaaagcaaggcttgctacccaaattcgaacagttcagaaatcatatggcaatgcagacttcgataacattccttttggagaggacatgtatagtcgagtccgtggccggccacttctgattgatacatctgcaaggatcagtgatgacaaacccaggcctcgacctgtatcatcacgtgaggagcagaaagtcaagacaaatggctcggtagatattaagtccagttcccctgaaaatgctagttcaagcaactctgaaaagcaggaaccgaaaaaaatggtgcctgaagatactcgggtgaagaacattaagggtgataatgtgatgccagtaacaccatctttagatcctgctacgtcaacttccaaggctggtaaagggaagacacgggaaccagagcccactgagcggcaaggagatgggtcagtctcggtggctaatccaaagaaagaatctagaccagtttttgaagataacattgttctgggcgtagcccttgagggttccaggaggacactgcctattgaagaaggaaatcctcatctatcactatctgagactgaggtggacaccgaagaggcggcttcatcaccgaaggataagataggccaaagcccaaaactttgaggtccagaaaaaaagccgttcagaggaatctcgataggtcatccgagttcaaactgtatccttgtgaagatttgtcaccaagcctaccttttttgtgcgcttgtgcaaatacaatgccaccacacatcagtgttgtatgcttaaggggtaaattcacactgacgattattcagggaacattacctgtcagtcgtattgctacaggcttgtaaagaagcaagtgcttcaataggcattttgtaaagattatattattgctcatttaagtggcttcttgcatatgcatcggcaattcagcatgcgccgttgcaactgtcatctcggtttccaggtttggcttacgttagttttgtttccaatgccatctgctgcgagctgaaatatcatcgtctcttttcctttttttttttttacaaaagacacgctaagtcgtggagacggtgaattcttccggatggcgtctcatcttgcagacgactaaaacggaataccgcgattatcgaaaaggaaacggaataccgcgcggcg

SEQ ID NO: 201071 - DNA, 2529 bp, Zea Mays
ctttgcacggagcatggcagtctggtgtttgctcatgagccgtttattagtctatactctactactatgatatgtggttgcaatctagcacatattacacatcagtggctgataagaaactgcatccagtggatgtaaatttcattggatttgagttttggttgagatggcagttggattgacatctcagctgttccaaagagtaactgctactgacatcttttgccaaaggaacaaatttaggagttctgagatgaggagttctcttcccttgccatccacctcgtttccttcagttgctgataggcgagactgttggggtcgcaatgtgttagagagtagctgcatgcccatgctttatacacctcgcagatatagatctttgggctttagatcttttgccttgccaattcctttgaaggaaattcctcttgtcaagaacacatcattagcactaactagcatggaggcaactggaagaagagtcctacatatttgatttcttcgtcgtaccttcaacctctacttctctggacaggagcaacactaatctgcaggggtttggatccagttgtcttgccttcagcagcaagtcaagctgtgaaaacacgtctgataacttttgtgagatcattatcaactgtcctggctgttgcatatattctcacaagcttgattcagcaggtacaaaagtttcttatggacatgcgcaatcccaatgatacaagaaatatggggtttgattttaccatgaaagctctttatactggtgtttggattgcttctgtttctctctttatggagttgctgggtttcaatacccagaagtggataactgctggagggtttgggacagtgttgcttacacttgctggtcgagagatttttactaacttcctctcaagtgtcatgatcaatgcaacacgcccatttgtagtcaatgaatggatcgatgcaaagatagatggtgttgatgtctctggcattgttgagcatgttggtttgtggtctccaacactcattagaggtgttgatcgagaagcgatatacattcctaaccataagtttacagtttctatattaaggaataacactcagaggacccattggcgtattaagacctatcttgctattagccacatggatgctggaaaaattgggactatagttgctgacatgaggaaagttttggcaaaaaatccgcatatagaacaacaaaagctgcacaggagagtattctttgagaaaattgatccaaaaaatcaagcacttatgattttcatatcctgctttgtaaagacatcacattttgaggagtatctcaatgtccaggaagctgttatgttggaccttcttagaatagttgggcatcacaaagcaaggcttgctacccaaattcgaacagttcagaaatcatatggcaatgcagacttcgataacattccttttggagaggacatgtatagtcgagtccgtggccggccacttctgattgatacatctgcaaggatcagtgatgacaaacccaggcctcgacctgtatcatcacgtgaggagcagaaagtcaagacaaatggctcggtagatattaagtccagttcccctgaaaatgctagttcaagcaactctgaaaagcaggaaccgaaaaaaatggtgcctgaagatactcgggtgaagaacattaagggtgataatgtgatgccagtaacaccatctttagatcctgctacgtcaacttccaaggctggtaaagggaagacacgggaaccagagcccactgagcggcaaggagatgggtcagtctcggtggctaatccaaagaaagaatctagaccagtttttgaagataacattgttctgggcgtagcccttgagggttccaggaggacactgcctattgaagaaggaaatcctcatctatcactatctgagactgaggtggacaccgaagaggcggcttcatcaccgaaggataagataggccaaagcccaaaactttgaggtccagaaaaaaagccgttcagaggaatctcgataggtcatccgagttcaaactgtatccttgtgaagatttgtcaccaagcctaccttttttgtgcgcttgtgcaaatacaatgccaccacacatcagtgttgtatgcttaaggggtaaattcacactgacgattattcagggaacattacctgtcagtcgtattgctacaggcttgtaaagaagcaagtgcttcaataggcattttgtaaagattatattattgctcatttaagtggcttcttgcatatgcatcggcaattcagcatgcgccgttgcaactgtcatctcggtttccaggtttggcttacgttagttttgtttccaatgccatctgctgcgagctgaaatatcatcgtctcttttcctttttttttttttacaaaagacacgctaagtcgtggagacggtgaattcttccggatggcgtctcatcttgcagacgactaaaacggaataccgcgattatcgaaaaggaaacggaataccgcgcggcg

SEQ ID NO: 201072 - DNA, 2877 bp, Zea Mays
cctggcccttccgcccgtcactctcgtcctctcccctcttgctgtgtcgccgcgcgtggaagacgttatcgccttcgccttcctcttcctttccctctccctgaatcctgatttctattcaccttcttcccctcctccgggcggaaggcaaagacctacacgcctatccctctccctcccgggtcccggcttccccttccctgctccccagatcgattcacccagcgggaaaagcggcgcgcagtggggtgcagcaggcgcagcgggctcggcgggcggcgagcggctagcggctagccgcgacgggcggccaatctacagcggaaggcggtgggcggctaccggtggcacatcgacctacggaaagtagaaaggtggggaggactgccctgttcgcatttggagcatcaaaacagggttgcaatctagcacatattacacatcagtggctgataagaaactgcatccagtggatgtaaatttcattggatttgagttttggttgagatggcagttggattgacatctcagctgttccaaagagtaactgctactgacatcttttgccaaaggaacaaatttaggagttctgagatgaggagttctcttcccttgccatccacctcgtttccttcagttgctgataggcgagactgttggggtcgcaatgtgttagagagtagctgcatgcccatgctttatacacctcgcagatatagatctttgggctttagatcttttgccttgccaattcctttgaaggaaattcctcttgtcaagaacacatcattagcactaactaggtcatgtgatgctttacttgcaaatcctgctacctcacttgtggtccctgcaatcgggattattgtgtttgctctgtggggttttttgcctctaatgcgggatattagaaaccgttttgatcatggaggcaactggaagaagagtcctacatatttgatttcttcgtcgtaccttcaacctctacttctctggacaggagcaacactaatctgcagcttgattcagcaggtacaaaagtttcttatggacatgcgcaatcccaatgatacaagaaatatggggtttgattttaccatgaaagctctttatactggtgtttggattgcttctgtttctctctttatggagttgctgggtttcaatacccagaagtggataactgctggagggtttgggacagtgttgcttacacttgctggtcgagagatttttactaacttcctctcaagtgtcatgatcaatgcaacacgcccatttgtagtcaatgaatggatcgatgcaaagatagatggtgttgatgtctctggcattgttgagcatgttggtttgtggtctccaacactcattagaggtgttgatcgagaagcgatatacattcctaaccataagtttacagtttctatattaaggaataacactcagaggacccattggcgtattaagacctatcttgctattagccacatggatgctggaaaaattgggactatagttgctgacatgaggaaagttttggcaaaaaatccgcatatagaacaacaaaagctgcacaggagagtattctttgagaaaattgatccaaaaaatcaagcacttatgattttcatatcctgctttgtaaagacatcacattttgaggagtatctcaatgtccaggaagctgttatgttggaccttcttagaatagttgggcatcacaaagcaaggcttgctacccaaattcgaacagttcagaaatcatatggcaatgcagacttcgataacattccttttggagaggacatgtatagtcgagtccgtggccggccacttctgattgatacatctgcaaggatcagtgatgacaaacccaggcctcgacctgtatcatcacgtgaggagcagaaagtcaagacaaatggctcggtagatattaagtccagttcccctgaaaatgctagttcaagcaactctgaaaagcaggaaccgaaaaaaatggtgcctgaagatactcgggtgaagaacattaagggtgataatgtgatgccagtaacaccatctttagatcctgctacgtcaacttccaaggctggtaaagggaagacacgggaaccagagcccactgagcggcaaggagatgggtcagtctcggtggctaatccaaagaaagaatctagaccagtttttgaagataacattgttctgggcgtagcccttgagggttccaggaggacactgcctattgaagaaggaaatcctcatctatcactatctgagactgaggtggacaccgaagaggcggcttcatcaccgaaggataagataggccaaagcccaaaactttgaggtccagaaaaaaagccgttcagaggaatctcgataggtcatccgagttcaaactgtatccttgtgaagatttgtcaccaagcctaccttttttgtgcgcttgtgcaaatacaatgccaccacacatcagtgttgtatgcttaaggggtaaattcacactgacgattattcagggaacattacctgtcagtcgtattgctacaggcttgtaaagaagcaagtgcttcaataggcattttgtaaagattatattattgctcatttaagtggcttcttgcatatgcatcggcaattcagcatgcgccgttgcaactgtcatctcggtttccaggtttggcttacgttagttttgtttccaatgccatctgctgcgagctgaaatatcatcgtctcttttcctttttttttttttacaaaagacacgctaagtcgtggagacggtgaattcttccggatggcgtctcatcttgcagacgactaaaacggaataccgcgattatcgaaaaggaaacggaataccgcgcggcg

SEQ ID NO: 201073 - DNA, 3049 bp, Zea Mays
gagaaaccaaaccagacactgcggcgcggccgataaggcaccacgtccacgtgcgtggcctggcccttccgcccgtcactctcgtcctctcccctcttgctgtgtcgccgcgcgtggaagacgttatcgccttcgccttcctcttcctttccctctccctgaatcctgatttctattcaccttcttcccctcctccgggcggaaggcaaagacctacacgcctatccctctccctcccgggtcccggcttccccttccctgctccccagatcgattcacccagcgggaaaagcggcgcgcagtggggtgcagcaggcgcagcgggctcggcgggcggcgagcggctagcggctagccgcgacgggcggccaatctacagcggaaggcggtgggcggctaccggtggcacatcgacctacggaaagtagaaaggtggggaggactgccctgttcgcatttggagcatcaaaacagggttgcaatctagcacatattacacatcagtggctgataagaaactgcatccagtggatgtaaatttcattggatttgagttttggttgagatggcagttggattgacatctcagctgttccaaagagtaactgctactgacatcttttgccaaaggaacaaatttaggagttctgagatgaggagttctcttcccttgccatccacctcgtttccttcagttgctgataggcgagactgttggggtcgcaatgtgttagagagtagctgcatgcccatgctttatacacctcgcagatatagatctttgggctttagatcttttgccttgccaattcctttgaaggaaattcctcttgtcaagaacacatcattagcactaactaggtcatgtgatgctttacttgcaaatcctgctacctcacttgtggtccctgcaatcgggattattgtgtttgctctgtggggttttttgcctctaatgcgggatattagaaaccgttttgatcatggaggcaactggaagaagagtcctacatatttgatttcttcgtcgtaccttcaacctctacttctctggacaggagcaacactaatctgcaggggtttggatccagttgtcttgccttcagcagcaagtcaagctgtgaaaacacgtctgataacttttgtgagatcattatcaactgtcctggctgttgcatatattctcacaagcttgattcagcaggtacaaaagtttcttatggacatgcgcaatcccaatgatacaagaaatatggggtttgattttaccatgaaagctctttatactggtgtttggattgcttctgtttctctctttatggagttgctgggtttcaatacccagaagtggataactgctggagggtttgggacagtgttgcttacacttgctggtcgagagatttttactaacttcctctcaagtgtcatgatcaatgcaacacgcccatttgtagtcaatgaatggatcgatgcaaagatagatggtgttgatgtctctggcattgttgagcatgttggtttgtggtctccaacactcattagaggtgttgatcgagaagcgatatacattcctaaccataagtttacagtttctatattaaggaataacactcagaggacccattggcgtattaagacctatcttgctattagccacatggatgctggaaaaattgggactatagttgctgacatgaggaaagttttggcaaaaaatccgcatatagaacaacaaaagctgcacaggagagtattctttgagaaaattgatccaaaaaatcaagcacttatgattttcatatcctgctttgtaaagacatcacattttgaggagtatctcaatgtccaggaagctgttatgttggaccttcttagaatagttgggcatcacaaagcaaggcttgctacccaaattcgaacagttcagaaatcatatggcaatgcagacttcgataacattccttttggagaggacatgtatagtcgagtccgtggccggccacttctgattgatacatctgcaaggatcagtgatgacaaacccaggcctcgacctgtatcatcacgtgaggagcagaaagtcaagacaaatggctcggtagatattaagtccagttcccctgaaaatgctagttcaagcaactctgaaaagcaggaaccgaaaaaaatggtgcctgaagatactcgggtgaagaacattaagggtgataatgtgatgccagtaacaccatctttagatcctgctacgtcaacttccaaggctggtaaagggaagacacgggaaccagagcccactgagcggcaaggagatgggtcagtctcggtggctaatccaaagaaagaatctagaccagtttttgaagataacattgttctgggcgtagcccttgagggttccaggaggacactgcctattgaagaaggaaatcctcatctatcactatctgagactgaggtggacaccgaagaggcggcttcatcaccgaaggataagataggccaaagcccaaaactttgaggtccagaaaaaaagccgttcagaggaatctcgataggtcatccgagttcaaactgtatccttgtgaagatttgtcaccaagcctaccttttttgtgcgcttgtgcaaatacaatgccaccacacatcagtgttgtatgcttaaggggtaaattcacactgacgattattcagggaacattacctgtcagtcgtattgctacaggcttgtaaagaagcaagtgcttcaataggcattttgtaaagattatattattgctcatttaagtggcttcttgcatatgcatcggcaattcagcatgcgccgttgcaactgtcatctcggtttccaggtttggcttacgttagttttgtttccaatgccatctgctgcgagctgaaatatcatcgtctcttttcctttttttttttttacaaaagacacgctaagtcgtggagacggtgaattcttccggatggcgtctcatcttgcagacgactaaaacggaataccgcgattatcgaaaaggaaacggaataccgcgcggcg

SEQ ID NO: 201074 - DNA, 2685 bp, Zea Mays
gtacaggccaccaatctggctcttccgtcaaagccctaccagaaccctacctcccgccgccggccgccccctcccgcggctaggaatgaccggcgccgccgcgctccggcaatcttctcgccggattttccggcacctcgccgctgcccccgcgttctctcgcagtgggctccaacatcccgagcgcctcctatcgtcgcagtcgtcgccggagcacggcgcgcgcggcgcggtgtccgggtcggagctggcgctgtacccgccggagcgggttcggaacttctcgatcatcgcgcacgtagaccacggcaagtcgacgctggctgaccggctgctggagctcaccggcaccatccagaagggccatgggcagccccagtacctcgacaaactgcaagttgagagagaaagggggattactgtcaaagcacaaacagcaaccatgttctacaggcacattactgcatctcaggactcagatatgccaagatatttgcttaatctgattgatacaccaggccatgtggatttcagctatgaggtatccaggtcccttgcggcttgccagggtgctcttttagtagttgacgcagcacaaggagtacaagctcaaacaatagcgaacttttaccttgcatttgaatcaaatttgagcatcattcctgtgattaacaagattgatcaaccgactgctgatccagataatgtaaaggatcaattgaagaggttatttgatattgatccaagtgaagctctgcttacttctgccaagactggtagaggccttgaacaggtgataagattgcttcggctgcaactagccgtgcatatgaagttcttgacgttggcattatgcaccctgagcttacacctactggagttctctacactggacaagttggatatgttattagtggaatgcgttcaactaaagaagcacgcatcggtgatacccttcaccaggcaaagagtactgttgagccacttcctggtttcaagcctgtaaaacacatggtcttctctggtctctatcctgccgatggttccgactttgaagctcttagccatgcgattgagaaactaacatgtaatgatgccagtgtctctgttacaaaggagacaagtaatgcacttggcatgggattcagatgtggcttcctaggattgctacacatggatgtgttccatcaacggcttgagcaagaatatggagctcaagtcatatcgaccataccaaccgtaccttatatttttgaatacggtgatggaagcaaggtgcaagttgagaaccctgctgctttggcttcgaatcctggaaagcgtgtagcagcctgttgggagcccacagttattgcaacaatcattattcctagtgagtatgttgggcctgtcattatgctttgttcagaaagaaggggcgaacagctagaatatacatttatcgatgcccaaagggctctgttgaagtaccgattaccattgaaggagataattgtggacttctacaatgagttgaagggcattacgtctggctatgctacttttgactacgaagattcagaataccaacaagctgatctagttaagatggatatccttctcaatggtcaacctgttgatgctatggcaactatagtgcataaccagaaggctcagcgggttggaaaggatttagtggagaagctcaagaaatttatagaaaggcaaatgtttgagatcaccatacaagcagcaattggttcaaaagttattgcaagggaaaccctgtccgcaatgaggaagaatgtcctggccaagtgctatggcggtgatattactcggaagaagaagttgctagagaagcaaaaggaaggcaagaagcgcatgaaacgtgtgggatctgtcgacattcctcaggaagccttccatgagctactgaaggtctccaattcaaaatagatggtgatccactgcaaatttagtttctgtagctgtccaaattttataagtagctgtgtggtgatgagtagcagcaaccttttctagtcatcttctgacagatcttgacagaatgatcgattccattgagtacataatggcctctcctgcgccttgtcagacgagccaacttgtgctggaagttgctcctcctgtagtcctgtcatccatcctgtggtgattgatatacacacaagtcttctcagctggccgcagacggatttcagtagagccaccatctttgtatttgttgattgattgatggaaaaccatcctttgagcacttgctgaacccagttttctctgctgacctgacttgtcacgttacactctattttttgtgttagataacggttttgagcaaaaataataggtcatatacacattaattggtcactgaaacaatgtggtacatgtaataagaggagctgcattgaataaagacatagtagtatcacgtttttggagtttgcgggctatctccttttcatcctgaaatgaacccctcttctaagccgagagtatcgtttggcttcgaacacagaagttgataaataaacacaaaaaataaaaaaaaagaatgcaccagccgggaatcgaacccgggtctgtaccgtggcagggtactattctaccactagaccactggtgctttcgtgtttttgttttacgtgaatcattttagtaatcccgggttctggactcgtg

SEQ ID NO: 201075 - DNA, 3093 bp, Zea Mays
atcgcttgttggcattcatttcgtgaagctgaagagcacaagtgcctgaattctgagttgtggcatgcatgtgctggccctctagtttcattgccttcggtcggtagtcgagtggtgtattttcctcaaggccacggtgagcaggtagcagcatcaacaaataaggaaatggaggctcagatccccaactatcctagtctacctccgcagcttatatgccaactgcataatgtgactatgcatgctgatgctgagacagatgaggtgtatgcacagatgacactccagccactcagtccacaagagctcaaggacccatttttgcctgctgagttaggcactgccagcaaccagccaacaaattatttttgtaaaacactaactgcaagtgatacgagtacacatggtgggttctctgttccacgccgagcagctgagaaggtgtttcctccactggatttcaatcagcaacctcccgcacaggagttgattgcaaaagatcttcatggcaacgactggaaatttcgccatatttttcgaggtcagccaaagcggcatcttctgacaacaggttggagtgtctttgttagtgcaaagagactggttgctggcgactctgtcctttttatctggaatgacaacaaccagctgcttctgggaattcgccgggcaaacagaccacaaaccgtcatgccatcatcagtactttctagtgatagcatgcatattggcctgctcgctgctgcagctcatgctgcatcaacaaatagccggtttactatcttctataatccaagagcaagcccttgtgaatttgtcatacccatggctaagtatgtgaaagctgtgtaccatacccgtatatctgtgggcatgcgtttccggatgctttttgagacggaggaatctagtgtaaggcgttatatggggacaattacaggaataagtgatcttgatcctgttcgctggccaaactcgcactggcgctcagtaaaggttggatgggacgagtcaactgctggagagaagcagccaagggtatctctttgggagattgaaccgttgacaacttttccaatgtatccatctccttttgctcttggattaaagcgcccatggcctgcaggcctgccttctttatacggtggaaggggtgatggcttgacctcttctcttatgtggcttcgagacagggcaaacccgggtttccagtcactgaatttcagcgggcttggtatgagtccctggatgcagcctaggctggataattccttacttggtctccaatctgacatgtaccagaccatagcagcagcagcagcattacaaagcactacgaagcaagttccaccttcagcaatgcagttccaacagcctcagaacattgctgatagatctgctcttctatcaagtcagattctgcagcaagtacaacctcggtttcagcaaatttaccctcaaaatctcaacgaaaacaaaattcaaggtcatacacaacctgagtacctccaagtccaacagcagcttcaacgctgccaatcatttaatgagcagaagcctccgatgcatccacagcaacaacagcaggaaccacagcagcagcaatgcgtccaaacaccacaggatcaacaaatgcaagaacagaagcatctgcacaacttccactccttgccagatgcattatcggccttttctcagctttccccagccactcactccccaccttccgcattgcagacagttccagcattctcgcatcaacaaaacttcccagatacaaacattagctctctctcaccatctactggcccttcaatgcatggcatgttggggagattaccttccgaagcagcttcgagcctcccatgtgtggcaatgaacgcccctgtatcggtatctgacccatggtcatccaagagagttgcagtggagtctgttaacccttgtcgacctcatgtttcaccacatatagaacatttggatatggcgacgtgtaacatgccgcagagctctgcactagcaccattacctggacgggaatgcctagtggatgaagatgggtgctctgatcctcaaaatcacctcttgtttggtgttcacatagactcgcattcacttctgatgcaagggggcattccagcccttcagaatgataacagttcaggcactattccatactcaacctccaatttcctgagcccttctgagaacgatttccccttgaatcaaccgctacgcagcgcgggctgcttagatgagtcggattatcttccatgtgcagagaatgccgaacaggcaaatcaacagtttgcaacctttgtgaaggtttacaaatccgggaccgtcggaaggttgctcgacatcactagattcagcagctacgacgagctccgtagcgaggtggggcgtctgtttggcctcgagggccagctggaagaccctctgagatcaggctggcagcttgtatttgttgacagggaggacgatgtccttctggttggcgatgacccatggcaggaattcgtgaacagtgtgtcctgtataaagatactttcaccggaggaggtccagcggatgggaaagccgggcatccagctcctgagctcggctccttcaagaaggctgggcaatggctgcgacagctacgcgagcatgcaggagccgagaggcctggacgctgggatggcgccggtgggttcggtcgagttctgaagacggcggagggaagcccaccatggccctcgggtcgaggattactctccctcctgtatgtttctgcagcacttgctagctctgcgacttggaacaaagcacgtagatcaaatggagctctgtgctgctccccgtctgatgatgtcttatggtatagactcgtagcagtaactactacatgttgtatacatgccggcacttcagttcttatcgagtagcaataccgctagtttagtccatccaatcaactacgttcttgttcctatgatcctgttgttgcgatgcagtaaaaccttttttttgtcataataacctgtatattgaaactgttcttggctcccacggtatacggctgacgacgagtgacgagggaaactggaa

SEQ ID NO: 201076 - DNA, 3896 bp, Zea Mays
accactcgtcgggttaaaacttaaaaccccgaggagtctagtctctcgagggcatacgaggcgagcaggagccggcagcacgaggaagacagaagaagcaaagcgaagcaaggcgacctcctcctcccctgctgcacagagtgggccggggccacggttgcaggaagcagtgtccgtcagtagcagcggcggaggtgctccgcggtcctggttcagtagttctccccctccggccgtggcagcggtcggatctgcgtcgcggcggcggaaagcaccccctccccgcctggagcccggagccgccgtccttctgaagctcggcggcgtcgagatctgagttcggtcgcgcggagaggaggtttcgctgtgccggcgtgcttctcccggagccgcgcgcggaggcggcgcctttgctgcgcattgccgttccgtccgtcccgtcccgtcaagctctaaggcttccgaagaattgaaaccggggttcttgggctttgcgcctcgcgcctcgcgccgtgatgtaaacttgatccctcggatcgaaaaggccgtccctttgcgccggccggccggccggaggtttggcgctgttcggcggaggagcaagtggcggtgctcaatccggaccacgccgcgcacgtgcttggaaaaggagcgtggtttggtgtacaaggaagggcagcaagggcccttgcctccccccttccctctcctctccattccggtgcgcgcctggaacgcgtcttgtgggtcggccggcgagcggagcggcgggaggagaatgaagctctcgccgtcggccagcggtggcctccaggaccagccggcgtcgccggaagaagctgaagagcacaagtgcctgaattctgagttgtggcatgcatgtgctggccctctagtttcattgccttcggtcggtagtcgagtggtgtattttcctcaaggccacggtagcagcatcaacaaataaggaaatggaggctcagatccccaactatcctagtctacctccgcagcttatatgccaactgcataatgtgactatgcatgctgatgctgagacagatgaggtgtatgcacagatgacactccagccactcagtccacaagagctcaaggacccatttttgcctgctgagttaggcactgccagcaaccagccaacaaattatttttgtaaaacactaactgcaagtgatacgagtacacatggtgggttctctgttccacgccgagcagctgagaaggtgtttcctccactggatttcaatcagcaacctcccgcacaggagttgattgcaaaagatcttcatggcaacgactggaaatttcgccatatttttcgaggtcagccaaagcggcatcttctgacaacaggttggagtgtctttgttagtgcaaagagactggttgctggcgactctgtcctttttatctggaatgacaacaaccagctgcttctgggaattcgccgggcaaacagaccacaaaccgtcatgccatcatcagtactttctagtgatagcatgcatattggcctgctcgctgctgcagctcatgctgcatcaacaaatagccggtttactatcttctataatccaagagcaagcccttgtgaatttgtcatacccatggctaagtatgtgaaagctgtgtaccatacccgtatatctgtgggcatgcgtttccggatgctttttgagacggaggaatctagtgtaaggcgttatatggggacaattacaggaataagtgatcttgatcctgttcgctggccaaactcgcactggcgctcagtaaaggttggatgggacgagtcaactgctggagagaagcagccaagggtatctctttgggagattgaaccgttgacaacttttccaatgtatccatctccttttgctcttggattaaagcgcccatggcctgcaggcctgccttctttatacggtggaaggggtgatggcttgacctcttctcttatgtggcttcgagacagggcaaacccgggtttccagtcactgaatttcagcgggcttggtatgagtccctggatgcagcctaggctggataattccttacttggtctccaatctgacatgtaccagaccatagcagcagcagcagcattacaaagcactacgaagcaagttccaccttcagcaatgcagttccaacagcctcagaacattgctgatagatctgctcttctatcaagtcagattctgcagcaagtacaacctcggtttcagcaaatttaccctcaaaatctcaacgaaaacaaaattcaaggtcatacacaacctgagtacctccaagtccaacagcagcttcaacgctgccaatcatttaatgagcagaagcctccgatgcatccacagcaacaacagcaggaaccacagcagcagcaatgcgtccaaacaccacaggatcaacaaatgcaagaacagaagcatctgcacaacttccactccttgccagatgcattatcggccttttctcagctttccccagccactcactccccaccttccgcattgcagacagttccagcattctcgcatcaacaaaacttcccagatacaaacattagctctctctcaccatctactggcccttcaatgcatggcatgttggggagattaccttccgaagcagcttcgagcctcccatgtgtggcaatgaacgcccctgtatcggtatctgacccatggtcatccaagagagttgcagtggagtctgttaacccttgtcgacctcatgtttcaccacatatagaacatttggatatggcgacgtgtaacatgccgcagagctctgcactagcaccattacctggacgggaatgcctagtggatgaagatgggtgctctgatcctcaaaatcacctcttgtttggtgttcacatagactcgcattcacttctgatgcaagggggcattccagcccttcagaatgataacagttcaggcactattccatactcaacctccaatttcctgagcccttctgagaacgatttccccttgaatcaaccgctacgcagcgcgggctgcttagatgagtcggattatcttccatgtgcagagaatgccgaacaggcaaatcaacagtttgcaacctttgtgaaggtttacaaatccgggaccgtcggaaggttgctcgacatcactagattcagcagctacgacgagctccgtagcgaggtggggcgtctgtttggcctcgagggccagctggaagaccctctgagatcaggctggcagcttgtatttgttgacagggaggacgatgtccttctggttggcgatgacccatggcaggaattcgtgaacagtgtgtcctgtataaagatactttcaccggaggaggtccagcggatgggaaagccgggcatccagctcctgagctcggctccttcaagaaggctgggcaatggctgcgacagctacgcgagcatgcaggagccgagaggcctggacgctgggatggcgccggtgggttcggtcgagttctgaagacggcggagggaagcccaccatggccctcgggtcgaggattactctccctcctgtatgtttctgcagcacttgctagctctgcgacttggaacaaagcacgtagatcaaatggagctctgtgctgctccccgtctgatgatgtcttatggtatagactcgtagcagtaactactacatgttgtatacatgccggcacttcagttcttatcgagtagcaataccgctagtttagtccatccaatcaactacgttcttgttcctatgatcctgttgttgcgatgcagtaaaaccttttttttgtcataataacctgtatattgaaactgttcttggctcccacggtatacggctgacgacgagtgacgagggaaactggaa

SEQ ID NO: 201077 - DNA, 3105 bp, Zea Mays
accactcgtcgggttaaaacttaaaaccccgaggagtctagtctctcgagggcatacgaggcgagcaggagccggcagcacgaggaagacagaagaagcaaagcgaagcaaggcgacctcctcctcccctgctgcacagagtgggccggggccacggtagcagcatcaacaaataaggaaatggaggctcagatccccaactatcctagtctacctccgcagcttatatgccaactgcataatgtgactatgcatgctgatgctgagacagatgaggtgtatgcacagatgacactccagccactcagtccacaagagctcaaggacccatttttgcctgctgagttaggcactgccagcaaccagccaacaaattatttttgtaaaacactaactgcaagtgatacgagtacacatggtgggttctctgttccacgccgagcagctgagaaggtgtttcctccactggatttcaatcagcaacctcccgcacaggagttgattgcaaaagatcttcatggcaacgactggaaatttcgccatatttttcgaggtcagccaaagcggcatcttctgacaacaggttggagtgtctttgttagtgcaaagagactggttgctggcgactctgtcctttttatctggaatgacaacaaccagctgcttctgggaattcgccgggcaaacagaccacaaaccgtcatgccatcatcagtactttctagtgatagcatgcatattggcctgctcgctgctgcagctcatgctgcatcaacaaatagccggtttactatcttctataatccaagagcaagcccttgtgaatttgtcatacccatggctaagtatgtgaaagctgtgtaccatacccgtatatctgtgggcatgcgtttccggatgctttttgagacggaggaatctagtgtaaggcgttatatggggacaattacaggaataagtgatcttgatcctgttcgctggccaaactcgcactggcgctcagtaaaggttggatgggacgagtcaactgctggagagaagcagccaagggtatctctttgggagattgaaccgttgacaacttttccaatgtatccatctccttttgctcttggattaaagcgcccatggcctgcaggcctgccttctttatacggtggaaggggtgatggcttgacctcttctcttatgtggcttcgagacagggcaaacccgggtttccagtcactgaatttcagcgggcttggtatgagtccctggatgcagcctaggctggataattccttacttggtctccaatctgacatgtaccagaccatagcagcagcagcagcattacaaagcactacgaagcaagttccaccttcagcaatgcagttccaacagcctcagaacattgctgatagatctgctcttctatcaagtcagattctgcagcaagtacaacctcggtttcagcaaatttaccctcaaaatctcaacgaaaacaaaattcaaggtcatacacaacctgagtacctccaagtccaacagcagcttcaacgctgccaatcatttaatgagcagaagcctccgatgcatccacagcaacaacagcaggaaccacagcagcagcaatgcgtccaaacaccacaggatcaacaaatgcaagaacagaagcatctgcacaacttccactccttgccagatgcattatcggccttttctcagctttccccagccactcactccccaccttccgcattgcagacagttccagcattctcgcatcaacaaaacttcccagatacaaacattagctctctctcaccatctactggcccttcaatgcatggcatgttggggagattaccttccgaagcagcttcgagcctcccatgtgtggcaatgaacgcccctgtatcggtatctgacccatggtcatccaagagagttgcagtggagtctgttaacccttgtcgacctcatgtttcaccacatatagaacatttggatatggcgacgtgtaacatgccgcagagctctgcactagcaccattacctggacgggaatgcctagtggatgaagatgggtgctctgatcctcaaaatcacctcttgtttggtgttcacatagactcgcattcacttctgatgcaagggggcattccagcccttcagaatgataacagttcaggcactattccatactcaacctccaatttcctgagcccttctgagaacgatttccccttgaatcaaccgctacgcagcgcgggctgcttagatgagtcggattatcttccatgtgcagagaatgccgaacaggcaaatcaacagtttgcaacctttgtgaaggtttacaaatccgggaccgtcggaaggttgctcgacatcactagattcagcagctacgacgagctccgtagcgaggtggggcgtctgtttggcctcgagggccagctggaagaccctctgagatcaggctggcagcttgtatttgttgacagggaggacgatgtccttctggttggcgatgacccatggcaggaattcgtgaacagtgtgtcctgtataaagatactttcaccggaggaggtccagcggatgggaaagccgggcatccagctcctgagctcggctccttcaagaaggctgggcaatggctgcgacagctacgcgagcatgcaggagccgagaggcctggacgctgggatggcgccggtgggttcggtcgagttctgaagacggcggagggaagcccaccatggccctcgggtcgaggattactctccctcctgtatgtttctgcagcacttgctagctctgcgacttggaacaaagcacgtagatcaaatggagctctgtgctgctccccgtctgatgatgtcttatggtatagactcgtagcagtaactactacatgttgtatacatgccggcacttcagttcttatcgagtagcaataccgctagtttagtccatccaatcaactacgttcttgttcctatgatcctgttgttgcgatgcagtaaaaccttttttttgtcataataacctgtatattgaaactgttcttggctcccacggtatacggctgacgacgagtgacgagggaaactggaa

SEQ ID NO: 201078 - DNA, 2207 bp, Zea Mays
accgtgagagggggagggggtatttaactgacggcgggacgaggatgcaagctctcgcggcagcagcaactgcagtggcggcgcctacccccgcgcgcctccgtctcccgctcctcttccgcgccccgcgctccgtcaggtcactgtagacccgcttcttcctccaggcttctgcggatctcgtgcagtgccaccactatgggagacgagacctcgacctccgttgctcctcaggagcaggaatccactgtgcgggctgggagtgtcaagcaacagctctccaggctggtcctttcatccctccagactacattgcccgatgtggagcaacaatgctatgggattatggtcaaaggttaaaggatctggaacaattttcaaaaaccctaattccattgggcaggccattgccaagaatctgccgtcttctgatattattgaatctgcatctgttgctggacctggttttgtgaacattaccttatcaaaccgctgggttgcacagagaatacaagatatgcttgttaacggcatcaagacttgggcaccagttctgccagtaaataggacagtggttgatttttcatcacctaatattgcaaaggaaatgcatgtgggacatttaaggtctacaattattggagatacattagcacgcatgtttgagttctcgaatgttgttgttctgcgcagaaaccatgtgggagattggggtacacagtttgggatgctaatagaatatctttttgagaaatttccaaattggcaggagataggttgccaggccattggggaccttcagattttctataaagcatccaagcataggtttgacagtgatccagactttaaagcaagggctcaacaaggagttgttcggctacagggaggggaggataaatatcgagaagcatggaaaaaaatttgtgacattagcaggagcgaatttgacttggtctacaagcgcctaaatgtggtgcttgaagaaaagggggagagtttctataatccttatattcctcaagtgctggaggaattgagtaacaaaggcttgatcaaggagagtgagggtgcccgagttatatttattcaaggtcatcaaatccctttgattgttgttaagagtgatggtggcttcaactatgcctcaacagacttaactgctctttggtatcggctcaatgttgagcaggcagagtggatcatatatgttacagatgttggtcagcagcagcactttgacatggttttcagtgctgcaaagatggccggttggctcccagatccaagtgaaaagaagtttccgaaaacaagccatgttggatttggtcttgttcttggttcagatggcaagcggttccgaacccgcagtactgaggttgttcgattggtagagctacttgatgaggctaaatctcggagcaaatcagaactactacaacggctcactgaaaatggcaaaattgttgactggacggatgaggaattagagcaaacttcagaggctgttggatatggtgctgtgaaggaaatactgctgtgtaccttcagtatgcacatgctcgtatttgttccattattcggaaaatccaacaagaacgtggaagagctgaagatgagtggagccatttctctcgaccatccggatgagcgcgtgttggggctgtatcttatccgatttgcagaggttgttgaagaggcatgcacgaatctacttccaaatgttgtgtgtgaatacttgtacaatctatctgaaatgttcacaaaattctataccaactgccaggtggttgggtcgccggaggagacgagccggttgttgctttgccaggcgactgctgttgtcatgcgacagtgcttcaacctgctcgggatcacgccagtatacaagctgtgattggctgcatgttcgattaatacattcaacatgtagaaaccccaattcatcatggttgcagttttggtcttgtaacctagttgaggcagttaacataatctactgtcctgtttgaaaacagaaggaactcaaaaggttgtatcaaaatgtgcttgcagagtttctgttactgttaggctagttttgcaactcccgatttttatttttctaagggctagttcgggaacactatttttccaagggatttccattttcccaagggaaaatgaactaatttctcttgggaaaatatggttctcaaactagccct

SEQ ID NO: 201079 - DNA, 2324 bp, Zea Mays
accgtgagagggggagggggtatttaactgacggcgggacgaggatgcaagctctcgcggcagcagcaactgcagtggcggcgcctacccccgcgcgcctccgtctcccgctcctcttccgcgccccgcgctccgtcaggtcactgtagacccgcttcttcctccaggcttctgcggatctcgtgcagtgccaccactatgggagacgagacctcgacctccgttgctcctcaggagcaggaatccactgtgcgggctgggagtgtcaagcaacagctctccaggctggtcctttcatccctccagactacattgcccgatgtggaggtagaaccgatggttgaagtttcagcaaagtttgctgactaccagtgcaacaatgctatgggattatggtcaaaggttaaaggatctggaacaattttcaaaaaccctaattccattgggcaggccattgccaagaatctgccgtcttctgatattattgaatctgcatctgttgctggacctggttttgtgaacattaccttatcaaaccgctgggttgcacagagaatacaagatatgcttgttaacggcatcaagacttgggcaccagttctgccagtaaataggacagtggttgatttttcatcacctaatattgcaaaggaaatgcatgtgggacatttaaggtctacaattattggagatacattagcacgcatgtttgagttctcgaatgttgttgttctgcgcagaaaccatgtgggagattggggtacacagtttgggatgctaatagaatatctttttgagaaatttccaaattggcaggagataggttgccaggccattggggaccttcagattttctataaagcatccaagcataggtttgacagtgatccagactttaaagcaagggctcaacaaggagttgttcggctacagggaggggaggataaatatcgagaagcatggaaaaaaatttgtgacattagcaggagcgaatttgacttggtctacaagcgcctaaatgtggtgcttgaagaaaagggggagagtttctataatccttatattcctcaagtgctggaggaattgagtaacaaaggcttgatcaaggagagtgagggtgcccgagttatatttattcaaggtcatcaaatccctttgattgttgttaagagtgatggtggcttcaactatgcctcaacagacttaactgctctttggtatcggctcaatgttgagcaggcagagtggatcatatatgttacagatgttggtcagcagcagcactttgacatggttttcagtgctgcaaagatggccggttggctcccagatccaagtgaaaagaagtttccgaaaacaagccatgttggatttggtcttgttcttggttcagatggcaagcggttccgaacccgcagtactgaggttgttcgattggtagagctacttgatgaggctaaatctcggagcaaatcagaactactacaacggctcactgaaaatggcaaaattgttgactggacggatgaggaattagagcaaacttcagaggctgttggatatggtgctgtgaagtacgctgattctaaaaataaccgggctcactaattacccatttagttttaacaaatgctgagcgataagggaaatactgctgtgtaccttcagtatgcacatgctcgtatttgttccattattcggaaaatccaacaagaacgtggaagagctgaagatgagtggagccatttctctcgaccatccggatgagcgcgtgttggggctgtatcttatccgatttgcagaggttgttgaagaggcatgcacgaatctacttccaaatgttgtgtgtgaatacttgtacaatctatctgaaatgttcacaaaattctataccaactgccaggtggttgggtcgccggaggagacgagccggttgttgctttgccaggcgactgctgttgtcatgcgacagtgcttcaacctgctcgggatcacgccagtatacaagctgtgattggctgcatgttcgattaatacattcaacatgtagaaaccccaattcatcatggttgcagttttggtcttgtaacctagttgaggcagttaacataatctactgtcctgtttgaaaacagaaggaactcaaaaggttgtatcaaaatgtgcttgcagagtttctgttactgttaggctagttttgcaactcccgatttttatttttctaagggctagttcgggaacactatttttccaagggatttccattttcccaagggaaaatgaactaatttctcttgggaaaatatggttctcaaactagccct

SEQ ID NO: 201080 - DNA, 2254 bp, Zea Mays
accgtgagagggggagggggtatttaactgacggcgggacgaggatgcaagctctcgcggcagcagcaactgcagtggcggcgcctacccccgcgcgcctccgtctcccgctcctcttccgcgccccgcgctccgtcaggtcactgtagacccgcttcttcctccaggcttctgcggatctcgtgcagtgccaccactatgggagacgagacctcgacctccgttgctcctcaggagcaggaatccactgtgcgggctgggagtgtcaagcaacagctctccaggctggtcctttcatccctccagactacattgcccgatgtggaggtagaaccgatggttgaagtttcagcaaagtttgctgactaccagtgcaacaatgctatgggattatggtcaaaggttaaaggatctggaacaattttcaaaaaccctaattccattgggcaggccattgccaagaatctgccgtcttctgatattattgaatctgcatctgttgctggacctggttttgtgaacattaccttatcaaaccgctgggttgcacagagaatacaagatatgcttgttaacggcatcaagacttgggcaccagttctgccagtaaataggacagtggttgatttttcatcacctaatattgcaaaggaaatgcatgtgggacatttaaggtctacaattattggagatacattagcacgcatgtttgagttctcgaatgttgttgttctgcgcagaaaccatgtgggagattggggtacacagtttgggatgctaatagaatatctttttgagaaatttccaaattggcaggagataggttgccaggccattggggaccttcagattttctataaagcatccaagcataggtttgacagtgatccagactttaaagcaagggctcaacaaggagttgttcggctacagggaggggaggataaatatcgagaagcatggaaaaaaatttgtgacattagcaggagcgaatttgacttggtctacaagcgcctaaatgtggtgcttgaagaaaagggggagagtttctataatccttatattcctcaagtgctggaggaattgagtaacaaaggcttgatcaaggagagtgagggtgcccgagttatatttattcaaggtcatcaaatccctttgattgttgttaagagtgatggtggcttcaactatgcctcaacagacttaactgctctttggtatcggctcaatgttgagcaggcagagtggatcatatatgttacagatgttggtcagcagcagcactttgacatggttttcagtgctgcaaagatggccggttggctcccagatccaagtgaaaagaagtttccgaaaacaagccatgttggatttggtcttgttcttggttcagatggcaagcggttccgaacccgcagtactgaggttgttcgattggtagagctacttgatgaggctaaatctcggagcaaatcagaactactacaacggctcactgaaaatggcaaaattgttgactggacggatgaggaattagagcaaacttcagaggctgttggatatggtgctgtgaaggaaatactgctgtgtaccttcagtatgcacatgctcgtatttgttccattattcggaaaatccaacaagaacgtggaagagctgaagatgagtggagccatttctctcgaccatccggatgagcgcgtgttggggctgtatcttatccgatttgcagaggttgttgaagaggcatgcacgaatctacttccaaatgttgtgtgtgaatacttgtacaatctatctgaaatgttcacaaaattctataccaactgccaggtggttgggtcgccggaggagacgagccggttgttgctttgccaggcgactgctgttgtcatgcgacagtgcttcaacctgctcgggatcacgccagtatacaagctgtgattggctgcatgttcgattaatacattcaacatgtagaaaccccaattcatcatggttgcagttttggtcttgtaacctagttgaggcagttaacataatctactgtcctgtttgaaaacagaaggaactcaaaaggttgtatcaaaatgtgcttgcagagtttctgttactgttaggctagttttgcaactcccgatttttatttttctaagggctagttcgggaacactatttttccaagggatttccattttcccaagggaaaatgaactaatttctcttgggaaaatatggttctcaaactagccct

SEQ ID NO: 201081 - DNA, 1496 bp, Zea Mays
gcgttatcacgagattcgtccgagcgacgacgtctcgacagtcccgggccgctgagatcttgccgcgggagggagagcagcagcggcagcatcagacatgtcgtcggggcggtacatggcctactcgccctcgccgtcgaccaccccccactccccccgcatcgccggcctccgcgccccgtctgccgccgtggccgaacaggagaagtaccttgccgaactgctcgcggagaggcagaagcttggcccgttcgtcccagtgatcccgcatagtgtacgcttgctgaatcaagagttcaccagcttatagctggcttggaggatcccagggcagctcctctggacttattgtcaagaaaacaatgaaggtcgatatcccagtagacaaatatccaacattcaatttcgttggccgcatccttggtccaagaggaaattccttgaagcgggtggaggcaaatacggactgccgtgtgctaataagaggtcgtggcagcatcaaagatccagcacgggaggaaatgatgcgagggaagccaggatatgaacacctgaatgaacccctccatatattggttgaggcagagctacctgttgaaatcattgatgcgcgcctgatgcaagcccgcgagatccttgaagatctgctaaagcctgtggatgaatcccaggactacttcaagaagcagcagctacgggagctcgcaatgcttaatggcacccttcgtgaggaagggatgcagagatccggttcagcgtcccctttccacaacagccttgggatgaagagagccaagacaagggggtaatgaacaaagctgcaagcatcatgaaggcagaaccaaatgaatctattctgagaccgatcctgtgtgcacatgggattgccttgcttggctattgtactggcccagtacggcctcgagccaccagcatcggggcggccgtaccctgataaaacatatatatctggagttgtgtttgctgctaccgggggagttcggttatgcgccataggttgttcgctatatattgggttgtgcgggattttgtagcaatgtggtttgtgtgatgctcatttggagcgtttgagagctctcggctcgtatttctcatcaagatagtatttaagggcgctgtttgggattttgaagcaatgctctaactgtctctgtacacgacaaacatggaggcttgctatatttcatgaatctctcgtttgctgctatcaatcactgatgcatactagtaaagtgatggcgtcttcagttgcatctgcagtttggattctgctttgctgatgcaggataatttaagttgataactcgaatgttgtgctgataccggctagttcagctaccaactacttgttctaacgataccctgtcctaaattaaaatttattttaggatgttaatggattttggaatacttatgtagattcgtcatcatttaaatatgagtataaaattaagagctaaaaaaatactaattta

SEQ ID NO: 201082 - DNA, 1426 bp, Zea Mays
ctgttctgactgcacaagttgtctacttttaagatggaaaatttcttccaaatcaatatcttgacactaacaacaaattttacgtgtttccacactattggagaacgcatcccttttaaatcaaagtggccttgaacatggtagtccactaacaacaggaggattatattcaaatggagcagctactgacatgaatgtgtggacatcagcatttcaaccagaaagttcaccagcttatagctggcttggaggatcccagggcagctcctctggacttattgtcaagaaaacaatgaaggtcgatatcccagtagacaaatatccaacattcaatttcgttggccgcatccttggtccaagaggaaattccttgaagcgggtggaggcaaatacggactgccgtgtgctaataagaggtcgtggcagcatcaaagatccagcacgggaggaaatgatgcgagggaagccaggatatgaacacctgaatgaacccctccatatattggttgaggcagagctacctgttgaaatcattgatgcgcgcctgatgcaagcccgcgagatccttgaagatctgctaaagcctgtggatgaatcccaggactacttcaagaagcagcagctacgggagctcgcaatgcttaatggcacccttcgtgaggaagggatgcagagatccggttcagcgtcccctttccacaacagccttgggatgaagagagccaagacaagggggtaatgaacaaagctgcaagcatcatgaaggcagaaccaaatgaatctattctgagaccgatcctgtgtgcacatgggattgccttgcttggctattgtactggcccagtacggcctcgagccaccagcatcggggcggccgtaccctgataaaacatatatatctggagttgtgtttgctgctaccgggggagttcggttatgcgccataggttgttcgctatatattgggttgtgcgggattttgtagcaatgtggtttgtgtgatgctcatttggagcgtttgagagctctcggctcgtatttctcatcaagatagtatttaagggcgctgtttgggattttgaagcaatgctctaactgtctctgtacacgacaaacatggaggcttgctatatttcatgaatctctcgtttgctgctatcaatcactgatgcatactagtaaagtgatggcgtcttcagttgcatctgcagtttggattctgctttgctgatgcaggataatttaagttgataactcgaatgttgtgctgataccggctagttcagctaccaactacttgttctaacgataccctgtcctaaattaaaatttattttaggatgttaatggattttggaatacttatgtagattcgtcatcatttaaatatgagtataaaattaagagctaaaaaaatactaattta

SEQ ID NO: 201083 - DNA, 1345 bp, Zea Mays
tgcgtcttttacggctctatctaacacgtctcgatttgggaggttttgaggaggaacagcttcaaccacgggaggcggaggggggccggaggccggccccggcggggtgatagggaggacagcgtgcggcggaccgtctacgtgtccgacattgatcaacatgtgaccgagcagaagctcgctgaagtgttctccaactgcgggcgagtggtagattgccgtatctgtggcgacccccactctgtcctacgctttgcgttcatcgagttttctgacgatggtggcgcaagagcggcgctaacactcgcgggaaccatacttggctgctatcctgtcagagttttgccttctaaaacagcaattctacctgtcaacccgaaatttcttcctcagactgatgatgagaaagaaatggtatcaaggactgtatattgtactaacatagacaagaaggttacggaggaggatgtaaagggtttcttccagcaagcctgcgggaaggtttctcggctgaggctccttactgacatagtacactccacatgcattgcttttgttgagtttgctcaggctgaaagtgcaattatggcattaaactttagtggtatggtccttggctcacttcctatcagggtgagcccttccaaaactccagtccgtccacgttctcctcgtgtgatgtccaattgatcaggctgctaccaatagcaaatcatcctaggcagagcttattgtagctatgatcgccctagaacccacttcacggatcaatgacgtcgttgtcctgagagtgtccaagtcagtcataggaaaccaacttgttgccaaatgctaatgtttttctgtttgccagatccatgcaccatttcccttctttttttcattcccccttatgttaattatgaacataattgtttataatcgcctttctcaggcatcagaataagaatgaataactctggtatttttttgttgtacgggagatcgtatatttttattgtatttttgtttttttacctcattttgactgataggcatgtgcagtttatttgtgttggtctgcactctgcgtggatacataggacatgtgtttctgccgttgttttggctcaaaaaagtggcgagttttggcaatctgttcccaagtgcaagtgttgttgcctacgatttctgcatcgttgtccttccctgctggaggagtgtttctgttgttaatcatgcactggagtttgactgcacgacaacgtctgcacgattggttggtggaggcgacggatccagcaatgccggtggccacccactgaatcgtggggcggtatttgtttcctcttctgttcatctctga

SEQ ID NO: 201084 - DNA, 1174 bp, Zea Mays
cttttttcgcctttccattcgcttgagaagtgaaatgtggtagattgccgtatctgtggcgacccccactctgtcctacgctttgcgttcatcgagttttctgacgatggtggcgcaagagcggcgctaacactcgcgggaaccatacttggctgctatcctgtcagagttttgccttctaaaacagcaattctacctgtcaacccgaaatttcttcctcagactgatgatgagaaagaaatggtatcaaggactgtatattgtactaacatagacaagaaggttacggaggaggatgtaaagggtttcttccagcaagcctgcgggaaggtttctcggctgaggctccttactgacatagtacactccacatgcattgcttttgttgagtttgctcaggctgaaagtgcaattatggcattaaactttagtggtatggtccttggctcacttcctatcagggtgagcccttccaaaactccagtccgtccacgttctcctcgtgtgatgtccaattgatcaggctgctaccaatagcaaatcatcctaggcagagcttattgtagctatgatcgccctagaacccacttcacggatcaatgacgtcgttgtcctgagagtgtccaagtcagtcataggaaaccaacttgttgccaaatgctaatgtttttctgtttgccagatccatgcaccatttcccttctttttttcattcccccttatgttaattatgaacataattgtttataatcgcctttctcaggcatcagaataagaatgaataactctggtatttttttgttgtacgggagatcgtatatttttattgtatttttgtttttttacctcattttgactgataggcatgtgcagtttatttgtgttggtctgcactctgcgtggatacataggacatgtgtttctgccgttgttttggctcaaaaaagtggcgagttttggcaatctgttcccaagtgcaagtgttgttgcctacgatttctgcatcgttgtccttccctgctggaggagtgtttctgttgttaatcatgcactggagtttgactgcacgacaacgtctgcacgattggttggtggaggcgacggatccagcaatgccggtggccacccactgaatcgtggggcggtatttgtttcctcttctgttcatctctga

SEQ ID NO: 201085 - DNA, 3000 bp, Zea Mays
caaacatcacggctcgtcgcagtcgtcttcctccccacgcgaggccagatccaacctgcctcggccgaccaccgccatggctcccacggtcccttcggcggcgaagaagagcgaggtggcagatctgaagcagcagctgcggcagctggcggggagccgcgctcccgatgcggacgaccagcgccgtgatgtcttcaagagggtgatctcctgcatgacggccggcatcgacgtgtcggccgcgttcggggagatggtgctctgctccgccacctccgacgtagtaaccaagaagatgtgctatctctatgtaggctcccacgcgcgcgcgcacccggacctagcactcctgaccatcaacttcctccagcgggactgccgtgatcaggaccccaccattcgcggcctcgcgctccgcagcctctgctccctccgtgtccccaaccttgtcgagtatctcgttacgccactcacgaccgggctgaaggatcctagcgcctacgtccggacgatcgctgctgttggtgctgccaagttgtatcacatatctgccacagcttgcattgatgctgaccttccggcttcgctcaaggcgctcatgctctccgatccagacgcacaggtagttgccaattgcctacatgcattgcaggagatctggaccctagaagctgctaactcagaggcagcagcaagagagattgagacattgtatagcaagccagtggtattttacctgttaaacaagatcaaagagttcagtgaatgggcacagtgtattgttcttgagttggcatcaaagttccttccatctgataataacgaaatatttgacataatgaatctgctggaggatagacttcagcatgcaaatggagctgttgttttggcaacgattaaagtttttctccatttgacaatgtctatgactgatgtccatcaacaggtttatgaacgtattaaagcacccttgcttactctggtgggtgctggcagtcctgaacagtcatactctgtgctatgccatctacatcttctggtgatgcgtgctccaatgttattttcctcggactataaaagcttctactgccaatttagtgatccttcatatgtgaagaagttgaaacttgagatgttgactgctatagcaaatgaaagcaacacatatgagattgtcactgaactatgtgaatatgctggaaatgttgatgtaccaattgcaagagagtctatccgggcagttggaaaaatagcactgcagcagtatgatgttaatgccattgtggacaggcttctacaatttcttgaaatggataaggattatgtgactgctgaaactctagtcttggtgaaagatcttctcagaaaatatcctcaatggagtcatgattgtatagcagttgtgggaaatatcagcagcaaaaacattcaggagccaaaaggaaaagcagctctcatatggatgttgggagaatattcacaggacatgcatgatgctccatacatccttgaaagtcttgttgaaaactgggatgaagagcactctcctgaggttcgcttgcatctcctgacagcagtgatgaaatgtttctttaaaagacccccagagacacagaaggcactaggggatacattagcagctggtctatctgacacccatcaggatgttcatgacagagcacttttttactacaggcttttgcaatacagtcctaatgtagcagaacgtgtagtaaaccctcccaagcaagctgtctctgtatttgcagacacacagagcagtgaaatcaaagatcggatattcgatgagttcaacagtctatcagttgtatatcagaagccatcgtacatgtttacagataaggagcatcgcggaccatttgagtactcagaggatcttacaggcttgactgaggatccagaaaatgtaatttctgcccaaagatatcaagaaaatgataatgatcttttgctaagtacttcagataaagaggacaatggtacaagagccagcaatggttcttccacctctacatacaatgctccttccgatttgattagtccttcattgataagctcgcaagcaccagctgaaacttcactagtaaatactggtgggacatattcctcacaatcaaacttcagtctcgatgaccttcttggccttagcgttactgaagctcctgctttaccacaaccaacactggcccttaactcaaagcctgtgctagatcctggtacgttccagaggaaatggggccagctagcattggcactgtctcaggaatgttctttgagtccacaaggggcagtagctttgatgaatccccaatcactcatccgtcatatgcaaagcaatcacatccaatgtattgcttcaggcggtcagcctccgaactacaagttctttttctatgctcaaaaagatggggctgctgctttcttccttgttgaatgtattgtcaacacagcatcagcgaaggcacagctcaaaatcaaggctgatgatggaactgctgctgaggcattctcgagtttgtttcagtcagccttgtccaaatttgggctttcttgatcctgagtaatttgtctgagcgattcaccggtccacagttttttatgggtttcacagtttgccccaactccactgtcttggcttgtccagtacttgtgatcatattattggagaatcagagtagaaggtgcaaaagggtactggagttttgcggagctaaaaatcctatttgtactatttgggtgaactgtgcatttgtacatgactacatgtcacccagataaatagctgggttatttaggactgtactgtttgatgttctgggttatttaggattgtgatagtttgatgccttgatctcttctgaagggtttcgtttccttgaaggatgtagaaacaacacgcaacaacccctttcatgtatgctatttaccatttcttgcacagatgatcaataagatgtttcgtcttccattttgattcgt

SEQ ID NO: 201086 - DNA, 2995 bp, Zea Mays
caaacatcacggctcgtcgcagtcgtcttcctccccacgcgaggccagatccaacctgcctcggccgaccaccgccatggctcccacggtcccttcggcggcgaagtctgcctctccttcccaaccttccgggaagagcgaggtggcagatctgaagcagcagctgcggcagctggcggggagccgcgctcccgatgcggacgaccagcgccgtgatgtcttcaagagggtgatctcctgcatgacggccggcatcgacgtgtcggccgcgttcggggagatggtgctctgctccgccacctccgacgtagtaaccaagaagatgtgctatctctatgtaggctcccacgcgcgcgcgcacccggacctagcactcctgaccatcaacttcctccagcgggactgccgtgatcaggaccccaccattcgcggcctcgcgctccgcagcctctgctccctccgtgtccccaaccttgtcgagtatctcgttacgccactcacgaccgggctgaaggatcctagcgcctacgtccggacgatcgctgctgttggtgctgccaagttgtatcacatatctgccacagcttgcattgatgctgaccttccggcttcgctcaaggcgctcatgctctccgatccagacgcacaggtagttgccaattgcctacatgcattgcaggagatctggaccctagaagctgctaactcagaggcagcagcaagagagattgagacattgtatagcaagccagtggtattttacctgttaaacaagatcaaagagttcagtgaatgggcacagtgtattgttcttgagttggcatcaaagttccttccatctgataataacgaaatatttgacataatgaatctgctggaggatagacttcagcatgcaaatggagctgttgttttggcaacgattaaagtttttctccatttgacaatgtctatgactgatgtccatcaacaggtttatgaacgtattaaagcacccttgcttactctggtgggtgctggcagtcctgaacagtcatactctgtgctatgccatctacatcttctggtgatgcgtgctccaatgttattttcctcggactataaaagcttctactgccaatttagtgatccttcatatgtgaagaagttgaaacttgagatgttgactgctatagcaaatgaaagcaacacatatgagattgtcactgaactatgtgaatatgctggaaatgttgatgtaccaattgcaagagagtctatccgggcagttggaaaaatagcactgcagcagtatgatgttaatgccattgtggacaggcttctacaatttcttgaaatggataaggattatgtgactgctgaaactctagtcttggtgaaagatcttctcagaaaatatcctcaatggagtcatgattgtatagcagttgtgggaaatatcagcagcaaaaacattcaggagccaaaaggaaaagcagctctcatatggatgttgggagaatattcacaggacatgcatgatgctccatacatccttgaaagtcttgttgaaaactgggatgaagagcactctcctgaggttcgcttgcatctcctgacagcagtgatgaaatgtttctttaaaagacccccagagacacagaaggcactaggggatacattagcagctggtctatctgacacccatcaggcttttgcaatacagtcctaatgtagcagaacgtgtagtaaaccctcccaagcaagctgtctctgtatttgcagacacacagagcagtgaaatcaaagatcggatattcgatgagttcaacagtctatcagttgtatatcagaagccatcgtacatgtttacagataaggagcatcgcggaccatttgagtactcagaggatcttacaggcttgactgaggatccagaaaatgtaatttctgcccaaagatatcaagaaaatgataatgatcttttgctaagtacttcagataaagaggacaatggtacaagagccagcaatggttcttccacctctacatacaatgctccttccgatttgattagtccttcattgataagctcgcaagcaccagctgaaacttcactagtaaatactggtgggacatattcctcacaatcaaacttcagtctcgatgaccttcttggccttagcgttactgaagctcctgctttaccacaaccaacactggcccttaactcaaagcctgtgctagatcctggtacgttccagaggaaatggggccagctagcattggcactgtctcaggaatgttctttgagtccacaaggggcagtagctttgatgaatccccaatcactcatccgtcatatgcaaagcaatcacatccaatgtattgcttcaggcggtcagcctccgaactacaagttctttttctatgctcaaaaagatggggctgctgctttcttccttgttgaatgtattgtcaacacagcatcagcgaaggcacagctcaaaatcaaggctgatgatggaactgctgctgaggcattctcgagtttgtttcagtcagccttgtccaaatttgggctttcttgatcctgagtaatttgtctgagcgattcaccggtccacagttttttatgggtttcacagtttgccccaactccactgtcttggcttgtccagtacttgtgatcatattattggagaatcagagtagaaggtgcaaaagggtactggagttttgcggagctaaaaatcctatttgtactatttgggtgaactgtgcatttgtacatgactacatgtcacccagataaatagctgggttatttaggactgtactgtttgatgttctgggttatttaggattgtgatagtttgatgccttgatctcttctgaagggtttcgtttccttgaaggatgtagaaacaacacgcaacaacccctttcatgtatgctatttaccatttcttgcacagatgatcaataagatgtttcgtcttccattttgattcgt

SEQ ID NO: 201087 - DNA, 2516 bp, Zea Mays
ttcctgatcagcatcaagtttacaaatccatcgttattcatttctggaacatcaaaactcagtagctgaaatgatcttatgtagttgtgtttgtcgtgtggcttcggttaaaaggcatttcagctatgaaccagcgaggtagttgccaattgcctacatgcattgcaggagatctggaccctagaagctgctaactcagaggcagcagcaagagagattgagacattgtatagcaagccagtggtattttacctgttaaacaagatcaaagagttcagtgaatgggcacagtgtattgttcttgagttggcatcaaagttccttccatctgataataacgaaatatttgacataatgaatctgctggaggatagacttcagcatgcaaatggagctgttgttttggcaacgattaaagtttttctccatttgacaatgtctatgactgatgtccatcaacaggtttatgaacgtattaaagcacccttgcttactctggtgggtgctggcagtcctgaacagtcatactctgtgctatgccatctacatcttctggtgatgcgtgctccaatgttattttcctcggactataaaagcttctactgccaatttagtgatccttcatatgtgaagaagttgaaacttgagatgttgactgctatagcaaatgaaagcaacacatatgagattgtcactgaactatgtgaatatgctggaaatgttgatgtaccaattgcaagagagtctatccgggcagttggaaaaatagcactgcagcagtatgatgttaatgccattgtggacaggcttctacaatttcttgaaatggataaggattatgtgactgctgaaactctagtcttggtgaaagatcttctcagaaaatatcctcaatggagtcatgattgtatagcagttgtgggaaatatcagcagcaaaaacattcaggagccaaaaggaaaagcagctctcatatggatgttgggagaatattcacaggacatgcatgatgctccatacatccttgaaagtcttgttgaaaactgggatgaagagcactctcctgaggttcgcttgcatctcctgacagcagtgatgaaatgtttctttaaaagacccccagagacacagaaggcactaggggatacattagcagctggtctatctgacacccatcaggatgttcatgacagagcacttttttactacaggcttttgcaatacagtcctaatgtagcagaacgtgtagtaaaccctcccaagcaagctgtctctgtatttgcagacacacagagcagtgaaatcaaagatcggatattcgatgagttcaacagtctatcagttgtatatcagaagccatcgtacatgtttacagataaggagcatcgcggaccatttgagtactcagaggatcttacaggcttgactgaggatccagaaaatgtaatttctgcccaaagatatcaagaaaatgataatgatcttttgctaagtacttcagataaagaggacaatggtacaagagccagcaatggttcttccacctctacatacaatgctccttccgatttgattagtccttcattgataagctcgcaagcaccagctgaaacttcactagtaaatactggtgggacatattcctcacaatcaaacttcagtctcgatgaccttcttggccttagcgttactgaagctcctgctttaccacaaccaacactggcccttaactcaaagcctgtgctagatcctggtacgttccagaggaaatggggccagctagcattggcactgtctcaggaatgttctttgagtccacaaggggcagtagctttgatgaatccccaatcactcatccgtcatatgcaaagcaatcacatccaatgtattgcttcaggcggtcagcctccgaactacaagttctttttctatgctcaaaaagatggggctgctgctttcttccttgttgaatgtattgtcaacacagcatcagcgaaggcacagctcaaaatcaaggctgatgatggaactgctgctgaggcattctcgagtttgtttcagtcagccttgtccaaatttgggctttcttgatcctgagtaatttgtctgagcgattcaccggtccacagttttttatgggtttcacagtttgccccaactccactgtcttggcttgtccagtacttgtgatcatattattggagaatcagagtagaaggtgcaaaagggtactggagttttgcggagctaaaaatcctatttgtactatttgggtgaactgtgcatttgtacatgactacatgtcacccagataaatagctgggttatttaggactgtactgtttgatgttctgggttatttaggattgtgatagtttgatgccttgatctcttctgaagggtttcgtttccttgaaggatgtagaaacaacacgcaacaacccctttcatgtatgctatttaccatttcttgcacagatgatcaataagatgtttcgtcttccattttgattcgt

SEQ ID NO: 201088 - DNA, 1711 bp, Zea Mays
ggcttctacaatttcttgaaatggataaggattatgtgactgctgaaactctagtcttggtgaaagatcttctcagaaaatatcctcaatggagtcatgattgtatagcagttgtgggaaatatcagcagcaaaaacattcaggagccaaaaggaaaagcagctctcatatggatgttgggagaatattcacaggacatgcatgatgctccatacatccttgaaagtcttgttgaaaactgggatgaagagcactctcctgaggttcgcttgcatctcctgacagcagtgatgaaatgtttctttaaaagacccccagagacacagaaggcactaggggatacattagcagctggtctatctgacacccatcaggatgttcatgacagagcacttttttactacaggcttttgcaatacagtcctaatgtagcagaacgtgtagtaaaccctcccaagcaagctgtctctgtatttgcagacacacagagcagtgaaatcaaagatcggatattcgatgagttcaacagtctatcagttgtatatcagaagccatcgtacatgtttacagataaggagcatcgcggaccatttgagtactcagaggatcttacaggcttgactgaggatccagaaaatgtaatttctgcccaaagatatcaagaaaatgataatgatcttttgctaagtacttcagataaagaggacaatggtacaagagccagcaatggttcttccacctctacatacaatgctccttccgatttgattagtccttcattgataagctcgcaagcaccagctgaaacttcactagtaaatactggtgggacatattcctcacaatcaaacttcagtctcgatgaccttcttggccttagcgttactgaagctcctgctttaccacaaccaacactggcccttaactcaaagcctgtgctagatcctggtacgttccagaggaaatggggccagctagcattggcactgtctcaggaatgttctttgagtccacaaggggcagtagctttgatgaatccccaatcactcatccgtcatatgcaaagcaatcacatccaatgtattgcttcaggcggtcagcctccgaactacaagttctttttctatgctcaaaaagatggggctgctgctttcttccttgttgaatgtattgtcaacacagcatcagcgaaggcacagctcaaaatcaaggctgatgatggaactgctgctgaggcattctcgagtttgtttcagtcagccttgtccaaatttgggctttcttgatcctgagtaatttgtctgagcgattcaccggtccacagttttttatgggtttcacagtttgccccaactccactgtcttggcttgtccagtacttgtgatcatattattggagaatcagagtagaaggtgcaaaagggtactggagttttgcggagctaaaaatcctatttgtactatttgggtgaactgtgcatttgtacatgactacatgtcacccagataaatagctgggttatttaggactgtactgtttgatgttctgggttatttaggattgtgatagtttgatgccttgatctcttctgaagggtttcgtttccttgaaggatgtagaaacaacacgcaacaacccctttcatgtatgctatttaccatttcttgcacagatgatcaataagatgtttcgtcttccattttgattcgt

SEQ ID NO: 201089 - DNA, 2233 bp, Zea Mays
ggcgcgcggcattggtcggtccggagcggtttcgcgtcatcgatgcggttcgctgatacggcaatacggcatgcatgagcggcgacgcacgcacgcactagaaggaaacttctgggggagtccggagaagctttcgttccttcgtccttctccttcccaccgccacgccacgccacgccacgccggctcggtacatatactagcctgcctcgatcggcctccctcgcattccccctcgatcggcctccctcccccaagatcctccactcgatcccaaacaaaccaacaaatccatccatcgcacatggacgcgttcttctcggcctcctccgcgtcggcgccctacggctacggcgccggcggatggagctacgactcgctcaagaacttccgccagatcacccccgccgtccagacccacctcaagctcaaattctcctgcgggttgcgtgtagctgatgcgtaattccctgacgtaatcttgtgattcgcgcgcgtcgtgttccttgcgttgagaactgcaactgcggatgccaccgattcgatcgattcgtcactttaagaacatgcatgatccggttagaacagcaagatatgataaatcgatttgaatccaaatctgaccctctggttcggcttggttgcctgcaggtctacctcaccctgtgcgcggcgctggcctcgtcggcggtgggcgcttacctgcacgtggtctggaacatcggcggtacgctgacaatgctcggttgcgtcggcagcatcgcctggctcttctcggtgcccgtctacgaggagaggaagaggtatgggctgctgatggcggctgccctcctggaaggcgcttcggtcggacccctcgtcaagctcgccgtggaatttgacccaagcatcctggtgacggcgttcgtggggactgccatcgcgttcgcgtgcttcaccggcgcggccatggtggccaggcgcagggagtacctctacctgggtgggctgctctcgtcggggctctccatcctgctctggctgcagctagccggctccatcttcggccactccgcaaccagcttcatgttcgaggtctacttcgggctgctcatcttcctgggctacgtggtgtacgacacgcaggagatcatcgagagggcgcaccgcggcgacatggaccacgtcaagcacgccctcaccctcttcacagacttcgtggccgtcctcgtccgcgtcctcgtcatcatggtgagtgagctctttcctcttggtgatgatgctgggttgctgccgcggattatattggtggaatagcttgcgcatgattttgatttcagatttctccctgtgctgccggtggcggttgtttctgaatggctgtactgaccgaaccgttggtgttgcatgctctgcagctcaagaacggggccgacaagtcggaggacaagaagaggaagaagaggtcgtgagcgcgtcgagaagggaagctcttccacttccacatatgcataggagtaactgctggggttccttcctggggtggaagtgtggaactgagctgagtgttcagaagtgttcctttgttcggcacctttgttctcttcctctcttgatgagtctgtaaatagctatgtcaatctggttaagcttggtttggttgcctgtgcctgtgttcgctggcctttggatagaatgcaaattaaagatgttgctattgcacagtccattcctgtccttgtttgtgacggtttatagtagtagtgatgatcgtcacccgtttctggtggctggaacatgccgccgccgccgtaacgagccgacggccagcgcccagcgtggacgagtgagaccgacgcactgcggactgccgtgccgccgtactgtcctgtcgtggactggtaaggagaggggagtggtggctgtctatcacatcgatgttgaccgaatgacagtaatactactctaccctttctaaattctgacgaagccaagataaacctgcggcacggcacaggcacagccgatagagcacaccgacacatgttgcctcctgtcctggctctgctttctttagcagcagcagcagcacagtaggccctcgcgttctatcgggggtctctttcggtttcagctttgccttgcttctccgttatggtccctgacgggtgttgtttggttcacgaaatgtaacgcaaagggtaatgataatggtttacactcgattactgtcggtaacaagtttgaatagtcc

SEQ ID NO: 201090 - DNA, 367 bp, Zea Mays
ggggcaaaggcaagggcagttcgggaattcgcggcgcggcgtttaacgaggaagggagtggacggcggaacggagcggacggggcgcgggcgggggcgcgtataaatcccggtaaaattcccccgacgcgaggcctcaaatcgctctctgcccccgatcaccggtcgcctcccttccgctcccctgcctgcctaatccctccggccaccccgaaaccgctcgctcgctcgctcgctccccgcgcccagagacaagcccggagaccatggcggaccagctcactgacgaccaaatcgccgagttcaaggaggccttcagcctcttcgataaggacggcgacgtgcaaaacaatgttttgagtgaccag

SEQ ID NO: 201091 - DNA, 1834 bp, Zea Mays
tagacagacggacacgatcaaaagagtgacaaggaaaagagagagaaaaagagggacttgggacgacagagaggggagggcggagttggtgagcgtgctcgggatcagcgggtgacctcagaggttgttgcctcggggggcggggcaattctttagcacccaatcttccagatgtctttcgactcgctgctgctcttttggttggtatccttggatctctgactctagactgttccacgaaatctccagtcctttcttcctcttggaggaggagggctgcggcctgagcaggagacggagacatgggtagcttcgttaaactggcgaggagggcggtggagacggacgcgccggtcatggtcaagatacaagaactgcttcgaggggccaaggatgtcatgtcgcttgcgcagggagttgtttactggcaacctcctgagtcagcaatggctaaggtcgaaaaaataattagggaaccaacgctcagtaaatatggctctgatgatggtcttcccgagcttcgagaagcactttttgaaaagttacgcagagagaataagcttactaagtcatcagttatggtcactgctggtgcaaatcaagcttttgtgaacttggtcctcactctttgtgatgccggtgattctgttgtcatgtttgcaccatattatttcaatgcctacatgtcattccagatgacaggtgttactgacatattagttggtggttctgatcccaagacacttcatcctgatgttgattggttggagaaggttctgaaagaaaatgaccctatccctaaacttgttaccgttgtgaatccgggtaacccctctggagcttttattcccaggcctatgcttgagaggatttcagatctgtgcaaaaacgctggtgcatggcttgtggttgacaatacctatgaatactttatgtatgatggaatgaagcactattgcttagaaggcactcatattgtcaacctcttctcattctcaaaggcttatggaatgatggggtggcgtgtaggatacatcgcttttccaaacgaagtcgatggcttccacgaccagctcctcaaagtgcaggacaacatacccatctgcgcctccatcatcgggcagcgcctggcgctctactcgctggaggccggccccgagtggatcaaagaaagggtgagagacctggtgaaaaaccgcgcgctgctcgtggacgcgctgtccccgctcggtgacgacaacgtcaggggcgggcagggcgccatctacctgtgggcgaagctcccggacacctgctccgacgatttcgaggtcgtcaggtggctcgcgaacaggcacggcgtcgccgtgatccctggcagcgccagcggaggccccgggcacatccgcatctccttcggagggctcaaggaggaagacaccaggctggccgctgagaggctacggcgcggcttgcaggaactggtggctgatggaacggtacagtaacggctccattggtgtaggtaaaaagcacagcattgtagttttacacaacgactccgattttccaatggcataactccgccgggattgattcgagagaagaactggaccttgttatgaagactgcattgttcggacgagagctgggacagaataaaaggcatccgaatcaaaagcataagcaagaaagtcctgacgtacggagctgcctgttaggccgtttccaacagtggacctaaagtttacctcaaagcactttttacattgttctgcattgtactgtttatagagtggaatttgaatataagtacaaggataaataaactgctcgacctcttggtctcttcttt

SEQ ID NO: 201092 - DNA, 1759 bp, Zea Mays
cttcacttcatgtatctttgtttagagaccttgccttgttggggcaggggacttgggacgacagagaggggagggcggagttggtgagcgtgctcgggatcagcgggtgacctcagagtcctttcttcctcttggaggaggagggctgcggcctgagcaggagacggagacatgggtagcttcgttaaactggcgaggagggcggtggagacggacgcgccggtcatggtcaagatacaagaactgcttcgaggggccaaggatgtcatgtcgcttgcgcagggaaccaacgctcagtaaatatggctctgatgatggtcttcccgagcttcgagaagcactttttgaaaagttacgcagagagaataagcttactaagtcatcagttatggtcactgctggtgcaaatcaagcttttgtgaacttggtcctcactctttgtgatgccggtgattctgttgtcatgtttgcaccatattatttcaatgcctacatgtcattccagatgacaggtgttactgacatattagttggtggttctgatcccaagacacttcatcctgatgttgattggttggagaaggttctgaaagaaaatgaccctatccctaaacttgttaccgttgtgaatccgggtaacccctctggagcttttattcccaggcctatgcttgagaggatttcagatctgtgcaaaaacgctggtgcatggcttgtggttgacaatacctatgaatactttatgtatgatggaatgaagcactattgcttagaaggcactcatattgtcaacctcttctcattctcaaaggcttatggaatgatggggtggcgtgtaggatacatcgcttttccaaacgaagtcgatggcttccacgaccagctcctcaaagtgcaggacaacatacccatctgcgcctccatcatcgggcagcgcctggcgctctactcgctggaggccggccccgagtggatcaaagaaagggtgagagacctggtgaaaaaccgcgcgctgctcgtggacgcgctgtccccgctcggtgacgacaacgtcaggggcgggcagggcgccatctacctgtgggcgaagctcccggacacctgctccgacgatttcgaggtcgtcaggtggctcgcgaacaggcacggcgtcgccgtgatccctggcagcgccagcggaggccccgggcacatccgcatctccttcggagggctcaaggaggaagacaccaggctggccgctgagaggctacggcgcggcttgcaggaactggtggctgatggaacggtacagtaacggctccattggtgtaggtaaaaagcacagcattgtagttttacacaacgactccgattttccaatggcataactccgccgggattgattcgagagaagaactggaccttgttatgaagactgcattgttcggacgagagctgggacagaataaaaggcatccggtctgcagtcatctttgttataaaatatgagtactacatattataatcagcagtaagtatttgtttctgtttggttttcagttatctatattactgatggcacccatttgtacagaatcaaaagcataagcaagaaagtcctgacgtacggagctgcctgttaggccgtttccaacagtggacctaaagtttacctcaaagcactttttacattgttctgcattgtactgtttatagagtggaatttgaatataagtacaaggataaataaactgctcgacctcttggtctcttcttt

SEQ ID NO: 201093 - DNA, 2325 bp, Zea Mays
tctgtatctcaacggcccgatgcatgagttagcttagctgtcgtcctgctcgccgcttatgtaagcaaccgtagacccatccccaacatgctggctctctgtgtcccccattcacttcacactctagactctagttcgccccatgagtctggcaggtcaaagaagggaagagacaaccgaaggatcaacggatcaagcgaggtagtcgactccgcgtctaattaaacctgtggtctgcggacgggcggtcgtcggttagagcattgcttccgtgtggtgcggttgatagctcggatcttctgctggccgagttcgtcttggaggagaagagagagagagagagagagagagagcgccgggatcggagccaggaagcatccagcagcgatggcgggcggaggggtggcggcgctgggcgtgaagacggagcgcgcggcgcagtacaaggggcgcatgacgctcgccgtcgccacgacctgcctcgtggccgccgtcgggggcgccatcttcggctacgacatcggcatctccggaggcgtgacatccatggacccattcctggagaaattcttcccggtagtgttccaccggaagaactccggcgggaagaacaactactgtaagtacgacaaccagggactagcggcgttcacatcgtcactctacctcgccggcctcgttgcctccctcgtcgcgtcccccgtgacgaggaactacggccgcaaagctagcattgtctgcggcggcgtgagcttcctcatcggcgcggccctcaacgtggccgccgtgaatctggctatgctcatcctcgggcgcatcatgctcggcgtcggcatcggttttggcaaccaggctgtgccgctgtacctgtcggagatggcgccggcgcacctccgcggcggcctgaacatgatgttccagctcgcgacgacgctgggcatcttcacggcgaacctgatcaactatggcacgcagaacatcaagccgtgggggtggcggctgtcgctgggcctcgcggcggtgccggcgctgctgatgacgttgggcgggctctttcttccggagactcccaacagcctcattgagcgcgggcgcgtggaggagggtcggcgcgtgctggagcgcatccggggcacggccgacgtggacgccgagttcacggacatggtggaggcgagcgagctggccaacaccgtcgagcacccgttccggaacatcctgcagccgcgcaaccggccgcagctggtgatggccgtgtgcatgccggcgttccagatcctgacgggcatcaactccatcctcttctacgcgccggtcctgttccagagcatgggtttcggcgggaacgcgtccctctactcctccgtgctcaccggcgccgtgctcttctcctcgacgctcatctccatcggcatcgtcgaccgcctcggccgccggaagctcctcatcagcggcgggatccagatgatcgtctgccaggtgatcgtggcggtgatcctgggcgtgaagttcggggcggagaagcaactggcgcggagctactcggtcgcggtggtggtggtgatctgcctgttcgttctggcgttcgggtggtcgtggggcccgctgggatggacggtgccgagcgagatcttcccgctggagacgcggtcggcggggcagagcatcacggtggccgtgaacctgctcttcaccttcgccatcgcgcaggcgttcctgtcgctgctgtgcgccttcaagttcggcatcttcctctttttcgcggggtggatcaccgtcatgaccgtgttcgtctacgtcttcctgccggagaccaagggcgtgcccatcgaagagatggtgctgctatggcggaagcactggttctggaagaaggtcatgccggacatgccgctcgaggatggctggggcgcggctgagggtcatgcggcacctgccagcaacaatcacaagggatgactggagtgaagcatgcatggttgcctggttggtttcgtggacactttatataataactgaagaaaacaagacacacactaacatgtaggcggctgcttattcttattgtattttgtataaagcaggctgtgtgatatgcagggataaaaacgaacgagatcgttccaaataacctctcttttgttttcatttttacattttatttgggaaaaaagattgaagaagggactagcgggataacgaaaacgaactaaaatgaacataacaaattaataatagatcaaaatcgaatataaaaagtatgaacatcaccgctttctcttttctaaaaaccaaaaaaatgatcaaaatatctataaatacgaa

SEQ ID NO: 201094 - DNA, 2323 bp, Zea Mays
atctcaacggcccgatgcatgagttagcttagctgtcgtcctgctcgccgcttatgtaagcaaccgtagacccatccccaacatgctggctctctgtgtcccccattcacttcacactctagactctagttcgccccatgagtctggcaggtcaaagaagggaagagacaaccgaaggatcaacggatcaagcgaggtagtcgactccgcgtctaattaaacctgtggtctgcggacgggcggtcgtcggttagagcattgcttccgtgtggtgcggttgatagctcggatcttctgctggccgagttcgtcttggaggagaagagagagagagagagagagagagagcgccgggatcggagccaggaagcatccagcagcgatggcgggcggaggggtggcggcgctgggcgtgaagacggagcgcgcggcgcagtacaaggggcgcatgacgctcgccgtcgccacgacctgcctcgtggccgccgtcgggggcgccatcttcggctacgacatcggcatctccgcaggaggcgtgacatccatggacccattcctggagaaattcttcccggtagtgttccaccggaagaactccggcgggaagaacaactactgtaagtacgacaaccagggactagcggcgttcacatcgtcactctacctcgccggcctcgttgcctccctcgtcgcgtcccccgtgacgaggaactacggccgcaaagctagcattgtctgcggcggcgtgagcttcctcatcggcgcggccctcaacgtggccgccgtgaatctggctatgctcatcctcgggcgcatcatgctcggcgtcggcatcggttttggcaaccaggctgtgccgctgtacctgtcggagatggcgccggcgcacctccgcggcggcctgaacatgatgttccagctcgcgacgacgctgggcatcttcacggcgaacctgatcaactatggcacgcagaacatcaagccgtgggggtggcggctgtcgctgggcctcgcggcggtgccggcgctgctgatgacgttgggcgggctctttcttccggagactcccaacagcctcattgagcgcgggcgcgtggaggagggtcggcgcgtgctggagcgcatccggggcacggccgacgtggacgccgagttcacggacatggtggaggcgagcgagctggccaacaccgtcgagcacccgttccggaacatcctgcagccgcgcaaccggccgcagctggtgatggccgtgtgcatgccggcgttccagatcctgacgggcatcaactccatcctcttctacgcgccggtcctgttccagagcatgggtttcggcgggaacgcgtccctctactcctccgtgctcaccggcgccgtgctcttctcctcgacgctcatctccatcggcatcgtcgaccgcctcggccgccggaagctcctcatcagcggcgggatccagatgatcgtctgccaggtgatcgtggcggtgatcctgggcgtgaagttcggggcggagaagcaactggcgcggagctactcggtcgcggtggtggtggtgatctgcctgttcgttctggcgttcgggtggtcgtggggcccgctgggatggacggtgccgagcgagatcttcccgctggagacgcggtcggcggggcagagcatcacggtggccgtgaacctgctcttcaccttcgccatcgcgcaggcgttcctgtcgctgctgtgcgccttcaagttcggcatcttcctctttttcgcggggtggatcaccgtcatgaccgtgttcgtctacgtcttcctgccggagaccaagggcgtgcccatcgaagagatggtgctgctatggcggaagcactggttctggaagaaggtcatgccggacatgccgctcgaggatggctggggcgcggctgagggtcatgcggcacctgccagcaacaatcacaagggatgactggagtgaagcatgcatggttgcctggttggtttcgtggacactttatataataactgaagaaaacaagacacacactaacatgtaggcggctgcttattcttattgtattttgtataaagcaggctgtgtgatatgcagggataaaaacgaacgagatcgttccaaataacctctcttttgttttcatttttacattttatttgggaaaaaagattgaagaagggactagcgggataacgaaaacgaactaaaatgaacataacaaattaataatagatcaaaatcgaatataaaaagtatgaacatcaccgctttctcttttctaaaaaccaaaaaaatgatcaaaatatctataaatacgaa

SEQ ID NO: 201095 - DNA, 3533 bp, Zea Mays
aataggtatatccccggaaaaggttaagatctgggatgatcgtaaacaagtgccattatccatttttaagccccatgatggtcaagctgtttattcagttgcttttcttacagcacctgaacgaccaaatcatataaatctaattacagcgggtcttctgaatcgagaagttaaaatttgggcttctactaatgaggatggctggttgttgccaagtgattctgagacttggaagtgtactcagacgttggaacttgttagttctctggaacctagagtcgaagaggcatttttcaaccaggttgcggtgctgccccaagcgagcctgattttgcttgcaaatgctaaaaagaacgctatttatgccgtgcatgttgagtatggcccagatcctgcttctactcgcttagactacatagcagatttcacagttgcaatgcctatattaagccttacaggaacacatgatagccaacctgatagtgaacaagttgttcaagtctattgtgttcaaactatggccattcagcaatatggtctagagctaccactctgtttgcctcctacagctgatagtactgggtttggaagagatcctgctatttctcgtgtttacgaggcacctctggaaatggcaggaacagagtcatctacaggaactagtttcacagattcttactctgtcagttctttgagtaaaccatcaactgttgaccagtctgcagagcttgatctgaaaccatcagctccaccgcttgcatactcagaaggtgatggttccgtgcctcttccatctgcacctcctgcaccgaagatggaggctcctggatcaggaccagcacctggaggtcgtggtatagatcaatcagcttttgactatacaacaaacagaaatgtggagcgtgatgttttgaaaagacaagatacacccatgcccattagaaaggatatcttaggtaaagatgagccaagagatggtcacagtgatgttccaatgcttcccaatccccgtttgatgtttcaggttggagggaatgctacgcatttggttactccatctgaaattatatcgggcactctctcgtcttctgaaaacaatgatgcttccaaatctgatggaggaaaaagtcaagatgtttccagcagaagctctcaggttccagaagtggaaccaaagcatattgatgagagtaaacaagatcaaaatttgggactcgaagctgtcaaagaaactcagattgtctgtgagaatatggagaaaactcggagttccttggaccaaactgttgaaatgatcagtgagcgctcagttacaactgataagtacagcgtggaagaatcacagtcatcatctgatcgaccgacatcagaccagactggtatcagtgaaaatgttctgaagaagtttgtggaaatgcctgagaaaattgattattcctctgcttctagggagcaatcatcttcatttacgaaagaggagaaagttttgcatcctcaaacatctggtcaaccgtcacctcctgtgagtgctttcaattcaactgagtcacatgagcctttgagctccacatacctaccaatcacagtcagctcctacccagaagttggtgccacacaagggatgctgcaacagctcatggggaggcaggaggacatggaaaagcagctgagtactgtggttcctgcatccatcgcaaaggagggcaaaagacttgagacatcattagggcgcactgtagagaaatcgatcaaagctaatattgatgcattttgggctcgtctccaggaggaaaacactaagcgtgaaaaggctgatagagatcgaatgcagcaatttgttactctcattacaagctcaataaataaggacttaccttctaatctggagaagtcacttaagaaagaaatttcttcacttgggcctgttgttgctcgtgcaattacgcctattattgagaagtgtctaacctctgctgtttctgattcagttcagaaagggttgggtgacaagttgttcaatcagctggaaaagtctattactggaaaacttgaagctacacttgccaggcaaatccaaatccagttccatacatctggaaaacaggctcttcaggatgctttacgtactagctttgaatcattgcttgttccagcgtttgagcaagcatgcaagacaatgtttgagcaaatagatggtgcatttcaaaagggaatgtctgagcactccaccgctattcagcatcaagtcgagtcttcacatagtccgttagcgctaactctaaaagaaatcatcaattctgcatcatccatcacccagagtttttcatcggagttacttgatggcaatcgcaagctactggcacttgttacttctgggaatgccatggcacataataccagtgctttgcagcccattaatggtcctatgggtggatcccaggaggttgaggctccgttagatcctatgaaagagctgggcagactgatatctgaacgcaagtttgacgaagcatttacaatggctcttcaaaggagtgatgtttccatagtatcgtggctatgctcccaggtatcttccttgcaccaaattgatcatctaagatgcaccctagttctccatattagaacaaccttgttttggccttgtgatgcttataccccccttgtacaggttgatttgcgggcattatgtgcaatggtcccagtacctcttaaccagggggtcctcctggccttattgcagcagctagcaattgacattcacaatgagacatcacgaaaggttcaatggatgacagatgttgccatggcaatcaacccagcagaccagatgatcgcggttcatgtgcggcctatctttgagcaagtctacaaccaactggcccaccagcggacactccctaccatgaccgcagcagatggcaccagcatccgtgtgatcatgcatgtaattaactcagttctgcttagctacaagtgattgtagctacgcaactgtgggaagtatggcctattctatcttgtatagagaaattttgaatggccacaacccacaacccaggagacattgtggccgagaatacttgcaagagggcggaggttactccttggtgtaaatttggcttctgtcgctcgtgaattcggactattgtagtaattgggcatcatcgaattcttcatttgacatgatcaccgggtcttgtatttccgtcataccttaatggaaatgggtcgaatatatcagttggactttgtagcacggacagtttggaaccaatagcagctgcttggtggtggttgttccacaaaattttgaagtccaatgtagacattgtcgggtcgcaactgcaaaattggaagtaatctgtttggctactcgacgacgatggatttgacatgttcttgtgccgatggagtcatgtgacgatgtggaattagcgtgcttttgagggatttgaggcaacaactcggctttcgatcaggattattcaggagttgccaagtgcccactgggtcaagctgctaaaatgcgg

SEQ ID NO: 201096 - DNA, 3476 bp, Zea Mays
tggaacagtgcagaaaccaactagccactatattgtataaataggtatatccccggaaaaggttaagatctgggatgatcgtaaacaagtgccattatccatttttaagccccatgatggtcaagctgtttattcagttgcttttcttacagcacctgaacgaccaaatcatataaatctaattacagcgggtcttctgaatcgagaagttaaaatttgggcttctactaatgaggatggctggttgttgccaagtgattctgagacttggaagtgtactcagacgttggaacttgttagttctctggaacctagagtcgaagaggcatttttcaaccaggttgcggtgctgccccaagcgagcctgattttgcttgcaaatgctaaaaagaacgctatttatgccgtgcatgttgagtatggcccagatcctgcttctactcgcttagactacatagcagatttcacagttgcaatgcctatattaagccttacaggaacacatgatagccaacctgatagtgaacaagttgttcaagtctattgtgttcaaactatggccattcagcaatatggtctagagctaccactctgtttgcctcctacagctgatagtactgggtttggaagagatcctgctatttctcgtgtttacgaggcacctctggaaatggcaggaacagagtcatctacaggaactagtttcacagattcttactctgtcagttctttgagtaaaccatcaactgttgaccagtctgcagagcttgatctgaaaccatcagctccaccgcttgcatactcagaaggtgatggttccgtgcctcttccatctgcacctcctgcaccgaagatggaggctcctggatcaggaccagcacctggaggtcgtggtatagatcaatcagcttttgactatacaacaaacagaaatgtggagcgtgatgttttgaaaagacaagatacacccatgcccattagaaaggatatcttaggtaaagatgagccaagagatggtcacagtgatgttccaatgcttcccaatccccgtttgatgtttcaggttggagggaatgctacgcatttggttactccatctgaaattatatcgggcactctctcgtcttctgaaaacaatgatgcttccaaatctgatggaggaaaaagtcaagatgtttccagcagaagctctcaggttccagaagtggaaccaaagcatattgatgagagtaaacaagatcaaaatttgggactcgaagctgtcaaagaaactcagattgtctgtgagaatatggagaaaactcggagttccttggaccaaactgttgaaatgatcagtgagcgctcagttacaactgataagtacagcgtggaagaatcacagtcatcatctgatcgaccgacatcagaccagactggtatcagtgaaaatgttctgaagaagtttgtggaaatgcctgagaaaattgattattcctctgcttctagggagcaatcatcttcatttacgaaagaggagaaagttttgcatcctcaaacatctggtcaaccgtcacctcctgtgagtgctttcaattcaactgagtcacatgagcctttgagctccacatacctaccaatcacagtcagctcctacccagaagttggtgccacacaagggatgctgcaacagctcatggggaggcaggaggacatggaaaagcagctgagtactgtggttcctgcatccatcgcaaaggagggcaaaagacttgagacatcattagggcgcactgtagagaaatcgatcaaagctaatattgatgcattttgggctcgtctccaggaggaaaacactaagcgtgaaaaggctgatagagatcgaatgcagcaatttgttactctcattacaagctcaataaataaggacttaccttctaatctggagaagtcacttaagaaagaaatttcttcacttgggcctgttgttgctcgtgcaattacgcctattattgagaagtgtctaacctctgctgtttctgattcagttcagaaagggttgggtgacaagttgttcaatcagctggaaaagtctattactggaaaacttgaagctacacttgccaggcaaatccaaatccagttccatacatctggaaaacaggctcttcaggatgctttacgtactagctttgaatcattgcttgttccagcgtttgagcaagcatgcaagacaatgtttgagcaaatagatggtgcatttcaaaagggaatgtctgagcactccaccgctattcagcatcaagtcgagtcttcacatagtccgttagcgctaactctaaaagaaatcatcaattctgcatcatccatcacccagagtttttcatcggagttacttgatggcaatcgcaagctactggcacttgttacttctgggaatgccatggcacataataccagtgctttgcagcccattaatggtcctatgggtggatcccaggaggtggttgttgaggctccgttagatcctatgaaagagctgggcagactgatatctgaacgcaagtttgacgaagcatttacaatggctcttcaaaggagtgatgtttccatagtatcgtggctatgctcccaggttgatttgcgggcattatgtgcaatggtcccagtacctcttaaccagggggtcctcctggccttattgcagcagctagcaattgacattcacaatgagacatcacgaaaggttcaatggatgacagatgttgccatggcaatcaacccagcagaccagatgatcgcggttcatgtgcggcctatctttgagcaagtctacaaccaactggcccaccagcggacactccctaccatgaccgcagcagatggcaccagcatccgtgtgatcatgcatgtaattaactcagttctgcttagctacaagtgattgtagctacgcaactgtgggaagtatggcctattctatcttgtatagagaaattttgaatggccacaacccacaacccaggagacattgtggccgagaatacttgcaagagggcggaggttactccttggtgtaaatttggcttctgtcgctcgtgaattcggactattgtagtaattgggcatcatcgaattcttcatttgacatgatcaccgggtcttgtatttccgtcataccttaatggaaatgggtcgaatatatcagttggactttgtagcacggacagtttggaaccaatagcagctgcttggtggtggttgttccacaaaattttgaagtccaatgtagacattgtcgggtcgcaactgcaaaattggaagtaatctgtttggctactcgacgacgatggatttgacatgttcttgtgccgatggagtcatgtgacgatgtggaattagcgtgcttttgagggatttgaggcaacaactcggctttcgatcaggattattcaggagttgccaagtgcccactgggtcaagctgctaaaatgcgg

SEQ ID NO: 201097 - DNA, 5406 bp, Zea Mays
caccgagtcaggacggggaaaggagaaaaatccacctcgccccttttccaccaggtcccagcccaagcctcttcgcctccgctagtacgcctccatggacgcgtaccagcaccagcgacgcttcgccggcgccggcgacgcaccgccgccgccgcctcacccctcccacccgagcgctcagtggtacccggcgcccccactgccataccatcctccccaccccggacacccctaccctccgcagcaccaccaccagtgggccccgccacccgacatgcagcaccagcaccatccgccgctgccgcagccctacgtgtaccaaccgccacccccgcccatggcgatgcagcaacagccgcccccgcctcctgggaacccctggccccctcaccacggcgccgggcagcacccgccgcctacctaccctcctcctccgccggggcaggcttggaccaatcactcatgggctcagaatcatggatatcaaggtcatgacaatgaggaagattgggctacaaaggctaaggcatgggttgctgctaaatctgttatgggaaaccaccagattcaacagcatgccatatccacaagtagaactgaaggtcatcataatggttaccatgatcagtatcagcaaccagctggtctgccaacagaagttacagaagctttgcacccaccagtacctcaatcaagtattgatcatgtgccatttccaatgacaggtcaacagagagaaacaaaccatttattagatagaggtccaatggtgtctccagcaaagaattttggttcattttcgtccacctatgagcaggaggtatcttataattattcttctgctccaggtatgccttgcttggcaatttaatttctttgcgcagcctgaatcataaaaggctggtcgctctgggtatgttaccagattcagttgtggaaagactttaaatctagagcgtcatttattttagaatagaaagtctggtacacttaacctatctctgtgatacttagttagcagtacctgttgtgagtactcattgcgtcccatttgaagcaccgttggttatatctattgtgtttgcctctatcaaatggagggaagaggaagacaaagacacgtattagtggttaaatgtatcaagatgttgacttaatggatcttttcattactgactataattgtatatcaaggattcaatagttactagcggtggtatatcatgtaaatgttatgtattgtccttaatgctgaaaaaaggacagacctagtgctggcggttcccacatgaggggtctgtggaaggaataatcgaggcaagccttgctcctgcattttgcacattcgcagagaatctgtgtcgaacccaggaccttttagctcagcaggaaggtttctaacagctgccagacccgtccttaatgctgaaaataagaagaaaaaactaactggtgcaatatatttcattgatggtgtttttactgtaaaataaagtgcagaagtgtacatttctttaaatgatcacttctacaatgtatttgagcattcatccttttctgctatatatagagctgaactcatttgtttgtcttgcataaagtacaatgatcatgatgagtaatattttttgtaaagaaaattctgactttgactttaccatgtaataataggtactgggaataatatgcttcaatatccaaactctcaagcacagccatttccaaccacggcagctgttcaaggtggattctcacagggttgccttagtatgcctgttcccttgacagaacagcctctttttgggcatgaaagacagccaattgatccaagtgaccaacctttggaatttaacagtaggaaagctcctgatttggcagtacatataaatgtcaattccaatatcccagctcctcaaacactagcacctaatcatgatgtagctgcaacctctacacattcatggacgccatctgctacagtagggtacctgcctcgagctcctgtgccaccacaaacagcacagatggatccttctgtgcatgctgcaccactttttggagcagcatctagttctagttatgtttcacctgcagcatttggtgttggtaatgtaacagaagtgttccctacagatccaaacactccttttagtgttgcagataaatcaaagaaacctccagtacctaactggcttcgggaagaacttttaaagaaaaaatcggaaccactgagtgcttcagcgcaaaactcagaaaacttaaatcccatggaagctaatgaggcagtacagacaataggaagacctgaccaaagtgacagcagaagcaatgattccgctaaatccactgaagacgatgacgatgatgaggatgaaattgaagcagctcgaatggcagcaatcaacaaggaaattaagcgtgtgttgactgaggtccttttgaaggttactgatgagctttttgatgagatagcaacaaaagttctaaatgaagacgactcagctgaatccaatgaagccactggtgttttcggatcaaaggagactggtctgggaagatcaagagccaaggcctcggctaaagttgttctccctgctaagtcaacaaatagttctgatcataaagatagtactgggttaagttcccctaaaggtgctcttctcggcctggctagttatgattcagatgatgacgacgatgctgacactgacagcaaggataagatgccaatatcaaatttatcttctaaagataatgctggtgctgtaaatactgaaggtgataaaagcactcttggtaaaagaaatgggaatcacaatgaacagaattcttcacttggaagttctccatcaggggaagatcttaaatctaataatcaaaactttcaaaggaatgcgaatgcagaacctgaacaaatgcatattcgtgatacagagaatggggagttccgtttcaaggccaagactcgtactgagccaaagggtgcatttgacagaatggatgagaaggcacatacgtatgcagaggtagatatccagaacagaaaaacctcttttggcaataatgctgaaaagcacaatgatttggaaagcagtcacagacattcagaaaagagcagcaaagaggactttgttaatgagttgaaggctgatcatacaaaagaactcgaatattctagagcagaaaaatataataacgatgacaaatacagcatgtatggaaatattgacaaaaggggtagctgcaaggagggaaaaggttctgatagtgctgcaaagcatgaatccgatacaagggagccacattacagaggtaactctaagcttgatggtgcaaagggagattggaaggatttgccgaaggatagagagagaaatagagatgatagaagggggaaaggaaaggatgaaaaggacgacaggttaaggcagatgacaagtcataacagcagaagttcacggtcacgatcaccaagggggagaagtcgtactagaaaggagaactcacatgttcgagggagtgtttcaagtgatgagccttctgatagtgtgaaaaagagaaagcattattcccataaaaccagcatgtcaccttcacccccaaaatctagaaacaggtacactgttcatgttgtctctctataatactagtgttggggtgtgtgtgctgtaatggggttctctccccctttcttattcttctattaatacaaagatgcgcagctctcctgtgtattccagaaaaaaaatactatgctaggaattattcttggattgagagaattttgaatgtggacagccccagtattcatacctattaatatgttttatggttggcattaagttctagtcacctagatttaaagaacacatcagctttttatgttttattatgaatgaagctgtccatgctagatgttcttgtcttcagttctactcattaaagaatgggatttatgtttatcataaggtggtacctggtaacactaaatgcgggtttctgctatatgctaatttgaaccatgctgctgttctttattggatatgtgatggcaagttgttgaatcacatagaaatggtttgttgtagatattttggatgtgatatgagcatgcaggtatcttctgcgtgaagaaacatcaggttcatatacctcttatccttacacttacccatttagtattatgtttcatctctagacgaatttcgcggtctccacatagcaagcattctcaccgcaggcattcgccttattcatcggctggcaggtaagagattaatcagttcttcctttgccattatactattactcgtgctgatggttcatcatgaaatttctatttgctttcagatttaggatgcaaactagattagctatcaatctttctgtggctgattatggaaattagattagctgcaaacaaaaataagtaataaggaatttaagaataaaatcgaaccttaggtatttttacagcacattcttataaaaaatattgtttcgatcttactaggaaccttgtttatgaaatgtgatattttatagttctcccagaaaagttgtgttatcttgagaaataaagagattttctgcacaatttctcctgggtaagctgaaaactgcgcatcgtaaatttgtagcctgcagaaaagttttcagtttagttgttttagatttaactgtacttgtcttgaactcttgggtattctggacgggaactgctgattctttcaaatccgggatcttcaattgtctgcaccagctgattcctttaaatctggaatcctctatctgttggcccacttgtacagtaactcgtgatttatacttccttaactgtgtctaatcattgcaggaagaggcggtcgagatcgagaactccggtcaaaaggagatagaaggcatggacagtttatccgacgagatctttgcctaaacattcctctgaaacaaccaaagacatttttgcggttctgctgttgtctatctagtgcgtcttttgctccgacaacataatggtagaacagcattcctacagtgacaaacatgaaggcgaggactggatgtaccttgatataagatgcacattgaactgtatcttgtttgatagatgagctatataactagctcacgcagctggctgtatgatctgtagttcccccgttatctgaattgttcatgtattaggccatgtactgctcagcagagctatgtagttagttgcacttgtatgacttcagcatgcctgttgccagttgtttgtttgtctatgcaggatttttttcccgtttcctacttttttgataaaaataaactgattcctgtgaaatctatatatgatttctctcaaattcctgccattccaaaggagaccttagtttgcaagtggaaggcaatctgctgtag

SEQ ID NO: 201098 - DNA, 4317 bp, Zea Mays
ccgagtcaggacggggaaaggagaaaaatccacctcgccccttttccaccaggtcccagcccaagcctcttcgcctccgctagtacgcctccatggacgcgtaccagcaccagcgacgcttcgccggcgccggcgacgcaccgccgccgccgcctcacccctcccacccgagcgctcagtggtacccggcgcccccactgccataccatcctccccaccccggacacccctaccctccgcagcaccaccaccagtgggccccgccacccgacatgcagcaccagcaccatccgccgctgccgcagccctacgtgtaccaaccgccacccccgcccatggcgatgcagcaacagccgcccccgcctcctgggaacccctggccccctcaccacggcgccgggcagcacccgccgcctacctaccctcctcctccgccggggcaggcttggaccaatcactcatgggctcagaatcatggatatcaaggtcatgacaatgaggaagattgggctacaaaggctaaggcatgggttgctgctaaatctgttatgggaaaccaccagattcaacagcatgccatatccacaagtagaactgaaggtcatcataatggttaccatgatcagtatcagcaaccagctggtctgccaacagaagttacagaagctttgcacccaccagtacctcaatcaagtattgatcatgtgccatttccaatgacaggtcaacagagagaaacaaaccatttattaggtaaagtatcttattgcccttgatctatatattttacttatggatgtgtaagtttcagaatggagctgaagattatattgcagatagaggtccaatggtgtctccagcaaagaattttggttcattttcgtccacctatgagcaggaggtatcttataattattcttctgctccaggtatgccttgcttggcaatttaatttctttgcgcagcctgaatcataaaaggctggtcgctctgggtatgttaccagattcagttgtggaaagactttaaatctagagcgtcatttattttagaatagaaagtctggtacacttaacctatctctgtgatacttagttagcagtacctgttgtgagtactcattgcgtcccatttgaagcaccgttggttatatctattgtgtttgcctctatcaaatggagggaagaggaagacaaagacacgtattagtggttaaatgtatcaagatgttgacttaatggatcttttcattactgactataattgtatatcaaggattcaatagttactagcggtggtatatcatgtaaatgttatgtattgtccttaatgctgaaaaaaggacagacctagtgctggcggttcccacatgaggggtctgtggaaggaataatcgaggcaagccttgctcctgcattttgcacattcgcagagaatctgtgtcgaacccaggaccttttagctcagcaggaaggtttctaacagctgccagacccgtccttaatgctgaaaataagaagaaaaaactaactggtgcaatatatttcattgatggtgtttttactgtaaaataaagtgcagaagtgtacatttctttaaatgatcacttctacaatgtatttgagcattcatccttttctgctatatatagagctgaactcatttgtttgtcttgcataaagtacaatgatcatgatgagtaatattttttgtaaagaaaattctgactttgactttaccatgtaataataggtactgggaataatatgcttcaatatccaaactctcaagcacagccatttccaaccacggcagctgttcaaggtggattctcacagggttgccttagtatgcctgttcccttgacagaacagcctctttttgggcatgaaagacagccaattgatccaagtgaccaacctttggaatttaacagtaggaaagctcctgatttggcagtacatataaatgtcaattccaatatcccagctcctcaaacactagcacctaatcatgatgtagctgcaacctctacacattcatggacgccatctgctacagtagggtacctgcctcgagctcctgtgccaccacaaacagcacagatggatccttctgtgcatgctgcaccactttttggagcagcatctagttctagttatgtttcacctgcagcatttggtgttggtaatgtaacagaagtgttccctacagatccaaacactccttttagtgttgcagataaatcaaagaaacctccagtacctaactggcttcgggaagaacttttaaagaaaaaatcggaaccactgagtgcttcagcgcaaaactcagaaaacttaaatcccatggaagctaatgaggcagtacagacaataggaagacctgaccaaagtgacagcagaagcaatgattccgctaaatccactgaagacgatgacgatgatgaggatgaaattgaagcagctcgaatggcagcaatcaacaaggaaattaagcgtgtgttgactgaggtccttttgaaggttactgatgagctttttgatgagatagcaacaaaagttctaaatgaagacgactcagctgaatccaatgaagccactggtgttttcggatcaaaggagactggtctgggaagatcaagagccaaggcctcggctaaagttgttctccctgctaagtcaacaaatagttctgatcataaagatagtactgggttaagttcccctaaaggtgctcttctcggcctggctagttatgattcagatgatgacgacgatgctgacactgacagcaaggataagatgccaatatcaaatttatcttctaaagataatgctggtgctgtaaatactgaaggtgataaaagcactcttggtaaaagaaatgggaatcacaatgaacagaattcttcacttggaagttctccatcaggggaagatcttaaatctaataatcaaaactttcaaaggaatgcgaatgcagaacctgaacaaatgcatattcgtgatacagagaatggggagttccgtttcaaggccaagactcgtactgagccaaagggtgcatttgacagaatggatgagaaggcacatacgtatgcagaggtagatatccagaacagaaaaacctcttttggcaataatgctgaaaagcacaatgatttggaaagcagtcacagacattcagaaaagagcagcaaagaggactttgttaatgagttgaaggctgatcatacaaaagaactcgaatattctagagcagaaaaatataataacgatgacaaatacagcatgtatggaaatattgacaaaaggggtagctgcaaggagggaaaaggttctgatagtgctgcaaagcatgaatccgatacaagggagccacattacagaggtaactctaagcttgatggtgcaaagggagattggaaggatttgccgaaggatagagagagaaatagagatgatagaagggggaaaggaaaggatgaaaaggacgacaggttaaggcagatgacaagtcataacagcagaagttcacggtcacgatcaccaagggggagaagtcgtactagaaaggagaactcacatgttcgagggagtgtttcaagtgatgagccttctgatagtgtgaaaaagagaaagcattattcccataaaaccagcatgtcaccttcacccccaaaatctagaaacagacgaatttcgcggtctccacatagcaagcattctcaccgcaggcattcgccttattcatcggctggcaggaagaggcggtcgagatcgagaactccggtcaaaaggagatagaaggcatggacagtttatccgacgagatctttgcctaaacattcctctgaaacaaccaaagacatttttgcggttctgctgttgtctatctagtgcgtcttttgctccgacaacataatggtagaacagcattcctacagtgacaaacatgaaggcgaggactggatgtaccttgatataagatgcacattgaactgtatcttgtttgatagatgagctatataactagctcacgcagctggctgtatgatctgtagttcccccgttatctgaattgttcatgtattaggccatgtactgctcagcagagctatgtagttagttgcacttgtatgacttcagcatgcctgttgccagttgtttgtttgtctatgcaggatttttttcccgtttcctacttttttgataaaaataaactgattcctgtgaaatctatatatgatttctctcaaattcctgccattccaaaggagaccttagtttgcaagtggaaggcaatctgctgtag

SEQ ID NO: 201099 - DNA, 4320 bp, Zea Mays
aaaatccacctcgccccttttccaccaggtcccagcccaagcctcttcgcctccgctagtacgcctccatggacgcgtaccagcaccagcgacgcttcgccggcgccggcgacgcaccgccgccgccgcctcacccctcccacccgagcgctcagtggtacccggcgcccccactgccataccatcctccccaccccggacacccctaccctccgcagcaccaccaccagtgggccccgccacccgacatgcagcaccagcaccatccgccgctgccgcagccctacgtgtaccaaccgccacccccgcccatggcgatgcagcaacagccgcccccgcctcctgggaacccctggccccctcaccacggcgccgggcagcacccgccgcctacctaccctcctcctccgccggggcaggcttggaccaatcactcatgggctcagaatcatggatatcaaggtcaacagagagaaacaaaccatttattagatagaggtccaatggtgtctccagcaaagaattttggttcattttcgtccacctatgagcaggaggtatcttataattattcttctgctccaggtactgggaataatatgcttcaatatccaaactctcaagcacagccatttccaaccacggcagctgttcaaggtggattctcacagggttgccttagtatgcctgttcccttgacagaacagcctctttttgggcatgaaagacagccaattgatccaagtgaccaacctttggaatttaacagtaggaaagctcctgatttggcagtacatataaatgtcaattccaatatcccagctcctcaaacactagcacctaatcatgatgtagctgcaacctctacacattcatggacgccatctgctacagtagggtacctgcctcgagctcctgtgccaccacaaacagcacagatggatccttctgtgcatgctgcaccactttttggagcagcatctagttctagttatgtttcacctgcagcatttggtgttggtaatgtaacagaagtgttccctacagatccaaacactccttttagtgttgcagataaatcaaagaaacctccagtacctaactggcttcgggaagaacttttaaagaaaaaatcggaaccactgagtgcttcagcgcaaaactcagaaaacttaaatcccatggaagctaatgaggcagtacagacaataggaagacctgaccaaagtgacagcagaagcaatgattccgctaaatccactgaagacgatgacgatgatgaggatgaaattgaagcagctcgaatggcagcaatcaacaaggaaattaagcgtgtgttgactgaggtccttttgaaggttactgatgagctttttgatgagatagcaacaaaagttctaaatgaagacgactcagctgaatccaatgaagccactggtgttttcggatcaaaggagactggtctgggaagatcaagagccaaggcctcggctaaagttgttctccctgctaagtcaacaaatagttctgatcataaagatagtactgggttaagttcccctaaaggtgctcttctcggcctggctagttatgattcagatgatgacgacgatgctgacactgacagcaaggataagatgccaatatcaaatttatcttctaaagataatgctggtgctgtaaatactgaaggtgataaaagcactcttggtaaaagaaatgggaatcacaatgaacagaattcttcacttggaagttctccatcaggggaagatcttaaatctaataatcaaaactttcaaaggaatgcgaatgcagaacctgaacaaatgcatattcgtgatacagagaatggggagttccgtttcaaggccaagactcgtactgagccaaagggtgcatttgacagaatggatgagaaggcacatacgtatgcagaggtagatatccagaacagaaaaacctcttttggcaataatgctgaaaagcacaatgatttggaaagcagtcacagacattcagaaaagagcagcaaagaggactttgttaatgagttgaaggctgatcatacaaaagaactcgaatattctagagcagaaaaatataataacgatgacaaatacagcatgtatggaaatattgacaaaaggggtagctgcaaggagggaaaaggttctgatagtgctgcaaagcatgaatccgatacaagggagccacattacagaggtaactctaagcttgatggtgcaaagggagattggaaggatttgccgaaggatagagagagaaatagagatgatagaagggggaaaggaaaggatgaaaaggacgacaggttaaggcagatgacaagtcataacagcagaagttcacggtcacgatcaccaagggggagaagtcgtactagaaaggagaactcacatgttcgagggagtgtttcaagtgatgagccttctgatagtgtgaaaaagagaaagcattattcccataaaaccagcatgtcaccttcacccccaaaatctagaaacaggtacactgttcatgttgtctctctataatactagtgttggggtgtgtgtgctgtaatggggttctctccccctttcttattcttctattaatacaaagatgcgcagctctcctgtgtattccagaaaaaaaatactatgctaggaattattcttggattgagagaattttgaatgtggacagccccagtattcatacctattaatatgttttatggttggcattaagttctagtcacctagatttaaagaacacatcagctttttatgttttattatgaatgaagctgtccatgctagatgttcttgtcttcagttctactcattaaagaatgggatttatgtttatcataaggtggtacctggtaacactaaatgcgggtttctgctatatgctaatttgaaccatgctgctgttctttattggatatgtgatggcaagttgttgaatcacatagaaatggtttgttgtagatattttggatgtgatatgagcatgcaggtatcttctgcgtgaagaaacatcaggttcatatacctcttatccttacacttacccatttagtattatgtttcatctctagacgaatttcgcggtctccacatagcaagcattctcaccgcaggcattcgccttattcatcggctggcaggtaagagattaatcagttcttcctttgccattatactattactcgtgctgatggttcatcatgaaatttctatttgctttcagatttaggatgcaaactagattagctatcaatctttctgtggctgattatggaaattagattagctgcaaacaaaaataagtaataaggaatttaagaataaaatcgaaccttaggtatttttacagcacattcttataaaaaatattgtttcgatcttactaggaaccttgtttatgaaatgtgatattttatagttctcccagaaaagttgtgttatcttgagaaataaagagattttctgcacaatttctcctgggtaagctgaaaactgcgcatcgtaaatttgtagcctgcagaaaagttttcagtttagttgttttagatttaactgtacttgtcttgaactcttgggtattctggacgggaactgctgattctttcaaatccgggatcttcaattgtctgcaccagctgattcctttaaatctggaatcctctatctgttggcccacttgtacagtaactcgtgatttatacttccttaactgtgtctaatcattgcaggaagaggcggtcgagatcgagaactccggtcaaaaggagatagaaggcatggacagtttatccgacgagatctttgcctaaacattcctctgaaacaaccaaagacatttttgcggttctgctgttgtctatctagtgcgtcttttgctccgacaacataatggtagaacagcattcctacagtgacaaacatgaaggcgaggactggatgtaccttgatataagatgcacattgaactgtatcttgtttgatagatgagctatataactagctcacgcagctggctgtatgatctgtagttcccccgttatctgaattgttcatgtattaggccatgtactgctcagcagagctatgtagttagttgcacttgtatgacttcagcatgcctgttgccagttgtttgtttgtctatgcaggatttttttcccgtttcctacttttttgataaaaataaactgattcctgtgaaatctatatatgatttctctcaaattcctgccattccaaaggagaccttagtttgcaagtggaaggcaatctgctgtag

SEQ ID NO: 201100 - DNA, 2950 bp, Zea Mays
cacccctaccctccgcagcaccaccaccagtgggccccgccacccgacatgcagcaccagcaccatccgccgctgccgcagccctacgtgtaccaaccgccacccccgcccatggcgatgcagcaacagccgcccccgcctcctgggaacccctggccccctcaccacggcgccgggcagcacccgccgcctacctaccctcctcctccgccggggcaggcttggaccaatcactcatgggctcagaatcatggatatcaaggtcaacagagagaaacaaaccatttattagatagaggtccaatggtgtctccagcaaagaattttggttcattttcgtccacctatgagcaggaggtatcttataattattcttctgctccaggtactgggaataatatgcttcaatatccaaactctcaagcacagccatttccaaccacggcagctgttcaaggtggattctcacagggttgccttagtatgcctgttcccttgacagaacagcctctttttgggcatgaaagacagccaattgatccaagtgaccaacctttggaatttaacagtaggaaagctcctgatttggcagtacatataaatgtcaattccaatatcccagctcctcaaacactagcacctaatcatgatgtagctgcaacctctacacattcatggacgccatctgctacagtagggtacctgcctcgagctcctgtgccaccacaaacagcacagatggatccttctgtgcatgctgcaccactttttggagcagcatctagttctagttatgtttcacctgcagcatttggtgttggtaatgtaacagaagtgttccctacagatccaaacactccttttagtgttgcagataaatcaaagaaacctccagtacctaactggcttcgggaagaacttttaaagaaaaaatcggaaccactgagtgcttcagcgcaaaactcagaaaacttaaatcccatggaagctaatgaggcagtacagacaataggaagacctgaccaaagtgacagcagaagcaatgattccgctaaatccactgaagacgatgacgatgatgaggatgaaattgaagcagctcgaatggcagcaatcaacaaggaaattaagcgtgtgttgactgaggtccttttgaaggttactgatgagctttttgatgagatagcaacaaaagttctaaatgaagacgactcagctgaatccaatgaagccactggtgttttcggatcaaaggagactggtctgggaagatcaagagccaaggcctcggctaaagttgttctccctgctaagtcaacaaatagttctgatcataaagatagtactgggttaagttcccctaaaggtgctcttctcggcctggctagttatgattcagatgatgacgacgatgctgacactgacagcaaggataagatgccaatatcaaatttatcttctaaagataatgctggtgctgtaaatactgaaggtgataaaagcactcttggtaaaagaaatgggaatcacaatgaacagaattcttcacttggaagttctccatcaggggaagatcttaaatctaataatcaaaactttcaaaggaatgcgaatgcagaacctgaacaaatgcatattcgtgatacagagaatggggagttccgtttcaaggccaagactcgtactgagccaaagggtgcatttgacagaatggatgagaaggcacatacgtatgcagaggtagatatccagaacagaaaaacctcttttggcaataatgctgaaaagcacaatgatttggaaagcagtcacagacattcagaaaagagcagcaaagaggactttgttaatgagttgaaggctgatcatacaaaagaactcgaatattctagagcagaaaaatataataacgatgacaaatacagcatgtatggaaatattgacaaaaggggtagctgcaaggagggaaaaggttctgatagtgctgcaaagcatgaatccgatacaagggagccacattacagaggtaactctaagcttgatggtgcaaagggagattggaaggatttgccgaaggatagagagagaaatagagatgatagaagggggaaaggaaaggatgaaaaggacgacaggttaaggcagatgacaagtcataacagcagaagttcacggtcacgatcaccaagggggagaagtcgtactagaaaggagaactcacatgttcgagggagtgtttcaagtgatgagccttctgatagtgtgaaaaagagaaagcattattcccataaaaccagcatgtcaccttcacccccaaaatctagaaacagacgaatttcgcggtctccacatagcaagcattctcaccgcaggcattcgccttattcatcggctggcaggaagaggcggtcgagatcgagaactccggtcaaaaggagatagaaggcatggacagtttatccgacgagatctttgcctaaacattcctctgaaacaaccaaagacatttttgcggttctgctgttgtctatctagtgcgtcttttgctccgacaacataatggtagaacagcattcctacagtgacaaacatgaaggcgaggactggatgtaccttgatataagatgcacattgaactgtatcttgtttgatagatgagctatataactagctcacgcagctggctgtatgatctgtagttcccccgttatctgaattgttcatgtattaggccatgtactgctcagcagagctatgtagttagttgcacttgtatgacttcagcatgcctgttgccagttgtttgtttgtctatgcaggatttttttcccgtttcctacttttttgataaaaataaactgattcctgtgaaatctatatatgatttctctcaaattcctgccattccaaaggagaccttagtttgcaagtggaaggcaatctgctgtag

SEQ ID NO: 201101 - DNA, 3774 bp, Zea Mays
atggcgatgcagcaacagccgcccccgcctcctgggaacccctggccccctcaccacggcgccgggcagcacccgccgcctacctaccctcctcctccgccggggcaggcttggaccaatcactcatgggctcagaatcatggatatcaaggtcatgacaatgaggaagattgggctacaaaggctaaggcatgggttgctgctaaatctgttatgggaaaccaccagattcaacagcatgccatatccacaagtagaactgaaggtcatcataatggttaccatgatcagtatcagcaaccagctggtctgccaacagaagttacagaagctttgcacccaccagtacctcaatcaagtattgatcatgtgccatttccaatgacaggtcaacagagagaaacaaaccatttattagatagaggtccaatggtgtctccagcaaagaattttggttcattttcgtccacctatgagcaggaggtatcttataattattcttctgctccaggtactgggaataatatgcttcaatatccaaactctcaagcacagccatttccaaccacggcagctgttcaaggtggattctcacagggttgccttagtatgcctgttcccttgacagaacagcctctttttgggcatgaaagacagccaattgatccaagtgaccaacctttggaatttaacagtaggaaagctcctgatttggcagtacatataaatgtcaattccaatatcccagctcctcaaacactagcacctaatcatgatgtagctgcaacctctacacattcatggacgccatctgctacagtagggtacctgcctcgagctcctgtgccaccacaaacagcacagatggatccttctgtgcatgctgcaccactttttggagcagcatctagttctagttatgtttcacctgcagcatttggtgttggtaatgtaacagaagtgttccctacagatccaaacactccttttagtgttgcagataaatcaaagaaacctccagtacctaactggcttcgggaagaacttttaaagaaaaaatcggaaccactgagtgcttcagcgcaaaactcagaaaacttaaatcccatggaagctaatgaggcagtacagacaataggaagacctgaccaaagtgacagcagaagcaatgattccgctaaatccactgaagacgatgacgatgatgaggatgaaattgaagcagctcgaatggcagcaatcaacaaggaaattaagcgtgtgttgactgaggtccttttgaaggttactgatgagctttttgatgagatagcaacaaaagttctaaatgaagacgactcagctgaatccaatgaagccactggtgttttcggatcaaaggagactggtctgggaagatcaagagccaaggcctcggctaaagttgttctccctgctaagtcaacaaatagttctgatcataaagatagtactgggttaagttcccctaaaggtgctcttctcggcctggctagttatgattcagatgatgacgacgatgctgacactgacagcaaggataagatgccaatatcaaatttatcttctaaagataatgctggtgctgtaaatactgaaggtgataaaagcactcttggtaaaagaaatgggaatcacaatgaacagaattcttcacttggaagttctccatcaggggaagatcttaaatctaataatcaaaactttcaaaggaatgcgaatgcagaacctgaacaaatgcatattcgtgatacagagaatggggagttccgtttcaaggccaagactcgtactgagccaaagggtgcatttgacagaatggatgagaaggcacatacgtatgcagaggtagatatccagaacagaaaaacctcttttggcaataatgctgaaaagcacaatgatttggaaagcagtcacagacattcagaaaagagcagcaaagaggactttgttaatgagttgaaggctgatcatacaaaagaactcgaatattctagagcagaaaaatataataacgatgacaaatacagcatgtatggaaatattgacaaaaggggtagctgcaaggagggaaaaggttctgatagtgctgcaaagcatgaatccgatacaagggagccacattacagaggtaactctaagcttgatggtgcaaagggagattggaaggatttgccgaaggatagagagagaaatagagatgatagaagggggaaaggaaaggatgaaaaggacgacaggttaaggcagatgacaagtcataacagcagaagttcacggtcacgatcaccaagggggagaagtcgtactagaaaggagaactcacatgttcgagggagtgtttcaagtgatgagccttctgatagtgtgaaaaagagaaagcattattcccataaaaccagcatgtcaccttcacccccaaaatctagaaacagatattttggatgtgatatgagcatgcaggtatcttctgcgtgaagaaacatcaggttcatatacctcttatccttacacttacccatttagtattatgtttcatctctagacgaatttcgcggtctccacatagcaagcattctcaccgcaggcattcgccttattcatcggctggcaggtaagagattaatcagttcttcctttgccattatactattactcgtgctgatggttcatcatgaaatttctatttgctttcagatttaggatgcaaactagattagctatcaatctttctgtggctgattatggaaattagattagctgcaaacaaaaataagtaataaggaatttaagaataaaatcgaaccttaggtatttttacagcacattcttataaaaaatattgtttcgatcttactaggaaccttgtttatgaaatgtgatattttatagttctcccagaaaagttgtgttatcttgagaaataaagagattttctgcacaatttctcctgggtaagctgaaaactgcgcatcgtaaatttgtagcctgcagaaaagttttcagtttagttgttttagatttaactgtacttgtcttgaactcttgggtattctggacgggaactgctgattctttcaaatccgggatcttcaattgtctgcaccagctgattcctttaaatctggaatcctctatctgttggcccacttgtacagtaactcgtgatttatacttccttaactgtgtctaatcattgcaggaagaggcggtcgagatcgagaactccggtcaaaaggagatagaaggcatggacagtttatccgacgagatctttgcctaaacattcctctgaaacaaccaaagacatttttgcggttctgctgttgtctatctagtgcgtcttttgctccgacaacataatggtagaacagcattcctacagtgacaaacatgaaggcgaggactggatgtaccttgatataagatgcacattgaactgtatcttgtttgatagatgagctatataactagctcacgcagctggctgtatgatctgtagttcccccgttatctgaattgttcatgtattaggccatgtactgctcagcagagctatgtagttagttgcacttgtatgacttcagcatgcctgttgccagttgtttgtttgtctatgcaggatttttttcccgtttcctacttttttgataaaaataaactgattcctgtgaaatctatatatgatttctctcaaattcctgccattccaaaggagaccttagtttgcaagtggaaggcaatctgctgtag

SEQ ID NO: 201102 - DNA, 3664 bp, Zea Mays
atggcgatgcagcaacagccgcccccgcctcctgggaacccctggccccctcaccacggcgccgggcagcacccgccgcctacctaccctcctcctccgccggggcaggcttggaccaatcactcatgggctcagaatcatggatatcaaggtcatgacaatgaggaagattgggctacaaaggctaaggcatgggttgctgctaaatctgttatgggaaaccaccagattcaacagcatgccatatccacaagtagaactgaaggtcatcataatggttaccatgatcagtatcagcaaccagctggtctgccaacagaagttacagaagctttgcacccaccagtacctcaatcaagtattgatcatgtgccatttccaatgacaggtcaacagagagaaacaaaccatttattagatagaggtccaatggtgtctccagcaaagaattttggttcattttcgtccacctatgagcaggaggtatcttataattattcttctgctccaggtactgggaataatatgcttcaatatccaaactctcaagcacagccatttccaaccacggcagctgttcaaggtggattctcacagggttgccttagtatgcctgttcccttgacagaacagcctctttttgggcatgaaagacagccaattgatccaagtgaccaacctttggaatttaacagtaggaaagctcctgatttggcagtacatataaatgtcaattccaatatcccagctcctcaaacactagcacctaatcatgatgtagctgcaacctctacacattcatggacgccatctgctacagtagggtacctgcctcgagctcctgtgccaccacaaacagcacagatggatccttctgtgcatgctgcaccactttttggagcagcatctagttctagttatgtttcacctgcagcatttggtgttggtaatgtaacagaagtgttccctacagatccaaacactccttttagtgttgcagataaatcaaagaaacctccagtacctaactggcttcgggaagaacttttaaagaaaaaatcggaaccactgagtgcttcagcgcaaaactcagaaaacttaaatcccatggaagctaatgaggcagtacagacaataggaagacctgaccaaagtgacagcagaagcaatgattccgctaaatccactgaagacgatgacgatgatgaggatgaaattgaagcagctcgaatggcagcaatcaacaaggaaattaagcgtgtgttgactgaggtccttttgaaggttactgatgagctttttgatgagatagcaacaaaagttctaaatgaagacgactcagctgaatccaatgaagccactggtgttttcggatcaaaggagactggtctgggaagatcaagagccaaggcctcggctaaagttgttctccctgctaagtcaacaaatagttctgatcataaagatagtactgggttaagttcccctaaaggtgctcttctcggcctggctagttatgattcagatgatgacgacgatgctgacactgacagcaaggataagatgccaatatcaaatttatcttctaaagataatgctggtgctgtaaatactgaaggtgataaaagcactcttggtaaaagaaatgggaatcacaatgaacagaattcttcacttggaagttctccatcaggggaagatcttaaatctaataatcaaaactttcaaaggaatgcgaatgcagaacctgaacaaatgcatattcgtgatacagagaatggggagttccgtttcaaggccaagactcgtactgagccaaagggtgcatttgacagaatggatgagaaggcacatacgtatgcagaggtagatatccagaacagaaaaacctcttttggcaataatgctgaaaagcacaatgatttggaaagcagtcacagacattcagaaaagagcagcaaagaggactttgttaatgagttgaaggctgatcatacaaaagaactcgaatattctagagcagaaaaatataataacgatgacaaatacagcatgtatggaaatattgacaaaaggggtagctgcaaggagggaaaaggttctgatagtgctgcaaagcatgaatccgatacaagggagccacattacagaggtaactctaagcttgatggtgcaaagggagattggaaggatttgccgaaggatagagagagaaatagagatgatagaagggggaaaggaaaggatgaaaaggacgacaggttaaggcagatgacaagtcataacagcagaagttcacggtcacgatcaccaagggggagaagtcgtactagaaaggagaactcacatgttcgagggagtgtttcaagtgatgagccttctgatagtgtgaaaaagagaaagcattattcccataaaaccagcatgtcaccttcacccccaaaatctagaaacagacgaatttcgcggtctccacatagcaagcattctcaccgcaggcattcgccttattcatcggctggcaggtaagagattaatcagttcttcctttgccattatactattactcgtgctgatggttcatcatgaaatttctatttgctttcagatttaggatgcaaactagattagctatcaatctttctgtggctgattatggaaattagattagctgcaaacaaaaataagtaataaggaatttaagaataaaatcgaaccttaggtatttttacagcacattcttataaaaaatattgtttcgatcttactaggaaccttgtttatgaaatgtgatattttatagttctcccagaaaagttgtgttatcttgagaaataaagagattttctgcacaatttctcctgggtaagctgaaaactgcgcatcgtaaatttgtagcctgcagaaaagttttcagtttagttgttttagatttaactgtacttgtcttgaactcttgggtattctggacgggaactgctgattctttcaaatccgggatcttcaattgtctgcaccagctgattcctttaaatctggaatcctctatctgttggcccacttgtacagtaactcgtgatttatacttccttaactgtgtctaatcattgcaggaagaggcggtcgagatcgagaactccggtcaaaaggagatagaaggcatggacagtttatccgacgagatctttgcctaaacattcctctgaaacaaccaaagacatttttgcggttctgctgttgtctatctagtgcgtcttttgctccgacaacataatggtagaacagcattcctacagtgacaaacatgaaggcgaggactggatgtaccttgatataagatgcacattgaactgtatcttgtttgatagatgagctatataactagctcacgcagctggctgtatgatctgtagttcccccgttatctgaattgttcatgtattaggccatgtactgctcagcagagctatgtagttagttgcacttgtatgacttcagcatgcctgttgccagttgtttgtttgtctatgcaggatttttttcccgtttcctacttttttgataaaaataaactgattcctgtgaaatctatatatgatttctctcaaattcctgccattccaaaggagaccttagtttgcaagtggaaggcaatctgctgtag

SEQ ID NO: 201103 - DNA, 4810 bp, Zea Mays
atggcgatgcagcaacagccgcccccgcctcctgggaacccctggccccctcaccacggcgccgggcagcacccgccgcctacctaccctcctcctccgccggggcaggcttggaccaatcactcatgggctcagaatcatggatatcaaggtttactcttatatgtacctctgtttctttcatatataattttgcaaatcacgacgagtttagtttgatatgctatgttgtggaatttctactaaacattctatcctaatgcttattgacgtgggagtttttttttgctaaagattctattatacacacatttcaaccttgtttgtgaaaacacaatatctcaatactggtgtataacacatttctgaaactgcaaatatatatccatcgtggccatgttaatactggtgttgttattcaagtttaatcttagttggaaatttctttgcaccacttgattgtggtgctactgctatctgtcatgtattagtgactacacaggagatgtttactttaaaatatttagcctaacagatttactgtcgtgtaattcgctttctgtatacaaatctcttgagaactatttgttgataaatcactattaagtgattggttttgcatactcttgacgtgactgttattttcttatcttattatgagtgctttcttacataataagttcttggtagtttttggtgcgatactttgtttttatactggactaaaacgttttcttgtttgtcgatggaccagttgttcatttggggggccttgtcattaaatctatttaggctactctcaatgaaataaactttaaacatagcgtaagatttactatagtcaatcaactttagagagacttctgaagcagaataaatttcttgcgccgataaatcaattgttagtatgacgatagtttctctatttccttaaaaattaaataatggaaggtcatgacaatgaggaagattgggctacaaaggctaaggcatgggttgctgctaaatctgttatgggaaaccaccagattcaacagcatgccatatccacaagtagaactgaaggtcatcataatggttaccatgatcagtatcagcaaccagctggtctgccaacagaagttacagaagctttgcacccaccagtacctcaatcaagtattgatcatgtgccatttccaatgacaggtcaacagagagaaacaaaccatttattaggtaaagtatcttattgcccttgatctatatattttacttatggatgtgtaagtttcagaatggagctgaagattatattgcagatagaggtccaatggtgtctccagcaaagaattttggttcattttcgtccacctatgagcaggaggtatcttataattattcttctgctccaggtatgccttgcttggcaatttaatttctttgcgcagcctgaatcataaaaggctggtcgctctgggtatgttaccagattcagttgtggaaagactttaaatctagagcgtcatttattttagaatagaaagtctggtacacttaacctatctctgtgatacttagttagcagtacctgttgtgagtactcattgcgtcccatttgaagcaccgttggttatatctattgtgtttgcctctatcaaatggagggaagaggaagacaaagacacgtattagtggttaaatgtatcaagatgttgacttaatggatcttttcattactgactataattgtatatcaaggattcaatagttactagcggtggtatatcatgtaaatgttatgtattgtccttaatgctgaaaaaaggacagacctagtgctggcggttcccacatgaggggtctgtggaaggaataatcgaggcaagccttgctcctgcattttgcacattcgcagagaatctgtgtcgaacccaggaccttttagctcagcaggaaggtttctaacagctgccagacccgtccttaatgctgaaaataagaagaaaaaactaactggtgcaatatatttcattgatggtgtttttactgtaaaataaagtgcagaagtgtacatttctttaaatgatcacttctacaatgtatttgagcattcatccttttctgctatatatagagctgaactcatttgtttgtcttgcataaagtacaatgatcatgatgagtaatattttttgtaaagaaaattctgactttgactttaccatgtaataataggtactgggaataatatgcttcaatatccaaactctcaagcacagccatttccaaccacggcagctgttcaaggtggattctcacagggttgccttagtatgcctgttcccttgacagaacagcctctttttgggcatgaaagacagccaattgatccaagtgaccaacctttggaatttaacagtaggaaagctcctgatttggcagtacatataaatgtcaattccaatatcccagctcctcaaacactagcacctaatcatgatgtagctgcaacctctacacattcatggacgccatctgctacagtagggtacctgcctcgagctcctgtgccaccacaaacagcacagatggatccttctgtgcatgctgcaccactttttggagcagcatctagttctagttatgtttcacctgcagcatttggtgttggtaatgtaacagaagtgttccctacagatccaaacactccttttagtgttgcagataaatcaaagaaacctccagtacctaactggcttcgggaagaacttttaaagaaaaaatcggaaccactgagtgcttcagcgcaaaactcagaaaacttaaatcccatggaagctaatgaggcagtacagacaataggaagacctgaccaaagtgacagcagaagcaatgattccgctaaatccactgaagacgatgacgatgatgaggatgaaattgaagcagctcgaatggcagcaatcaacaaggaaattaagcgtgtgttgactgaggtccttttgaaggttactgatgagctttttgatgagatagcaacaaaagttctaaatgaagacgactcagctgaatccaatgaagccactggtgttttcggatcaaaggagactggtctgggaagatcaagagccaaggcctcggctaaagttgttctccctgctaagtcaacaaatagttctgatcataaagatagtactgggttaagttcccctaaaggtgctcttctcggcctggctagttatgattcagatgatgacgacgatgctgacactgacagcaaggataagatgccaatatcaaatttatcttctaaagataatgctggtgctgtaaatactgaaggtgataaaagcactcttggtaaaagaaatgggaatcacaatgaacagaattcttcacttggaagttctccatcaggggaagatcttaaatctaataatcaaaactttcaaaggaatgcgaatgcagaacctgaacaaatgcatattcgtgatacagagaatggggagttccgtttcaaggccaagactcgtactgagccaaagggtgcatttgacagaatggatgagaaggcacatacgtatgcagaggtagatatccagaacagaaaaacctcttttggcaataatgctgaaaagcacaatgatttggaaagcagtcacagacattcagaaaagagcagcaaagaggactttgttaatgagttgaaggctgatcatacaaaagaactcgaatattctagagcagaaaaatataataacgatgacaaatacagcatgtatggaaatattgacaaaaggggtagctgcaaggagggaaaaggttctgatagtgctgcaaagcatgaatccgatacaagggagccacattacagaggtaactctaagcttgatggtgcaaagggagattggaaggatttgccgaaggatagagagagaaatagagatgatagaagggggaaaggaaaggatgaaaaggacgacaggttaaggcagatgacaagtcataacagcagaagttcacggtcacgatcaccaagggggagaagtcgtactagaaaggagaactcacatgttcgagggagtgtttcaagtgatgagccttctgatagtgtgaaaaagagaaagcattattcccataaaaccagcatgtcaccttcacccccaaaatctagaaacagatattttggatgtgatatgagcatgcagacgaatttcgcggtctccacatagcaagcattctcaccgcaggcattcgccttattcatcggctggcaggaagaggcggtcgagatcgagaactccggtcaaaaggagatagaaggcatggacagtttatccgacgagatctttgcctaaacattcctctgaaacaaccaaagacatttttgcggttctgctgttgtctatctagtgcgtcttttgctccgacaacataatggtagaacagcattcctacagtgacaaacatgaaggcgaggactggatgtaccttgatataagatgcacattgaactgtatcttgtttgatagatgagctatataactagctcacgcagctggctgtatgatctgtagttcccccgttatctgaattgttcatgtattaggccatgtactgctcagcagagctatgtagttagttgcacttgtatgacttcagcatgcctgttgccagttgtttgtttgtctatgcaggatttttttcccgtttcctacttttttgataaaaataaactgattcctgtgaaatctatatatgatttctctcaaattcctgccattccaaaggagaccttagtttgcaagtggaaggcaatctgctgtag

SEQ ID NO: 201104 - DNA, 4218 bp, Zea Mays
atggcgatgcagcaacagccgcccccgcctcctgggaacccctggccccctcaccacggcgccgggcagcacccgccgcctacctaccctcctcctccgccggggcaggcttggaccaatcactcatgggctcagaatcatggatatcaaggtcatgacaatgaggaagattgggctacaaaggctaaggcatgggttgctgctaaatctgttatgggaaaccaccagattcaacagcatgccatatccacaagtagaactgaaggtcatcataatggttaccatgatcagtatcagcaaccagctggtctgccaacagaagttacagaagctttgcacccaccagtacctcaatcaagtattgatcatgtgccatttccaatgacaggtcaacagagagaaacaaaccatttattagatagaggtccaatggtgtctccagcaaagaattttggttcattttcgtccacctatgagcaggaggtactgggaataatatgcttcaatatccaaactctcaagcacagccatttccaaccacggcagctgttcaaggtggattctcacagggttgccttagtatgcctgttcccttgacagaacagcctctttttgggcatgaaagacagccaattgatccaagtgaccaacctttggaatttaacagtaggaaagctcctgatttggcagtacatataaatgtcaattccaatatcccagctcctcaaacactagcacctaatcatgatgtagctgcaacctctacacattcatggacgccatctgctacagtagggtacctgcctcgagctcctgtgccaccacaaacagcacagatggatccttctgtgcatgctgcaccactttttggagcagcatctagttctagttatgtttcacctgcagcatttggtgttggtaatgtaacagaagtgttccctacagatccaaacactccttttagtgttgcagataaatcaaagaaacctccagtacctaactggcttcgggaagaacttttaaagaaaaaatcggaaccactgagtgcttcagcgcaaaactcagaaaacttaaatcccatggaagctaatgaggcagtacagacaataggaagacctgaccaaagtgacagcagaagcaatgattccgctaaatccactgaagacgatgacgatgatgaggatgaaattgaagcagctcgaatggcagcaatcaacaaggaaattaagcgtgtgttgactgaggtccttttgaaggttactgatgagctttttgatgagatagcaacaaaagttctaaatgaagacgactcagctgaatccaatgaagccactggtgttttcggatcaaaggagactggtctgggaagatcaagagccaaggcctcggctaaagttgttctccctgctaagtcaacaaatagttctgatcataaagatagtactgggttaagttcccctaaaggtgctcttctcggcctggctagttatgattcagatgatgacgacgatgctgacactgacagcaaggataagatgccaatatcaaatttatcttctaaagataatgctggtgctgtaaatactgaaggtgataaaagcactcttggtaaaagaaatgggaatcacaatgaacagaattcttcacttggaagttctccatcaggggaagatcttaaatctaataatcaaaactttcaaaggaatgcgaatgcagaacctgaacaaatgcatattcgtgatacagagaatggggagttccgtttcaaggccaagactcgtactgagccaaagggtgcatttgacagaatggatgagaaggcacatacgtatgcagaggtagatatccagaacagaaaaacctcttttggcaataatgctgaaaagcacaatgatttggaaagcagtcacagacattcagaaaagagcagcaaagaggactttgttaatgagttgaaggctgatcatacaaaagaactcgaatattctagagcagaaaaatataataacgatgacaaatacagcatgtatggaaatattgacaaaaggggtagctgcaaggagggaaaaggttctgatagtgctgcaaagcatgaatccgatacaagggagccacattacagaggtaactctaagcttgatggtgcaaagggagattggaaggatttgccgaaggatagagagagaaatagagatgatagaagggggaaaggaaaggatgaaaaggacgacaggttaaggcagatgacaagtcataacagcagaagttcacggtcacgatcaccaagggggagaagtcgtactagaaaggagaactcacatgttcgagggagtgtttcaagtgatgagccttctgatagtgtgaaaaagagaaagcattattcccataaaaccagcatgtcaccttcacccccaaaatctagaaacaggtacactgttcatgttgtctctctataatactagtgttggggtgtgtgtgctgtaatggggttctctccccctttcttattcttctattaatacaaagatgcgcagctctcctgtgtattccagaaaaaaaatactatgctaggaattattcttggattgagagaattttgaatgtggacagccccagtattcatacctattaatatgttttatggttggcattaagttctagtcacctagatttaaagaacacatcagctttttatgttttattatgaatgaagctgtccatgctagatgttcttgtcttcagttctactcattaaagaatgggatttatgtttatcataaggtggtacctggtaacactaaatgcgggtttctgctatatgctaatttgaaccatgctgctgttctttattggatatgtgatggcaagttgttgaatcacatagaaatggtttgttgtagatattttggatgtgatatgagcatgcaggtatcttctgcgtgaagaaacatcaggttcatatacctcttatccttacacttacccatttagtattatgtttcatctctagacgaatttcgcggtctccacatagcaagcattctcaccgcaggcattcgccttattcatcggctggcaggtaagagattaatcagttcttcctttgccattatactattactcgtgctgatggttcatcatgaaatttctatttgctttcagatttaggatgcaaactagattagctatcaatctttctgtggctgattatggaaattagattagctgcaaacaaaaataagtaataaggaatttaagaataaaatcgaaccttaggtatttttacagcacattcttataaaaaatattgtttcgatcttactaggaaccttgtttatgaaatgtgatattttatagttctcccagaaaagttgtgttatcttgagaaataaagagattttctgcacaatttctcctgggtaagctgaaaactgcgcatcgtaaatttgtagcctgcagaaaagttttcagtttagttgttttagatttaactgtacttgtcttgaactcttgggtattctggacgggaactgctgattctttcaaatccgggatcttcaattgtctgcaccagctgattcctttaaatctggaatcctctatctgttggcccacttgtacagtaactcgtgatttatacttccttaactgtgtctaatcattgcaggaagaggcggtcgagatcgagaactccggtcaaaaggagatagaaggcatggacagtttatccgacgagatctttgcctaaacattcctctgaaacaaccaaagacatttttgcggttctgctgttgtctatctagtgcgtcttttgctccgacaacataatggtagaacagcattcctacagtgacaaacatgaaggcgaggactggatgtaccttgatataagatgcacattgaactgtatcttgtttgatagatgagctatataactagctcacgcagctggctgtatgatctgtagttcccccgttatctgaattgttcatgtattaggccatgtactgctcagcagagctatgtagttagttgcacttgtatgacttcagcatgcctgttgccagttgtttgtttgtctatgcaggatttttttcccgtttcctacttttttgataaaaataaactgattcctgtgaaatctatatatgatttctctcaaattcctgccattccaaaggagaccttagtttgcaagtggaaggcaatctgctgtag

SEQ ID NO: 201105 - DNA, 5801 bp, Zea Mays
gtttactcttatatgtacctctgtttctttcatatataattttgcaaatcacgacgagtttagtttgatatgctatgttgtggaatttctactaaacattctatcctaatgcttattgacgtgggagtttttttttgctaaagattctattatacacacatttcaaccttgtttgtgaaaacacaatatctcaatactggtgtataacacatttctgaaactgcaaatatatatccatcgtggccatgttaatactggtgttgttattcaagtttaatcttagttggaaatttctttgcaccacttgattgtggtgctactgctatctgtcatgtattagtgactacacaggagatgtttactttaaaatatttagcctaacagatttactgtcgtgtaattcgctttctgtatacaaatctcttgagaactatttgttgataaatcactattaagtgattggttttgcatactcttgacgtgactgttattttcttatcttattatgagtgctttcttacataataagttcttggtagtttttggtgcgatactttgtttttatactggactaaaacgttttcttgtttgtcgatggaccagttgttcatttggggggccttgtcattaaatctatttaggctactctcaatgaaataaactttaaacatagcgtaagatttactatagtcaatcaactttagagagacttctgaagcagaataaatttcttgcgccgataaatcaattgttagtatgacgatagtttctctatttccttaaaaattaaataatggaaggtcatgacaatgaggaagattgggctacaaaggctaaggcatgggttgctgctaaatctgttatgggaaaccaccagattcaacagcatgccatatccacaagtagaactgaaggtcatcataatggttaccatgatcagtatcagcaaccagctggtctgccaacagaagttacagaagctttgcacccaccagtacctcaatcaagtattgatcatgtgccatttccaatgacaggtcaacagagagaaacaaaccatttattaggtaaagtatcttattgcccttgatctatatattttacttatggatgtgtaagtttcagaatggagctgaagattatattgcagatagaggtccaatggtgtctccagcaaagaattttggttcattttcgtccacctatgagcaggaggtatcttataattattcttctgctccaggtatgccttgcttggcaatttaatttctttgcgcagcctgaatcataaaaggctggtcgctctgggtatgttaccagattcagttgtggaaagactttaaatctagagcgtcatttattttagaatagaaagtctggtacacttaacctatctctgtgatacttagttagcagtacctgttgtgagtactcattgcgtcccatttgaagcaccgttggttatatctattgtgtttgcctctatcaaatggagggaagaggaagacaaagacacgtattagtggttaaatgtatcaagatgttgacttaatggatcttttcattactgactataattgtatatcaaggattcaatagttactagcggtggtatatcatgtaaatgttatgtattgtccttaatgctgaaaaaaggacagacctagtgctggcggttcccacatgaggggtctgtggaaggaataatcgaggcaagccttgctcctgcattttgcacattcgcagagaatctgtgtcgaacccaggaccttttagctcagcaggaaggtttctaacagctgccagacccgtccttaatgctgaaaataagaagaaaaaactaactggtgcaatatatttcattgatggtgtttttactgtaaaataaagtgcagaagtgtacatttctttaaatgatcacttctacaatgtatttgagcattcatccttttctgctatatatagagctgaactcatttgtttgtcttgcataaagtacaatgatcatgatgagtaatattttttgtaaagaaaattctgactttgactttaccatgtaataataggtactgggaataatatgcttcaatatccaaactctcaagcacagccatttccaaccacggcagctgttcaaggtggattctcacagggttgccttagtatgcctgttcccttgacagaacagcctctttttgggcatgaaagacagccaattgatccaagtgaccaacctttggaatttaacagtaggaaagctcctgatttggcagtacatataaatgtcaattccaatatcccagctcctcaaacactagcacctaatcatgatgtagctgcaacctctacacattcatggacgccatctgctacagtagggtacctgcctcgagctcctgtgccaccacaaacagcacagatggatccttctgtgcatgctgcaccactttttggagcagcatctagttctagttatgtttcacctgcagcatttggtgttggtaatgtaacagaagtgttccctacagatccaaacactccttttagtgttgcagataaatcaaagaaacctccagtacctaactggcttcgggaagaacttttaaagaaaaaatcggaaccactgagtgcttcagcgcaaaactcagaaaacttaaatcccatggaagctaatgaggcagtacagacaataggaagacctgaccaaagtgacagcagaagcaatgattccgctaaatccactgaagacgatgacgatgatgaggatgaaattgaagcagctcgaatggcagcaatcaacaaggaaattaagcgtgtgttgactgaggtccttttgaaggttactgatgagctttttgatgagatagcaacaaaagttctaaatgaagacgactcagctgaatccaatgaagccactggtgttttcggatcaaaggagactggtctgggaagatcaagagccaaggcctcggctaaagttgttctccctgctaagtcaacaaatagttctgatcataaagatagtactgggttaagttcccctaaaggtgctcttctcggcctggctagttatgattcagatgatgacgacgatgctgacactgacagcaaggataagatgccaatatcaaatttatcttctaaagataatgctggtgctgtaaatactgaaggtgataaaagcactcttggtaaaagaaatgggaatcacaatgaacagaattcttcacttggaagttctccatcaggggaagatcttaaatctaataatcaaaactttcaaaggaatgcgaatgcagaacctgaacaaatgcatattcgtgatacagagaatggggagttccgtttcaaggccaagactcgtactgagccaaagggtgcatttgacagaatggatgagaaggcacatacgtatgcagaggtagatatccagaacagaaaaacctcttttggcaataatgctgaaaagcacaatgatttggaaagcagtcacagacattcagaaaagagcagcaaagaggactttgttaatgagttgaaggctgatcatacaaaagaactcgaatattctagagcagaaaaatataataacgatgacaaatacagcatgtatggaaatattgacaaaaggggtagctgcaaggagggaaaaggttctgatagtgctgcaaagcatgaatccgatacaagggagccacattacagaggtaactctaagcttgatggtgcaaagggagattggaaggatttgccgaaggatagagagagaaatagagatgatagaagggggaaaggaaaggatgaaaaggacgacaggttaaggcagatgacaagtcataacagcagaagttcacggtcacgatcaccaagggggagaagtcgtactagaaaggagaactcacatgttcgagggagtgtttcaagtgatgagccttctgatagtgtgaaaaagagaaagcattattcccataaaaccagcatgtcaccttcacccccaaaatctagaaacaggtacactgttcatgttgtctctctataatactagtgttggggtgtgtgtgctgtaatggggttctctccccctttcttattcttctattaatacaaagatgcgcagctctcctgtgtattccagaaaaaaaatactatgctaggaattattcttggattgagagaattttgaatgtggacagccccagtattcatacctattaatatgttttatggttggcattaagttctagtcacctagatttaaagaacacatcagctttttatgttttattatgaatgaagctgtccatgctagatgttcttgtcttcagttctactcattaaagaatgggatttatgtttatcataaggtggtacctggtaacactaaatgcgggtttctgctatatgctaatttgaaccatgctgctgttctttattggatatgtgatggcaagttgttgaatcacatagaaatggtttgttgtagatattttggatgtgatatgagcatgcaggtatcttctgcgtgaagaaacatcaggttcatatacctcttatccttacacttacccatttagtattatgtttcatctctagacgaatttcgcggtctccacatagcaagcattctcaccgcaggcattcgccttattcatcggctggcaggtaagagattaatcagttcttcctttgccattatactattactcgtgctgatggttcatcatgaaatttctatttgctttcagatttaggatgcaaactagattagctatcaatctttctgtggctgattatggaaattagattagctgcaaacaaaaataagtaataaggaatttaagaataaaatcgaaccttaggtatttttacagcacattcttataaaaaatattgtttcgatcttactaggaaccttgtttatgaaatgtgatattttatagttctcccagaaaagttgtgttatcttgagaaataaagagattttctgcacaatttctcctgggtaagctgaaaactgcgcatcgtaaatttgtagcctgcagaaaagttttcagtttagttgttttagatttaactgtacttgtcttgaactcttgggtattctggacgggaactgctgattctttcaaatccgggatcttcaattgtctgcaccagctgattcctttaaatctggaatcctctatctgttggcccacttgtacagtaactcgtgatttatacttccttaactgtgtctaatcattgcaggaagaggcggtcgagatcgagaactccggtcaaaaggagatagaaggcatggacagtttatccgacgagatctttgcctaaacattcctctgaaacaaccaaagacatttttgcggttctgctgttgtctatctagtgcgtcttttgctccgacaacataatggtagaacagcattcctacagtgacaaacatgaaggcgaggactggatgtaccttgatataagatgcacattgaactgtatcttgtttgatagatgagctatataactagctcacgcagctggctgtatgatctgtagttcccccgttatctgaattgttcatgtattaggccatgtactgctcagcagagctatgtagttagttgcacttgtatgacttcagcatgcctgttgccagttgtttgtttgtctatgcaggatttttttcccgtttcctacttttttgataaaaataaactgattcctgtgaaatctatatatgatttctctcaaattcctgccattccaaaggagaccttagtttgcaagtggaaggcaatctgctgtag

SEQ ID NO: 201106 - DNA, 1835 bp, Zea Mays
gcttctcagtgattggtggtgctgtcactgttgacaaatgaattattccctaccgatccagtctctgttccccttcttgtatttcatgataagggatctgcatattgctaaacaaacacaagacattggattttatgctggttttgttggcgcttcatatatgtgtgggagggcagtctcctcaacagtatggggaatcgtggctgataagtatggaaggaaaccagttatcgtactgacccttattgcaatagttatcttcaatactatgtttggactaagctcaaactattggatggcattaatcacacgatgcctgcttggaatcatgtgtggttatctcgggccaattaaggcttatgctacagaagtgtgccgaaaagaatacaatcatctggctttggcagttgtttcttcctcacgaggcattggtctcattattggtccagctattggtggttaccttgcgcagcctgcagataaatatccaagtatattctctcagacgtccatatttgggaggtttccatactttcttccgtgcctgtgtatatcaatccttgcagttattgctctaattgcctgcatctggtttccggaaactttgcataaacacaatggggatgccgttgataattcagttgaaaccgtagaagaatctcttgctggcaccgacactgaagaaaatggaggtggcggatgtctaaaattatttacaaactggccgttgatgtcagctattactttatattgtatcttctctcttcaggatgtggcttatgcagagacattctctctttgggctgtcagtgacagatcgtttggtggattaagctttactaccacagatgtgggcaatgtccttgcgatgtcaggtctcttcctttttctatatcaaatgttgatctatccgttccttgccaaaacggtggaccacatcacattagtccgtgcagtggcgttattgactctaccggttcttgctagctacccattctttccttcgttgtccgggttcgggctcatggtggtagtaaattgtgcatcttttctgaagaatacattctcggtaactaccattaccgtgttcaacattttgatgaatgaagctgtgactcaggatgtaagagccgcagccaatgggatagctgtaacactaatgtccatctctaaagcggttgctccagctgttgcaggaatcatattttcgtgggcccagaggcgtcaaacagctgcatttcttccaggcgaccacttggtgttcttcatactgaacatcttcacgttcatcggtttcgtcttcaccttcagaccgtttttcgttcgaggcagtgccaagcactgaaacatggatgaaccggacgacgacccatggtatcctatccaggggcaatcgaatataaattttcttccggcgtggccaagggaggtgccgagtctgtaccagtacgacgactcaggccagaacacacggcgtatggtatggtacacagcaaggccgtgttgttgctgtaagttttgtaatttctgtttccttctcggcttcgcagcatgcagttgctgtatatgatggaagaacactctgttactgggcatgttgcgcggtttccacgcgtgtaagtaatgtagaagtcgctatggtaggtatttccataccgtcattagtggatcattgattttttttttgtaagaaggttattgcaatgccctttttccgggcatgaataagaaaaaggaaatatgcttatatgcatggtatgaataagtgagcaatagacttgtactgtgttcttgatttatttaaaatcagactaagagaactggtgacattttaa

SEQ ID NO: 201107 - DNA, 1226 bp, Zea Mays
gtcattacccatttacctcagtaccctttgttttggtttgagaaagcttggagcaagtctcatcagcaaactgctgcacatgactaatagtgcacatatgtctagtttgttgtaataattagtaatatatgctaaaacgaagaacaatatctgaggcatgtgaatgaaaacttacttggaactcagttatttgtatattttaaggtttgatggtctattgtactgcagagagagctagatatacttatgtatatgtattttgacaggtctcttcctttttctatatcaaatgttgatctatccgttccttgccaaaacggtggaccacatcacattagtccgtgcagtggcgttattgactctaccggttcttgctagctacccattctttccttcgttgtccgggttcgggctcatggtggtagtaaattgtgcatcttttctgaagaatacattctcggtaactaccattaccgtgttcaacattttgatgaatgaagctgtgactcaggatgtaagagccgcagccaatgggatagctgtaacactaatgtccatctctaaagcggttgctccagctgttgcaggaatcatattttcgtgggcccagaggcgtcaaacagctgcatttcttccaggcgaccacttggtgttcttcatactgaacatcttcacgttcatcggtttcgtcttcaccttcagaccgtttttcgttcgaggcagtgccaagcactgaaacatggatgaaccggacgacgacccatggtatcctatccaggggcaatcgaatataaattttcttccggcgtggccaagggaggtgccgagtctgtaccagtacgacgactcaggccagaacacacggcgtatggtatggtacacagcaaggccgtgttgttgctgtaagttttgtaatttctgtttccttctcggcttcgcagcatgcagttgctgtatatgatggaagaacactctgttactgggcatgttgcgcggtttccacgcgtgtaagtaatgtagaagtcgctatggtaggtatttccataccgtcattagtggatcattgattttttttttgtaagaaggttattgcaatgccctttttccgggcatgaataagaaaaaggaaatatgcttatatgcatggtatgaataagtgagcaatagacttgtactgtgttcttgatttatttaaaatcagactaagagaactggtgacattttaa

SEQ ID NO: 201108 - DNA, 3272 bp, Zea Mays
ccaaattctcgggtttcagcagcgggaaaaccaaaaacgaaacctatctcaccgcagagtctcctcaccgcagtaccagactccggccgaaccgcacctctgcccccttcctcccggaggctcagggcctgtggcgcacgtctatggagcggatccacgtagcggtgcgctcgcggccgctctccccggaggactcgcggagcagcccgtggaagatctcgggcaacgcaatcgctcactccgcgcagtcctcctcccgcttcgagttcgacaggatattcggcgaggagtgccgcactgccgaggtctaccaggcccgcatcaagcacatcgtcgataacgtggtccgagggttcaatggcactgtttttgcatatggtcaaactaacagtgggaagaccttcacaatgagaggatcggctaatgaacctggaataataccgcttgcagttcatgacttattccagcgtattcaagagcatatggacagagagtttcttgtgcggatgtcctacatggaaatttacaatgaagatattaatgaccttcttgtgcctgaacatcgaaaattgcagattcatgagagtattgagaaagggatctttgttgctggtttaagggaagaaattgttacatgcgcggaacaggtcatggatttcatgtcttttggagaatcccaccggcatatcggagagacaaacatgaatctttatagcagtcgttctcacactatatttcgcatggtaatcgagagtagagaaaaaggcgatgacaatgaagttgaagatttttgtgatgctgtacgagtatctgttttgaaccttgttgacttagctggctcagaacgcgctgcaaagactggtgcagagggtgtgagacttaaggagggttctcatattaacaaaagtctcatgactcttggtacggtcataaagaaacttagtgaaggcattgagagtcaagggggacatgtgccataccgtgatagtaaactgacaaggatactgcagcctgctctgggtggaaattctaacacagctatcatctgcaatataacacttgcacagatccacactgatgagacaaaaagcagtttgcaatttgcgagtagagcattacgtgtaacaaactgtgcatgcgttaatgagattttgacagatgctgcattattaaaacgccaaaggaaagaaatagaagagcttcgagcaaaacttagaaaatctgaaagtgatcattgggaggaagaaattctgaatctgcgaaacacactactgcagagtgaattggaaaaggaaagaatctctttagagctggaggaggaaaagaaagctaaagagcagcgtgacagatgcttgattgaacaggcaaagaaaattgaaaatcttagttcactggttttaaattcagacagagatgacaggagtactgcttttagtaagaacaaaagaagggtaacatggtgtcctggaccaaatgcaaagcaatttgatattgaggatttaagacctgtccaggaaggctctacaagcagcacagttagaaatgaacgggatatgggaatgccaccactttttgaagagttaatgcaagaaagtaatgatgagccttgtgctaacgtttactcatctggacctggtaatgtgtccaaagacagtgaagacgtccctcttcctgactcgcatgctttgctgcatgttaccaacagaagaaagccaaaggcaatgaagaaatcagatcaagagcaattcagggggagagctggtgaactattaataccccaggacccctgtgatgggaatgatgctctacgccacaaaaacactgtgccttgtgtagttagtagcttatcttctcgagaatctgaagccattcttgtcatcaaacaacttcaagatcagatcaagctgctggaggcagagaagagttctgttcaaactaatttggatgctgttcttgtgctggcaactcaacagaaggtttcatttaatgaggagtatgaagagcttcagcagatcactctagctgcagaagaacaagcaaaggttgctaatgagaacctgtccacactatctgctactgtaaaatccaaacaggaactagcatatgaattcctcggtaatttattgatggagactcaaggaataaatgtggagatggatcagtggagaaactcggttgacagtgctctttcttttattgatgaactctttcagaatctctgcatcatggcacaaggcattcgtgaagtaaatcactctgctcatgaagatagtgcacggtcctgttctgtgatcagggactatgaaaaactatcaacctgtttgatggacaaagtttacaaacttgaattggagaagaaactattggaggaacagtcccaagaccaacaaaatgagatttataagctgaaggccaatctggaaagctgtgagaaggccatagatgactgtactcttcaacatgaattggagaaggatgccattcttttagagctcctaaacctccagaaggaagtatctatcttgtcatcatcttctttgatgaaagaaaaggaatctatccgaaaggaacttgatagaactaaatcaaagttaagagagacggaggacaaacttaagaattccattcaggagaaaacaaaacttcagagtgagaaagcagaggcccacaaagaaattaagaaattgcaaagccagagaactttgcttgaacgtgatttacggaaacgtgattcagctactgttgacaaaaggcatgaactgaattccatgccacaggaaagttctggtgcttttggtcacatgcaggagaactaccaaaatcttgagatgcatgcttttgatatggatgctgaaatttattctttacaagaagctcttgtcacttcaattgatgaaaaggatgaagcgttgtctaaagtagggcttataacatctgaactagaagatcttgcgaataaactgaacttagcagaatcagaaaggaactcctttagcaacgagatcacactcttgactgaaaagttaattgcatctgaatcttcccttaaaagtttggagacttctctcaattctgtatcaagggaaaaggaagatttgggaatgcaacttactgatgcccttttggacatggaatctgaaagatcaatttggacagcaaaggagaaagaatatgtagaagctaatcatagattgaacatctgccttgatgagaaccacaaactttcagaagatttgatgaagtgtataaatggattgcctaccttctcttaa

SEQ ID NO: 201109 - DNA, 3061 bp, Zea Mays
caccgctccgccccaccatttgaccccacccgtcattccagaatctatttcagccaatgatggcctcggaccgagtagagagcaccgcacgggctctccgtccgttccattcgcccgtgcgcgccatcaccgccgtcgccatggcgtcgctcaagactgccaagaagcaccacgcgcgcctcaacaaccccttcccgcgcgccgtaccgacggccgccatccacgacggcgacggggccctgcgcctgtcgttcgcgtcgacctccaagctcgcccacgcgcacgacttccccgtggggacccgtttccgcctccgctgggacccgtcccgcggcggcgaggtctcgctgtccagggttcctccgtcgtcgggcggcggcgcgatgtgggagaccgtccccggcgtggcgttcctctccgtggcctccgtggccaccgaggccgacgagtgccgcggctccttcgcgctccgcgacggcggcgcccgcctcgtccccgatcgccagcacgtcgacaagatcagggctttctaccgctgcgacgccgaggcaggcggctccgagcccgacctgctgcgcgccgccgcattccggccgtccgacgcgacgcggttcccggtgctggtggtgaccgggctcgtgtccgccgccaagaaggccggcgcgtcgccgtcgtgcacctgctgcgggttgcgcttgcgcgcggcaggtcgccgcgcccggagcgcggcggcggcggcgaggcccgtgctctcggcgcggtactggatccttctcgaggagaagagcgacacgcaggttaggttcagcgtcaagatcggcgactaccaatggacctgctcgcacgctgaccctgccaagtcgcccccggcgacggcgacgaccacgaccacgaccccgaggctccaccgggccagcctgcggcttcgtctgtcggcgcgcgtccagcgagccaccacgagcaagaggacgaggctggccccggccccgagccgtgagcgtgaggaggcgtcggcgctcctgccagcgcccgagcgggcggaggagcggcggccggaggagttcaaccgtgtgttcctgacgtatgcgagcagccgcgacgagcggttcttcgggttcggcgagcagttcagccacgtggagttcaagcggaagcgggtgccggtgctggtgcaggagcaggggatcggcaggggagaccagcccatcacttttgccgccaacctcgtcagctacaggaggaaactggagcacgacatatgccccctctccgttctacatgacctcaaagatgagatctttgtacctcgaaggatacgagtactccatcttcgacctgacgagacctgacagggtgcaaattcagatttacggcaattcagtccagggacggatacttgacggcgactcaccgacggagctgctcaccagctacacggagtcaaccggacggccgccggttcttcccaggtggatcacgtccggcgccgtcgtcggcatgcagggtggcacagacgccgtccgcagagtttggggccagctcaaggactacgacgtccctgtctctgcgttctggctacaggattgggttggccagaggaagacggcgatcgggtctcagctctggtggaactgggagctcgatgatgcccactacaatgggtggaacgatctagtagacgacctccgcagccacggcatccggacgatggcttactgcaacccttgcctcgtgccgatggacgagaagcccagcgcgaagaggcacctgttcgaggaagccaggaagctgggcatcctggtgagggacgacgccggcgagccgtacatgatgcccaacacggcgttcgacgtcgccatgctcgacctcaccaacccggcagcgcacgcgtggttcaagagcaccgtcctgcgggggatggtggaccgcggcgtcagcggctggatggccgacttcggcgagggcctgccgctggacgcgcggctgcactcgggcgaggactccgtcgccgcgcacaaccggtacccggagctgtgggcgcgcgtcaaccgcgagatcgccgacgagtggagagccagccgccgccgtgccgcggcggagagcgacgacatcgtcgacgacgacgacggcctggtgttcttcgtgcggtcggggttccgggagagctcccgctgggcgatgctgttctgggagggcgaccagatggtgagctggcaggcgaacgacggcatcaagagcagcgtggtgggcctcctcagcggcggcctctcggggttcccgctcaaccacagcgacgccggcggctactgcacggtggacctgccgccgttcctgcgctaccgccggagcgaggagctcctgatgcgctggatggaggtgaacgccttcacggtcgtgctccgcacccacgagggcaacaggccgggctccaactgccagttctactccagcggccgcacgctggcgcacttcgcgcgctgcgccaagatgtacaaggcctgggagttctaccgcgcgcgcctcgtcggggaggccgcgcggacggggctccccgtggcgcgccacctgttcctgcactacccggcggacgagcgcgtgcaggcgctcacgtaccagcagttccttgtcgggacggagatgctcgtcgtgccggtcctggacaaggggcggaccgcggtgaccgcctacttcccggccggcgccggtgcgtggaggcacgtgtggagcggcaacgagtacgggaccggggctggggtgcagggcgggttcgaggcccaggtcgaagcccggatcgggtacccggccgtattcgtcagggccgggtcgtccgtcggggaaagatttgtgagcaacttgagaaatctcacggtgttgtaatttcggtaaatatacgtaactagctatgtgcgactaggctacaaatatattttttgtttatttttaaatattaagatatatgtggtctgatggttagccttaaatttttggagcagagagatgtgggttcgagtactcgttctgcactattttttgcgggctctggacgtagagagagtgtagc

SEQ ID NO: 201110 - DNA, 633 bp, Zea Mays
gaggacaggtagcctcttcctgcgcccatgcatggttgaataatattagatgctcaaatggctcttgaccctccaaacaatttggcataagatacatctccccttctcacccaaccctccaagcaacattgaccgcaaagggccatccgctgcggtcagtgtaggtttctgaatcatagcttggcgatgcctgaggctagacaaatactgagctagccttcagaaaaaaaagaaaagaaagagattgagaagcagggagaaaaaatggcactggcccattgaggaagcttgagaaccagttaacaagaattgccaacatattcttggacaatcttgttaacagagttttaaggtttcccagcagaagcgcgtgcaaccaccacattcatataattaataagcaaggtttagagaagaggcaacatgggcacaaagatgaagaaggggatcctgaagccgttccgctatatctcaaccatcatggatggtaaggaggctgaaatgcaaattgggttcccgacggatgtaaaacacgtggcacatattggttgggatggtcctggctccacgaacaacaacaacaataacaacagcaacaacaatagtggcggagcacctagctgggttggtttt

SEQ ID NO: 201111 - DNA, 615 bp, Zea Mays
cgcccatgcatggttgaataatattagatgctcaaatggctcttgaccctccaaacaatttggcataagatacatctccccttctcacccaaccctccaagcaacattgaccgcaaagggccatccgctgcggtcagtgtaggtttctgaatcatagcttggcgatgcctgaggctagacaaatactgagctagccttcagaaaaaaaagaaaagaaagagattgagaagcagggagaaaaaatggcactggcccattgaggaagcttgagaaccagttaacaagaattgccaacatattcttggacaatcttgttaacagagttttaaggtttcccagcagagaagagcgcgtgcaaccaccacattcatataattaataagcaaggtttagagaagaggcaacatgggcacaaagatgaagaaggggatcctgaagccgttccgctatatctcaaccatcatggatggtaaggaggctgaaatgcaaattgggttcccgacggatgtaaaacacgtggcacatattggttgggatggtcctggctccacgaacaacaacaacaataacaacagcaacaacaatagtggcggagcacctagctgggttggtttt

SEQ ID NO: 201112 - DNA, 2047 bp, Zea Mays
catatttataataatattatggcgcattttgtccaacaaattttgcatataatagtattatttgtcgtaccatatatattttatactacaactgatatgattatttaacttgcagtattctagaatttgctaccctacaactcatatgattatttgactatgcacatgtctccaagaatattgtagggaaactacaacagatttgtgccatgttttactctgattttggagttttctgcttaactgaggcgaagcgcaaccaccaggttggctgttttagatctgtctcctagactgccctttgctcaagggaaatccctccttttcatttaacgcaaaagaaacttattctatttatttgtatctacgaaatctggcgtcaaatgttcagttgaactcagatgtgtgagactcaactgaagatcccaaatcatcacattatttccccgtcgaaatcatttgtgtttcttagagagaaaaaatggtttatgcttctgtctcctagactgacctttgctcaagggcaatccctccttttcatttaacgcaaaagaaatttattctgttgaacagtattttcatctttatacttatttggtactgcaacagcaatgagaggagcaatatccttgacaccttaattttgtattgccttacaaaggattttttagctgtcgcttgccaagtataggtcgtattgtgggtagtcacaccaaaactaaaactaatggcaattggtttgcaataggcagtgctctttctgttagctctggatgtcagggcaatgaacaaacacgttgagtatgatagtgatgctaaaattactgcaatgggttgaagccctaccatgtggcaaccattgatccatgcccaaaatgtgcctgccactggtgttcctgtcccaacactcgatcaacatgcaagtaaaaaatgaagcatagagccaaacgatgcgagagaagtatggtctacacatgagccagttcacataaacccttcagacccaagcagtggtgtgtgaaatagaagaatcccaattcccaagcatattatttgtcacgcttggtacaggggaaatacgacagcatcatcgtggaggtgaagagctactacatgtcgatgagcaggtacagggatgataaaaaaagaaaggtatatcttcacgtcgatgagcgggtacagggatgacaaaaaaagaaagggtgagattatgaaggtttatgccaatgatcaaataaaaacatgtgttgagtttccagagtgttttgtataggattgctggtcaaacatgagctgttagtgagagaagaattgtgccctcttccctctggttctccctgattctcacagatgaacaatcttctacatgcaaatttctgttatgcgcgcttgtggtcattggcaggaagactcatgtggtcggaagagggctgatgagcacgatcaccatggatgtggacaccacggcaagggtggacgagttcttggttaccacctttgtaggcccattggtggaggaagacttgacgagaggtgtgtggtgatcaccatctgaatgtgggcgtccaagcttctttgatgccgggtgtattgtcctaattgtgactatcgtcgctggtcgaacatttggctagcatcgatgatgtatactgcaatgtgaatccaataattggcttggctctccatacaaccaataactaggagatcaggtgattgctaattggacaataggggtgctcgtgttgtaatggtgtaataggttcaatgccgtcgtttttacagtcacagtagtcgtgtgttaagtgtccaaggtgatttacctctgccctgtttccggtgtcttagcctgattggatagcttctggggtgcgggatgtgatggagcaaagggattaaaacatgctgatttatgttgcccaaggaattcgccagttgcttaacattttgtttttggcatacttcgtagtcaattactgtccacggattcttgcatatgtgaaactgaggaacatttacttcaaatatcattattggcttggctctgatt

SEQ ID NO: 201113 - DNA, 1716 bp, Zea Mays
catatttataataatattatggcgcattttgtccaacaaattttgcatataatagtattatttgtcgtaccatatatattttatactacaactgatatgattatttaacttgcagtattctagaatttgctaccctacaactcatatgattatttgactatgcacatgtctccaagaatattgtagggaaactacaacagatttgtgccatgttttactctgattttggagttttctgcttaactgaggcgaagcgcaaccaccaggcagtgctctttctgttagctctggatgtcagggcaatgaacaaacacgttgagtatgatagtgatgctaaaattactgcaatgggttgaagccctaccatgtggcaaccattgatccatgcccaaaatgtgcctgccactggtgttcctgtcccaacactcgatcaacatgcaagtaaaaaatgaagcatagagccaaacgatgcgagagaagtatggtctacacatgagccagttcacataaacccttcagacccaagcaggtaccagcagaatggcacgccagctaaagaaaggagtcaatgcactgtaatgcgaagaattcttcatgacatcctatgagataatggttttcttgaatgggctagctcaagttgtgcggtttggtgtcatggtgttgttcaaacttcgcagtggtgtgtgaaatagaagaatcccaattcccaagcatattatttgtcacgcttggtacaggggaaatacgacagcatcatcgtggaggtgaagagctactacatgtcgatgagcaggtacagggatgataaaaaaagaaaggtatatcttcacgtcgatgagcgggtacagggatgacaaaaaaagaaagggtgagattatgaaggtttatgccaatgatcaaataaaaacatgtgttgagtttccagagtgttttgtataggattgctggtcaaacatgagctgttagtgagagaagaattgtgccctcttccctctggttctccctgattctcacagatgaacaatcttctacatgcaaatttctgttatgcgcgcttgtggtcattggcaggaagactcatgtggtcggaagagggctgatgagcacgatcaccatggatgtggacaccacggcaagggtggacgagttcttggttaccacctttgtaggcccattggtggaggaagacttgacgagaggtgtgtggtgatcaccatctgaatgtgggcgtccaagcttctttgatgccgggtgtattgtcctaattgtgactatcgtcgctggtcgaacatttggctagcatcgatgatgtatactgcaatgtgaatccaataattggcttggctctccatacaaccaataactaggagatcaggtgattgctaattggacaataggggtgctcgtgttgtaatggtgtaataggttcaatgccgtcgtttttacagtcacagtagtcgtgtgttaagtgtccaaggtgatttacctctgccctgtttccggtgtcttagcctgattggatagcttctggggtgcgggatgtgatggagcaaagggattaaaacatgctgatttatgttgcccaaggaattcgccagttgcttaacattttgtttttggcatacttcgtagtcaattactgtccacggattcttgcatatgtgaaactgaggaacatttacttcaaatatcattattggcttggctctgatt

SEQ ID NO: 201114 - DNA, 2138 bp, Zea Mays
catatttataataatattatggcgcattttgtccaacaaattttgcatataatagtattatttgtcgtaccatatatattttatactacaactgatatgattatttaacttgcagtattctagaatttgctaccctacaactcatatgattatttgactatgcacatgtctccaagaatattgtagggaaactacaacagatttgtgccatgttttactctgattttggagttttctgcttaactgaggcgaagcgcaaccaccaggcagtgctctttctgttagctctggatgtcagggcaatgaacaaacacgttgagtatgatagtgatgctaaaattactgcaatgggttgaagccctaccatgtggcaaccattgatccatgcccaaaatgtgcctgccactggtgttcctgtcccaacactcgatcaacatgcaagtaaaaaatgaagcatagagccaaacgatgcgagagaagtatggtctacacatgagccagttcacataaacccttcagacccaagcaggtaccagcagaatggcacgccagctaaagaaaggagtcaatgcactgtaatgcgaagaattcttcatgacatcctatgagataatggttttcttgaatgggctagctcaagttgtgcggtttggtgtcatggtgttgttcaaacttcgcagtggtgtgtgaaatagaagaatcccaattcccaagcatattatttgtcacgcttgtttgccggcaggtacaggggaaatacgacagcatcatcgtggaggtgaagagctactacatgtcgatgagcaggtacagggatgataaaaaaagaaaggtatatcttcacgtcgatgagcgggtacagggatgacaaaaaaagaaaggtatatcttcacatcatgtgctatacattctttaatggctttctattgtttctttttttgttggattcgatagcttggtcagttttttcttgtatattagattagatggtggtatatgcagatgcgcttttggttataattcatagcgcaactcattagctatatgctggtagtagggtgctaacacaactgatggtttaaaatattttctcttgctctagggtgagattatgaaggtttatgccaatgatcaaataaaaacatgtgttgagtttccagagtgttttgtataggattgctggtcaaacatgagctgttagtgagagaagaattgtgccctcttccctctggttctccctgattctcacaggtgtgttttgcactggcacacttacattggtgctctttctttttgctgctagcataagtactatactactatggcctacttaagaactaggaaagtttatgttatcgaatcatcaaacatgttagcatcttgttagtattaagaagtagtagtgaatcatttacatatatttctaatttgtcaatagcagatgaacaatcttctacatgcaaatttctgttatgcgcgcttgtggtcattggcaggaagactcatgtggtcggaagagggctgatgagcacgatcaccatggatgtggacaccacggcaagggtggacgagttcttggttaccacctttgtaggcccattggtggaggaagacttgacgagaggtgtgtggtgatcaccatctgaatgtgggcgtccaagcttctttgatgccgggtgtattgtcctaattgtgactatcgtcgctggtcgaacatttggctagcatcgatgatgtatactgcaatgtgaatccaataattggcttggctctccatacaaccaataactaggagatcaggtgattgctaattggacaataggggtgctcgtgttgtaatggtgtaataggttcaatgccgtcgtttttacagtcacagtagtcgtgtgttaagtgtccaaggtgatttacctctgccctgtttccggtgtcttagcctgattggatagcttctggggtgcgggatgtgatggagcaaagggattaaaacatgctgatttatgttgcccaaggaattcgccagttgcttaacattttgtttttggcatacttcgtagtcaattactgtccacggattcttgcatatgtgaaactgaggaacatttacttcaaatatcattattggcttggctctgatt

SEQ ID NO: 201115 - DNA, 1807 bp, Zea Mays
tttccactttagaccaagaagcagcagtgtcaaccattctttcaaattcagagcaatcaacctcagtgtcgaccattatttccaatttagaccaacatgcagcagtgtcaaccattctttccccaaggttctcttcttttcttttattaatcgtttgattactgtttgtttcagctatttacgtggcaacaaactcactagacatataacccaggactagggaacatgagtaaacttagctacttgtagctggatgactagatgggcaattagcaggagcagaaggatcccacatcgctaatcatcaattgctgatgctagaggctaagctatttttgggtgctttttcctcctatgatcggcatagagacatgcagatggatattgataatatgtcttatgaggcccagaacatctgcaatttagtttttgataagtcctccaagatttggcagtgctctttctgttagctctggatgtcagggcaatgaacaaacacgttgagtatgatagtgatgctaaaattactgcaatgggttgaagccctaccatgtggcaaccattgatccatgcccaaaatgtgcctgccactggtgttcctgtcccaacactcgatcaacatgcaagtaaaaaatgaagcatagagccaaacgatgcgagagaagtatggtctacacatgagccagttcacataaacccttcagacccaagcagctcaagttgtgcggtttggtgtcatggtgttgttcaaacttcgcagtggtgtgtgaaatagaagaatcccaattcccaagcatattatttgtcacgcttgtttgccggcaggtacaggggaaatacgacagcatcatcgtggaggtgaagagctactacatgtcgatgagcaggtacagggatgataaaaaaagaaaggtatatcttcacgtcgatgagcgggtacagggatgacaaaaaaagaaagggtgagattatgaaggtttatgccaatgatcaaataaaaacatgtgttgagtttccagagtgttttgtataggattgctggtcaaacatgagctgttagtgagagaagaattgtgccctcttccctctggttctccctgattctcacagatgaacaatcttctacatgcaaatttctgttatgcgcgcttgtggtcattggcaggaagactcatgtggtcggaagagggctgatgagcacgatcaccatggatgtggacaccacggcaagggtggacgagttcttggttaccacctttgtaggcccattggtggaggaagacttgacgagaggtgtgtggtgatcaccatctgaatgtgggcgtccaagcttctttgatgccgggtgtattgtcctaattgtgactatcgtcgctggtcgaacatttggctagcatcgatgatgtatactgcaatgtgaatccaataattggcttggctctccatacaaccaataactaggagatcaggtgattgctaattggacaataggggtgctcgtgttgtaatggtgtaataggttcaatgccgtcgtttttacagtcacagtagtcgtgtgttaagtgtccaaggtgatttacctctgccctgtttccggtgtcttagcctgattggatagcttctggggtgcgggatgtgatggagcaaagggattaaaacatgctgatttatgttgcccaaggaattcgccagttgcttaacattttgtttttggcatacttcgtagtcaattactgtccacggattcttgcatatgtgaaactgaggaacatttacttcaaatatcattattggcttggctctgatt

SEQ ID NO: 201116 - DNA, 1632 bp, Zea Mays
tttccactttagaccaagaagcagcagtgtcaaccattctttcaaattcagagcaatcaacctcagtgtcgaccattatttccaatttagaccaacatgcagcagtgtcaaccattctttccccaaggtagctggatgactagatgggcaattagcaggagcagaaggatcccacatcgctaatcatcaattgctgatgctagaggctaagctatttttgggtgctttttcctcctatgatcggcatagagacatgcagatggatattgataatatgtcttatgaggcccagaacatctgcaatttagtttttgataagtcctccaagatttggcagtgctctttctgttagctctggatgtcagggcaatgaacaaacacgttgagtatgatagtgatgctaaaattactgcaatgggttgaagccctaccatgtggcaaccattgatccatgcccaaaatgtgcctgccactggtgttcctgtcccaacactcgatcaacatgcaagtaaaaaatgaagcatagagccaaacgatgcgagagaagtatggtctacacatgagccagttcacataaacccttcagacccaagcagtggtgtgtgaaatagaagaatcccaattcccaagcatattatttgtcacgcttggtacaggggaaatacgacagcatcatcgtggaggtgaagagctactacatgtcgatgagcaggtacagggatgataaaaaaagaaaggtatatcttcacgtcgatgagcgggtacagggatgacaaaaaaagaaagggtgagattatgaaggtttatgccaatgatcaaataaaaacatgtgttgagtttccagagtgttttgtataggattgctggtcaaacatgagctgttagtgagagaagaattgtgccctcttccctctggttctccctgattctcacagatgaacaatcttctacatgcaaatttctgttatgcgcgcttgtggtcattggcaggaagactcatgtggtcggaagagggctgatgagcacgatcaccatggatgtggacaccacggcaagggtggacgagttcttggttaccacctttgtaggcccattggtggaggaagacttgacgagaggtgtgtggtgatcaccatctgaatgtgggcgtccaagcttctttgatgccgggtgtattgtcctaattgtgactatcgtcgctggtcgaacatttggctagcatcgatgatgtatactgcaatgtgaatccaataattggcttggctctccatacaaccaataactaggagatcaggtgattgctaattggacaataggggtgctcgtgttgtaatggtgtaataggttcaatgccgtcgtttttacagtcacagtagtcgtgtgttaagtgtccaaggtgatttacctctgccctgtttccggtgtcttagcctgattggatagcttctggggtgcgggatgtgatggagcaaagggattaaaacatgctgatttatgttgcccaaggaattcgccagttgcttaacattttgtttttggcatacttcgtagtcaattactgtccacggattcttgcatatgtgaaactgaggaacatttacttcaaatatcattattggcttggctctgatt

SEQ ID NO: 201117 - DNA, 3029 bp, Zea Mays
ccgcgccccctctccctgacgccgcgatggccgcgcccctctccctccccgcggcgtgatgcccgcagcccccctcccctggtgccctcgcccccgcgccccctctccgtgacgctgcgatggccgcgccccctctccctcccccggcgtgaagcccgcagccccctcccccggtgccatggtgccctcgcctctgcccccgagattgtcgccgagcgcccacccctcattcccgtaccctcgcccaagatcgcggatctacgcccgatgtgggcgtggggctgcgtccgagatcgtgaagccccatcgtgccctcgctcgagatctccccctcgccggtcctgctcgcgaagccctgccgtgatagtcgcgcccacttcacccgtcgtgacagccgcctccacgtccacacccatggggagcggatgcgggccacagatctccttccaaactgccaaactcgaaggcgacagcccgacaagggccgaccttccatggtaggcgggccccttccatggtaggcgagatctgcggccatggtcaaagggccgttggggctggatttcgcagtcgcaacactgaactactgggtgcacaagggcattgccttcatctgcgagattaggaatcggatcctgtttaatatataagctactggccaatgattatggatcttgctggtagaacgatatgatccgcgcgtctgtattccgtaaagttcttacgatgatttttattttgtgtatctgatgccacattatgggtaaatccggagatctattttgtaaaaagtagtaatatggtctggtgctgctgggtaaatctggagatctattttgtaaaaagtagtaatctgaacacctttttggactgtcttataagtggcttctatatttcactgcacatttcaacaaatggaaccagggaaacagataaaggtcatgaaaggattctagaaacgatcaacacagttggacatgatggtaataacattgacactgctgatttttgtttatgttacttgaaagtttaaagatctcctgtgtcatataatttatgctatagacatgaattattggctaccttttccccctgcccctgccttttcaaatcctttttgttgagccacttccctagcttgacaatctattgttacctccggcaaaaggtgagttcttggctgccttttccccccgcccctgccttttcaacctatgttcttttcatgggtagcttgattcagtcggtgaattgagcttccggcttcgacaggagactcagagcacactcacggctgctttattgtttaatcacaccgctaatcgtgttatgaagagaacacatggaaagcataccaactcaattcttgagacttctattgtaaatgcttctttttgaagatctcagctatttacgtggcaacaaactcactagacatataacccaggactagggaacatgagtaaacttagctacttgtagctggatgactagatgggcaattagcaggagcagaaggatcccacatcgctaatcatcaattgctgatgctagaggctaagctatttttgggtgctttttcctcctatgatcggcatagagacatgcagatggatattgataatatgtcttatgaggcccagaacatctgcaatttagtttttgataagtcctccaagatttggcagtgctctttctgttagctctggatgtcagggcaatgaacaaacacgttgagtatgatagtgatgctaaaattactgcaatgggttgaagccctaccatgtggcaaccattgatccatgcccaaaatgtgcctgccactggtgttcctgtcccaacactcgatcaacatgcaagtaaaaaatgaagcatagagccaaacgatgcgagagaagtatggtctacacatgagccagttcacataaacccttcagacccaagcagctcaagttgtgcggtttggtgtcatggtgttgttcaaacttcgcagtggtgtgtgaaatagaagaatcccaattcccaagcatattatttgtcacgcttggtacaggggaaatacgacagcatcatcgtggaggtgaagagctactacatgtcgatgagcaggtacagggatgataaaaaaagaaaggtatatcttcacgtcgatgagcgggtacagggatgacaaaaaaagaaagggtgagattatgaaggtttatgccaatgatcaaataaaaacatgtgttgagtttccagagtgttttgtataggattgctggtcaaacatgagctgttagtgagagaagaattgtgccctcttccctctggttctccctgattctcacagatgaacaatcttctacatgcaaatttctgttatgcgcgcttgtggtcattggcaggaagactcatgtggtcggaagagggctgatgagcacgatcaccatggatgtggacaccacggcaagggtggacgagttcttggttaccacctttgtaggcccattggtggaggaagacttgacgagaggtgtgtggtgatcaccatctgaatgtgggcgtccaagcttctttgatgccgggtgtattgtcctaattgtgactatcgtcgctggtcgaacatttggctagcatcgatgatgtatactgcaatgtgaatccaataattggcttggctctccatacaaccaataactaggagatcaggtgattgctaattggacaataggggtgctcgtgttgtaatggtgtaataggttcaatgccgtcgtttttacagtcacagtagtcgtgtgttaagtgtccaaggtgatttacctctgccctgtttccggtgtcttagcctgattggatagcttctggggtgcgggatgtgatggagcaaagggattaaaacatgctgatttatgttgcccaaggaattcgccagttgcttaacattttgtttttggcatacttcgtagtcaattactgtccacggattcttgcatatgtgaaactgaggaacatttacttcaaatatcattattggcttggctctgatt

SEQ ID NO: 201118 - DNA, 2061 bp, Zea Mays
cctgattctatctgccctatttttcttcacatttgttatgtagttgctcattatacattgaaggcagaaagtcattctccaatctgaaggcgaaacaaggtgtgcacatatatgttctagaggataaagttcactgagctgctgttgggcattggagagcccagttgtggttctatgcctgaaaggaattctttgtaattttctcctgtatctggttctgttatcatcattattttcctggtgtggggcaatcatgtcagagagcgagttagcagtaataaaaccagaggcattgaaaacttatatctggcttcagtgctttgatggctccatacaacaagtggaggaagaagttgccatgttctgccctatgatatgtcgggaaataatgaaaaatgggacagggtcatctaagaatcatgctatagttctaccggaaagagttaatccggcaagtttgagtttgattcttgattattgtcggtttcatcaggtccctgggcgctcaaacaaggagcggaagtcattcgatgaaaagtttgtcaggatagacacagaaaaactgtgtaagttggcttctgcagcccttggtctgcagttaaggccactagttgatcttacttgtggagcacttgctcgaatcattggaggaaaaacacctgatgaagttagagatattttccatttaccagatgacttaacagaggaagagaaactggagccactaaaaaatttaaatgatgatcctacaattcgtttattgaaccgattgtatgcaaagaagcggaaagaactgcaggaacgccagaaactaaaggatgttcaaacacaagaagaacaaaaagacgagagatctttggatgagttactttgttttataaatggagatggagattccagaggtgggaaagcttctaagagtaagaaaaagaataaaagaaggaaagatcaagctaagaatcccacaaaagcgaactccgaacctgtaaataaggagggagcttcctgtgtggttccgtgcaaagcagataatggtaacatttctaggcatccttgccaaagtcaaaatttgcaagataccgagtaccccttcgacaatgctgaccttgacgatggacttgatcctgcaatgagggaggagattgatagagaagtggccgacttcgagatgaagttgaagctagcttggaccgaaagaatgagtttggagcaggaccaacaaatggagtcacatgttgatacgcggtgaaaaccttaggcaggaaggagttttggtcgagaggtacaggatgacattgcgaggtgctattgtcatatgctgtgatttgtatgtaccctgctcttcaagaaagtagtgcccaaccatgttactgttaccccccaaagaaaggtgggtgactttgttagtgtaaaaaccagaagttttgaatctatgtatgttcattaattttgacaggaactcttatcattatgaaatgaataaaagggaaaatgatgtgttgttggaagttggcggaaacaataggtcgcttagctctataccgttggttcaatagtgctccagttttttctatccacgtttgggactggcttgttgagttgtttttaccgtgtaaactcggtcaaaatgtttgcaattatggtatttgtggactgctggataattctcagtcaaaaagtttgtgaaaatgtattatttgtggactatttgatacttctcagtcaaaaagtttcaccaaatatggtatttgggcattattgatatccttggattgatggagaccacgtgcaagccctctatcaaacgccacgaatagaaatttgcagcttccttgccagtgttatggtcaagttctcaagtttttcatgaaactacgaaaaactcgccaatgcccttttttttttaagtttgccttgtcgagacctgcaaatctacccaagaaaggcagaaatttgcatgaaattattttgaatacgggctgctttctaagtcttcccagacctctagctttccatttcgaacgattgcaagaacaaagctgctttctaagtaaaaaaaat

SEQ ID NO: 201119 - DNA, 2218 bp, Zea Mays
gttggacgtgccattgccgaccgagcctgaaatcgttctatcctcgccgccgccgccgccgccgccgtttgttatcgctcggagtttctccgttcccgtctctccggccgctgcaggtacgcctagcaacggcgtcaatcgcttcctcccaacccgcaggttatcaaatacggtgaaccttgtgttcctgtgaaattttgcagctcattatacattgaaggcagaaagtcattctccaatctgaaggcgaaacaaggtgtgcacatatatgttctagaggataaagttcactgagctgctgttgggcattggagagcccagttgtggttctatgcctgaaaggaattctttgtaattttctcctgtatctggttctgttatcatcattattttcctggtgtggggcaatcatgtcagagagcgagttagcagtaataaaaccagaggcattgaaaacttatatctggcttcagtgctttgatggctccatacaacaagtggaggaagaagttgccatgttctgccctatgatatgtcgggaaataatgaaaaatgggacagggtcatctaagaatcatgctatagttctaccggaaagagttaatccggcaagtttgagtttgattcttgattattgtcggtttcatcaggtccctgggcgctcaaacaaggagcggaagtcattcgatgaaaagtttgtcaggatagacacagaaaaactgtgtaagttggcttctgcagcccttggtctgcagttaaggccactagttgatcttacttgtggagcacttgctcgaatcattggaggaaaaacacctgatgaagttagagatattttccatttaccagatgacttaacagaggaagagaaactggagccactaaaaaatttaaatgatgatcctacaattcgtttattgaaccgattgtatgcaaagaagcggaaagaactgcaggaacgccagaaactaaaggatgttcaaacacaagaagaacaaaaagacgagagatctttggatgagttactttgttttataaatggagatggagattccagaggtgggaaagcttctaagagtaagaaaaagaataaaagaaggaaagatcaagctaagaatcccacaaaagcgaactccgaacctgtaaataaggagggagcttcctgtgtggttccgtgcaaagcagataatggtaacatttctaggcatccttgccaaagtcaaaatttgcaagataccgagtaccccttcgacaatgctgaccttgacgatggacttgatcctgcaatgagggaggagattgatagagaagtggccgacttcgagatgaagttgaagctagcttggaccgaaagaatgagtttggagcaggaccaacaaatggagtcacatgttgatacgcggtgaaaaccttaggcaggaaggagttttggtcgagaggtacaggatgacattgcgaggtgctattgtcatatgctgtgatttgtatgtaccctgctcttcaagaaagtagtgcccaaccatgttactgttaccccccaaagaaaggtgggtgactttgttagtgtaaaaaccagaagttttgaatctatgtatgttcattaattttgacaggaactcttatcattatgaaatgaataaaagggaaaatgatgtgttgttggaagttggcggaaacaataggtcgcttagctctataccgttggttcaatagtgctccagttttttctatccacgtttgggactggcttgttgagttgtttttaccgtgtaaactcggtcaaaatgtttgcaattatggtatttgtggactgctggataattctcagtcaaaaagtttgtgaaaatgtattatttgtggactatttgatacttctcagtcaaaaagtttcaccaaatatggtatttgggcattattgatatccttggattgatggagaccacgtgcaagccctctatcaaacgccacgaatagaaatttgcagcttccttgccagtgttatggtcaagttctcaagtttttcatgaaactacgaaaaactcgccaatgcccttttttttttaagtttgccttgtcgagacctgcaaatctacccaagaaaggcagaaatttgcatgaaattattttgaatacgggctgctttctaagtcttcccagacctctagctttccatttcgaacgattgcaagaacaaagctgctttctaagtaaaaaaaat

SEQ ID NO: 201120 - DNA, 2539 bp, Zea Mays
catggccccgcgccgttacgattgggttggaccgttggacgtgccattgccgaccgagcctgaaatcgttctatcctcgccgccgccgccgccgccgccgtttgttatcgctcggagtttctccgttcccgtctctccggccgctgcaggttatcaaatacggtgaaccttgtgttcctgtgaaattttgcagctcattatacattgaaggcagaaagtcattctccaatctgaaggcgaaacaaggtgtgcacatatatgttctagaggataaagttcactgagctgctgttgggcattggagagcccagttgtggttctatgcctgaaaggaattctttgtaattttctcctgtatctggttctgttatcatcattattttcctggtgtggggcaatcatgtcagagagcgagttagcagtaataaaaccagaggcattgaaaacttatatctggcttcagtgctttgatggctccatacaacaagtggaggaagaagttgccatgttctgccctatgatatgtcgggaaataatgaaaaatgggacagggtcatctaagaatcatgctatagttctaccggaaagagttaatccggcaagtttgagtttgattcttgattattgtcggtttcatcaggtccctgggcgctcaaacaaggagcggaagtcattcgatgaaaagtttgtcaggatagacacagaaaaactgtgtaagttggcttctgcagcccttggtctgcagttaaggccactagttgatcttacttgtggagcacttgctcgaatcattggaggaaaaacacctgatgaagttagagatattttccatttaccagatgacttaacagaggaagagaaactggagccactaaaaaatttaaatgatgatcctacaattcgtttattgaaccgattgtatgcaaagaagcggaaagaactgcaggaacgccagaaactaaaggatgttcaaacacaagaagaacaaaaagacgagagatctttggatgagttactttgttttataaatggagatggagattccagaggtgggaaagcttctaagagtaagaaaaagaataaaagaaggaaagatcaagctaagaatcccacaaaagcgaactccgaacctgtaaataaggagggagcttcctgtgtggttccgtgcaaagcagataatggtaacatttctaggcatccttgccaaagtcaaaatttgcaagataccgagtaccccttcgacaatgctgaccttgacgatggacttgatcctgcaatgagggaggagattgataggtgagggcataagatatcttatgggttgatgcacgcagctctttgttgtgctactggcctgtttctcaatcgaaaaagcctgtttttgtacatgaaacagcaaggttattgatgcttatatactgtcattttgataagtataagctgatttctggactttgaatcgataaattctgttaaatgcttccactcatctttttctgcagttctgcttgaactttgtggttggtgcttgtgcctgtcgcttgatccacccatttactgttgacatgcatgaaacactgccgtgttttgatataacaagcgattgttcttgacaattgacatacagagaagtggccgacttcgagatgaagttgaagctagcttggaccgaaagaatgagtttggagcaggaccaacaaatggagtcacatgttgatacgcggtgaaaaccttaggcaggaaggagttttggtcgagaggtacaggatgacattgcgaggtgctattgtcatatgctgtgatttgtatgtaccctgctcttcaagaaagtagtgcccaaccatgttactgttaccccccaaagaaaggtgggtgactttgttagtgtaaaaaccagaagttttgaatctatgtatgttcattaattttgacaggaactcttatcattatgaaatgaataaaagggaaaatgatgtgttgttggaagttggcggaaacaataggtcgcttagctctataccgttggttcaatagtgctccagttttttctatccacgtttgggactggcttgttgagttgtttttaccgtgtaaactcggtcaaaatgtttgcaattatggtatttgtggactgctggataattctcagtcaaaaagtttgtgaaaatgtattatttgtggactatttgatacttctcagtcaaaaagtttcaccaaatatggtatttgggcattattgatatccttggattgatggagaccacgtgcaagccctctatcaaacgccacgaatagaaatttgcagcttccttgccagtgttatggtcaagttctcaagtttttcatgaaactacgaaaaactcgccaatgcccttttttttttaagtttgccttgtcgagacctgcaaatctacccaagaaaggcagaaatttgcatgaaattattttgaatacgggctgctttctaagtcttcccagacctctagctttccatttcgaacgattgcaagaacaaagctgctttctaagtaaaaaaaat

SEQ ID NO: 201121 - DNA, 2246 bp, Zea Mays
gttggcggcagcttgatgcaggcccactggcacaggcccatggccccgcgccgttacgattgggttggaccgttggacgtgccattgccgaccgagcctgaaatcgttctatcctcgccgccgccgccgccgccgccgtttgttatcgctcggagtttctccgttcccgtctctccggccgctgcaggttatcaaatacggtgaaccttgtgttcctgtgaaattttgcagctcattatacattgaaggcagaaagtcattctccaatctgaaggcgaaacaaggtgtgcacatatatgttctagaggataaagttcactgagctgctgttgggcattggagagcccagttgtggttctatgcctgaaaggaattctttgtaattttctcctgtatctggttctgttatcatcattattttcctggtgtggggcaatcatgtcagagagcgagttagcagtaataaaaccagaggcattgaaaacttatatctggcttcagtgctttgatggctccatacaacaagtggaggaagaagttgccatgttctgccctatgatatgtcgggaaataatgaaaaatgggacagggtcatctaagaatcatgctatagttctaccggaaagagttaatccggcaagtttgagtttgattcttgattattgtcggtttcatcaggtccctgggcgctcaaacaaggagcggaagtcattcgatgaaaagtttgtcaggatagacacagaaaaactgtgtaagttggcttctgcagcccttggtctgcagttaaggccactagttgatcttacttgtggagcacttgctcgaatcattggaggaaaaacacctgatgaagttagagatattttccatttaccagatgacttaacagaggaagagaaactggagccactaaaaaatttaaatgatgatcctacaattcgtttattgaaccgattgtatgcaaagaagcggaaagaactgcaggaacgccagaaactaaaggatgttcaaacacaagaagaacaaaaagacgagagatctttggatgagttactttgttttataaatggagatggagattccagaggtgggaaagcttctaagagtaagaaaaagaataaaagaaggaaagatcaagctaagaatcccacaaaagcgaactccgaacctgtaaataaggagggagcttcctgtgtggttccgtgcaaagcagataatggtaacatttctaggcatccttgccaaagtcaaaatttgcaagataccgagtaccccttcgacaatgctgaccttgacgatggacttgatcctgcaatgagggaggagattgatagagaagtggccgacttcgagatgaagttgaagctagcttggaccgaaagaatgagtttggagcaggaccaacaaatggagtcacatgttgatacgcggtgaaaaccttaggcaggaaggagttttggtcgagaggtacaggatgacattgcgaggtgctattgtcatatgctgtgatttgtatgtaccctgctcttcaagaaagtagtgcccaaccatgttactgttaccccccaaagaaaggtgggtgactttgttagtgtaaaaaccagaagttttgaatctatgtatgttcattaattttgacaggaactcttatcattatgaaatgaataaaagggaaaatgatgtgttgttggaagttggcggaaacaataggtcgcttagctctataccgttggttcaatagtgctccagttttttctatccacgtttgggactggcttgttgagttgtttttaccgtgtaaactcggtcaaaatgtttgcaattatggtatttgtggactgctggataattctcagtcaaaaagtttgtgaaaatgtattatttgtggactatttgatacttctcagtcaaaaagtttcaccaaatatggtatttgggcattattgatatccttggattgatggagaccacgtgcaagccctctatcaaacgccacgaatagaaatttgcagcttccttgccagtgttatggtcaagttctcaagtttttcatgaaactacgaaaaactcgccaatgcccttttttttttaagtttgccttgtcgagacctgcaaatctacccaagaaaggcagaaatttgcatgaaattattttgaatacgggctgctttctaagtcttcccagacctctagctttccatttcgaacgattgcaagaacaaagctgctttctaagtaaaaaaaat

SEQ ID NO: 201122 - DNA, 1210 bp, Zea Mays
gctcgttggtgatgtcgaagcagtggttgctggatgtggttttgtttgtgcggtcgtgccatatacaacttgttcgattaatttcgtctcgggcttatgaactgggagagtgtgttcatgcggatctccctctgttgctgttcagtagcaggatatgcccaatgcacggaagtaccaaagcaagagctttccattgcttgactcactagaactgttatttgatggtcctattcctgaaggggcacaaaaatcaccttccagcatacctcagaatgttggtggaaacgttggtgatggaggcaacaatatcagcacagccccagacttgtctgaaagacctagtggaacaattaacacaagcgttaatgaggcatggaataatatcagcctacttaagcaaacagcattgggaccccaaggtatagacaatctcgacacgctgcaaaatcgtgatgaagaggtgctggaacggctacagcatggctcggaccggaggccgcagagagctgatgaacaggcacagtcaagttcttgcgtagaactgcagagagacaggcgcaagaagcggaaggccccagacatccagcagatcatggagacctatatgaatttcagaatgaagcaacctcgcgtcaaacaacgaagagcaaaggacgctgaccagttcacgatttcaaggtattagcctctgatgttttcaaggaccctgagaacagggagacctttctttcgtatgaacccaggctgcgcaccttgtggctgaagagggaagttggcaagctactctccttatagaagtggcagcccttgcttgttttgtttgctacccgtgcctaggcttcatttaacaaactctactagtgacttaacttgttccatgcacagtacgtcactacgctgcttagtcattcatgatcaatgatgtgcttgctgcgtgtagtgcttccaaaattttgcatctgtgtcaatacactgttaaaaatgcgacagaatgcttgtttcttgacagcagatatttaggatcgttctgcatgactgagcgtcaacagcagaggttgtagagccactcaagcgcagtatatactttcggcctaaactttctgcaacaatatcgttcttagcaaactgtctattcattctcaacaatcagctcaaacaaagcgtctagacttggcaccgcaaaaaaaaacatttcaagaaactgaaaata

SEQ ID NO: 201123 - DNA, 1311 bp, Zea Mays
agatcacgggtataccgaacagccgggttccgccaccaacccaaccgtgggggtgccttacggcctacgggccggagcagcgctcgggagccgcggcacggaggcatcgacgccgttgagctcgaggcgaccggcggctcgcggccccgccacagcggtgctgtggcagtgtggcttcttctggtttctgcgggctcagcgcggaggcctattgcaggattaaatggcaaataggccaagatggatgatgaagatatgcccaatgcacggaagtaccaaagcaagagctttccattgcttgactcactagaactgttatttgatggtcctattcctgaaggggcacaaaaatcaccttccagcatacctcagaatgttggtggaaacgttggtgatggaggcaacaatatcagcacagccccagacttgtctgaaagacctagtggaacaattaacacaagcgttaatgaggcatggaataatatcagcctacttaagcaaacagcattgggaccccaaggtatagacaatctcgacacgctgcaaaatcgtgatgaagaggtgctggaacggctacagcatggctcggaccggaggccgcagagagctgatgaacaggcacagtcaagttcttgcgtagaactgcagagagacaggcgcaagaagcggaaggccccagacatccagcagatcatggagacctatatgaatttcagaatgaagcaacctcgcgtcaaacaacgaagagcaaaggacgctgaccagttcacgatttcaaggtattagcctctgatgttttcaaggaccctgagaacagggagacctttctttcgtatgaacccaggctgcgcaccttgtggctgaagagggaagttggcaagctactctccttatagaagtggcagcccttgcttgttttgtttgctacccgtgcctaggcttcatttaacaaactctactagtgacttaacttgttccatgcacagtacgtcactacgctgcttagtcattcatgatcaatgatgtgcttgctgcgtgtagtgcttccaaaattttgcatctgtgtcaatacactgttaaaaatgcgacagaatgcttgtttcttgacagcagatatttaggatcgttctgcatgactgagcgtcaacagcagaggttgtagagccactcaagcgcagtatatactttcggcctaaactttctgcaacaatatcgttcttagcaaactgtctattcattctcaacaatcagctcaaacaaagcgtctagacttggcaccgcaaaaaaaaacatttcaagaaactgaaaata

SEQ ID NO: 201124 - DNA, 1422 bp, Zea Mays
gtggcgcctatgattttgtgtgcatcttctacctcgtgctccgtgccctcgacaccgttgaggatgacactagcatcccgaccgaggtgaaggtgcccatcctccaggaattttatcggcacgtctacaaccgcgactggcattattcatgtggaacaaatcactacaaagtgctgatggataagtttcacctcctatcaaaaggcaatcgaagaaatcactaggcgaatgggagcaggaatggcaaaatttatatgcaaggaggttgaaactgttgatgactatgacgagtattgtcactatgtagccgggctagttggttatggactttccaggctcttttatgctgctgggacggaagatctggctccagattcactatcaaattcaatgggtctctttttacagaaaactaatataattagggattatttggaggacataaatgagataccaaagtcccgcatgttctggcctcgagagatatggagtaaatatgcagataaactcgaggatttcaaatatgaggaaaataccgaaaaggcagtacaatgcttgaacgatatagtgacgaatgcactgattcatgctgaagagtgccttcagtacatgtcagccttgaagaaccatgccatcttccatttttgcgcaattccccagataatggcaattggaacatgtgctctttgctacaataacgtgcatgtctttagaggagttgtaaagatgagacgtggtctcacggcacgaataattgacgagacaaattcaatgtcagacgtctataccgctttctatgagttttcttcattgatagagtcaaagattgatgacaatgatccaaatgctgctctaacacggagacacgtgaattcaataaagcaaacttgcaagtcatctggtttggtaaagaggagggggtaccatttggacacatcaccttacaggcctatgctgatcatgattgtcctcctgctggtggctatccttttcggggcactgtataccaagtgacttgtagctggcctttttcccctatggagacgagacaaactctgccaatctgatccttttcgtactctgtagtccccaatgactgcaggaagttcggaattactggctgtagaagtgtagatcatacggcagcatgctactgcttccatgactccgttactgctctcgattcgtttcttcattatgttttttcgcgcgttgtatcgtttgaagctgttttaagcaacggaaaaaaaataccatgtgacacgtgtatcctacgaacatgggtttctgtttagttagcagtgggcgcactgtattatgttgtcttgttgacatgtcatgttttcaaagctgacgtgtttgtgtttaccagaattgtgtagtggagaagaacatttgccgcgttgaccttgatgagttact

SEQ ID NO: 201125 - DNA, 5239 bp, Zea Mays
cccgctcactccgagtctcactctcactccgtcctccctcttccttacagaaacacaactcatgcagctcgtacggcaccaccaccaccaccaccaactgccgcactgacacatgcatgcgcagaaagcagctagctagcggccggtggccttgagagccgctcgctagcttttaaaattagccaccaattcaatctctagctagcttgggggagctccgttcctagctacacgtacgggcggcgcggcaaccaccagccgtgtagccgacctagtacgttggagcgaagcatatatcggcggccgcatcacatggagagcgcgatggagaaggtgtgggagtcggggcggcggatgagccggagcatcgggcggggcatgggcatggaggcgtggggcgtcgacgacgccttcgtgccgcagcacggctcccggtcccggggcggcggcggcggcggcggcgacgacgacgaggaggcgctgcgctgggcggccatcgagcgcctgcccacctacagccgcgtgcgcaccgccatcctgtccaccgagaacgccgccgtggttgacgacgacgacgacaagacgcggcggccgccgccgccgcagcagcagcacttcaaggaggtggacgtgaggaagctcggcgtcggcgagcgccaggagttcatcgagcgcgtcttccgcgtcgccgaggaggacaaccagcggttcctccagaagctccgcaaccgcatcgacagggtgggcatcgagctgccgacggtggaggtgcggttcgagcggctgacggtggaggccaggtgccacgtgggcagccgcgcgctgccgacgctgctgaacacggcgcgcaacgtcgcggaggcggcgctgggcctgtgcggcgtgcggctggggggccggcaggccaggctgaccatcctcagggacgtgtccggcgccgtccgcccgtccaggatgacgctgctgcttggcccgccgtcgtccgggaagaccacgctgctgctggccctcgcgggcaagctggacccggcgctggtcgtcgccggcggcggcgaggtctcctacaacgggttccgcctcggcgagttcgtgccgcagaagacggcggcgtacatcagccagacggacgtgcacgtcggcgagatgacggtcaaggagacgctcgacttctccgcccggtgccagggcgtcggcaccaaatacgatcttatgacggagctggccaggagggagaagggggccggcatccggccggagcctgaagtcgacctcttcatgaaggcgacttcaatggaaggagtggagaacagcctccagacggattacactctcaggatactggggctggacatctgcgccgacaccatcgtcggcgaccagatgcagcgggggatctctggcggccagaagaagcgcgtcaccacaggggagatgatcgttggcccgaccaaggtgctgttcatggacgagatatcaactgggctggacagctccacgacgttccagatcgtcaaatgtctccagcagattgtgcacctgggcgaggccaccatcctcatgtccctcctccagccagcccccgagaccttcgacctgttcgatgacatcatcctgctgtcggaaggccagatcgtttaccagggacctcgtgaatacgtcctcgagttcttcgactcctgcgggttctgctgccccgagcgcaagggcactgcggacttccttcaggaggtaacatcaaggaaggaccaggagcagtactgggcggacaagcagatgccttacagatacgtttcggtgccagaatttgcgcagcggtttaaacggttccatgtcgggctccagcttgagaaccacctctcgctgccgtttgacaagagcaggtgccatcaggctgccctcgtattctcgaagcactcggtgtcgacaaccgaactcctcaaggcatcctttgacaaggagtggctcctcatcaagcgcaattcatttgtgtacatcttcaagaccatacagcttatcattgtagccctcatcgcgtcaacggtgtttctgagaactcacatgcatacgacgaatctagatgatggctttgtttacattggagcactgctctttactctgattgtgaatatgttcaatggttttgctgagctttccttgaccataacaaggttgccggttttctacaagcaccgggacctgctcttctatcctgcttgggtcttcacagtaccgaacgtcattctcagaatcccattctccattattgaatctatagtatgggttcttgtgacatattacaccatagggtttgctccagatgctgacaggtttttcaagcacttgctgctcgtgttcttgatccagcaaatggcaggtgggcttttcagagcaacagctggactttgcaggtccatgatcattgctcaaactggtggagcactatttcttcttatcttctttgttcttggaggctttgtcctgcctaaagttttcattcctaactggtggatctggggctactggatctcacccttgatgtatggatacaatgctctagctgttaatgaattctatgcccctcggtggatgaataagtttgtcctggaccaaaatggtgttcccaaaagactggggatagctatgcttgaaggtgccaacatctttgttgacaaaaactggtactggattggagcagcagggctcttgggtttcaccatcttcttcaatgtccttttcacactgtcgcttatgtacctgaaccctctcggcaagccacaagctgttatatcagaagaaactgcaaaggaagcggaaggcaacgggcattcaaaaggggcaataagaaatggaagcacaaaaccaaaggacggtagtcataacaaggaaatgaaggagatgaggttgagtgcacgtttgagcaactgttcatcaaatggggtttcacgactcatgtccattggcagcaatgaagctgctccaacaagaggaatggttcttccattcaaccctcttgctatgtcttttgataatgtgaactactatgttgacatgcctgcggaaatgaaacatcaaggagtgcaggatgacagactccaattgttgcgtgaggttacaggatcattcaggcctggagtgctgacagcacttatgggtgtcagtggagctggaaagactactcttatggatgttttggctggaagaaagactggggggtatattgaaggagacatcagaattgcaggctatcccaagaaccaagcaacattcgcaaggatttctggatactgcgagcaaaatgatatacattctcctcaggtcacagtaagggagtctttgatatactctgcctttttgcgccttcctggaaaaattggagatcaagaaataactgatgacataaagatgcaatttgtggatgaagttatggaactagtggagctcgacaatctgagggatgccttagttgggctaccaggaatcacagggctttcgacagagcaaagaaaaaggttgacaatagccgtggagctcgttgccaatccatcaatcatatttatggatgaaccaacatcagggcttgatgcaagagctgcagcaattgtcatgagaactgtgcggaacacagttgacactggacggacagttgtttgcacaatccatcagccaagcatcgacatctttgaatcttttgatgagttgctattgttgaaaagaggaggccaggtgatctactctgggaaattgggtcgcaactcccagaaaatggtggagtattttgaggcaattcctggagtgcctaaaataaaagataagtacaatcctgcaacgtggatgctcgaggtcagttcagttgcaactgaagtgcgactaaagatggattttgctaagtactatgaaacatcagatctgtataagcaaaacaaggtactggtgaaccagctgagtcaaccagagccaggaacatcagatctttatttccctacagagtactcgcaatccacaataggacagttcaaagcctgtctctggaagcaatggctgacttattggcgcagcccggattacaaccttgttagatattccttcactctgttagttgccttgcttctcggctccattttctggaggataggcaccaacatggaagatgcaaccactctcggtatggttattggagcaatgtacactgctgttatgtttatcggcatcaacaattgttcaactgtgcagccagttgtttcaattgaaagaacggtcttctacagagagagggctgctgggatgtactctgctatgccatatgccattgctcaggttgttatagagataccatatgtatttgtgcaaacaacgtactacaccctcattgtatacgccatgatgagcttccaatggacagctgtcaagttcttctggttcttcttcatttcctacttctccttcctctacttcacctactatggcatgatggctgtctcaatctccccaaaccatgaggttgcatccatcttcgcagcagctttcttttctctcttcaatctcttctcaggcttcttcattccgagaccgagaattcctggatggtggatctggtactactggatttgcccactggcatggacagtgtatgggctcatcgtgacacaatacggagacctggaagacctcatctcagtccctggagaaagtgagcagacgataagctactatgtaacacatcattttggataccacagggattttctgccggtcattgcgccggttctggtactctttgcagtattcttcgcgttcttgtacgcagtctgcatcaagaaactgaacttccagcaacgataagaacaagatatggcagcaaaagctcttgagagtttttttggaacattgccgtgtatatagggtattttgcacatcgcgttctcctttcattttttgagtccctttaatacattgtcgtgtatatagggtattctgcacatcgccaaatgtggtgaggtcttatacagatttctagccatttattgcaagagcaaaactatgatatttttccggatacacagaagagctacatattattatattaagaagagaggtctaacgtagacctgccacaagatataatcctctattggataagaggatataacactatcttcatctcctttacctatataaataggtctccttgtatcatgtaccacataatatctctttttcgtatctatgatcctaacatcct
